United States Patent Application Publication US 2013/0096032 A1 - sequence listing, part 37

SEQ ID NO: 1323 - DNA, 75842 bp, Arabidopsis thaliana
cttatatctaaatcgaacccttaattatatcacaaatattgagaatagtagtaaacattacatattttgtggtgtggacggttccttacccttagaaataaacaacttgtatgtatatgtatagaaattagagagcgttgggaattaaaaaaaaaaaggcatgtccctaaatctcatcaaagggtcaagtgcaaacacacaaacttgtcctaggaattgcgacatcgtgtaagagttcccctttggcctacatttgtggtaccacatctacttgattcttcaaatatatatatctatacccactagatgttcccaaggagcaagtcatccatcatcctagtaacccatgtcttataatcccattaatgaaaaaagtgtatatcgtaattttctgatagatctttttttacttttctttgtctggctaaaattatattatcttttaaattttttcatacaaaaatctattatcttttttaatattttataatcgcgaccgcgaaatcggatggtccccaacctttgaaagctcagcgtgagatttgaatattagggtttagtacaatttggaagcctaatttaagcataatggtccccataatcttcattatataagttggtaatagtacactaaatatatgaatttaaaataaaaacaaagtgactaactattaatatatgttagtgcagcggaccacatttgaatgtgaacccatgaaaggtctatagcgatcatgtttttattactaatctagtactaaatcgcattaacccaaattaagttactttttaatttgcattggaccaccactttaggaacgtatatacatacaactaaatgtacattttgcataatacatgtaaacgtatatatataatctcatgcattagtatacattatatatacgcctctaaatgtacattttgctatctcagttaccaattcaccaccctatagtttgaccttctatgcgaaactcaatcctcgtagatgtcttatgcccaaatttattttaacaatgttaaatagcgtctagatttatgaagaaaaaaaaaactttttaatcaaccaaatatcttttatcaaacgtagacaaaaactcatttagagtagaggatgttgactctttgttcctaagctcattttcttatggaaatatatagttttgtctttaaaaattttatcaaacgttattcacgatcaagaaaaaaatatagggtgaagacagtaaacatttttgtcgtaaatctctatatatatatcctcagtttatatatatgatcaagaatagcatgtgtttatttatactcatgttcatttttgcctcaacaataatttgttctttctaaataaaactgaaattaaagatcaaatttgtttgtttgatttttgttctttttgttttgttgctagagttagaggtagacccctagctcattttgaattctcatgaagatgcaaatccatcggtaccaatctcgaatcatattcataaaattaggtcttcataaattatgaagttcaaatcagaaactcaagatatcaaatgacattggctggttttctaacttatggatgctaatttttggctctgcaaaacctcatatgatgcaatggacggtcaagttttaagaaactaatatgaaattgggattttgttttcttttatgaattaaggttcaatttgagatatatatgattgttatagtttgaagaagttgaaagttttttaatctgttttaaagaatatcacttggagagtggaagatattcttaaactaacactaacgtaagatataatttgttcaatagaaaaaagtggttatccaagctacacaaactttttagacttatttctctcattcttctagagatttttaatgaaatttgtatatacttgaaatgcatataaaataaataagaaaacaatatctacttaatgtcctgttcaagaattattaagaaatttcactacgttgttaagtccattttactccaccttctccactggagttagactctactaagtcgcgttatcctgcagagtaaagattgactatgcattggaccttgtcgatgtgaaaatgttaaaaagataattattatgaaatctctactataacatatttggtttcctcaattttaaaatacctatttttttctcagtttaccattaaccaatctattccgtgatatttaatgtttaaacccttcttcaattctatttaacctacattctaaacaaggtgtcctcattttcaaaatcctaaactcatcttcatctatatttctattttctgccaaaatcataccacaaaaaacatatacgaaaaatgaccacggaaattgtcttttattgtttatttccaaagtcaaccaagttgactgttctttatataatgatttttttttaaaaaattatatattgagctaagaaaatattaagtgtaattttcaaaaagagaaaatatatttattataaaaatctatagtggtggatcaaaattctggtttaaattattgtatcaattttgaggttcaaattttaggatggaagagaaacgtagaatgcacttaaagttctgtcgatttttgttagtacataatccctcatataaccatacatatacttattgcaataaccatacgttaagaatagggaccaacttcatcggtgcttctgttagacatttcaagaatgatatatcacattcatgtatctccgtatatgtattaagaccaatgactaaactcagccattgtagatatagttcaggtaaaactgtcaattgtggatcagtatgttgaaaattgttaactatggttcgcttgtaacagaatataaatataataataatatataatactaatagtaatatatataataataataaaaagcaagcactaattattttatagaaacactttaaaaagtattaaaatctcatttaaaacaactctccaagttggtagtccattgatctacaagacagctccacctgaaccacatccacaatgtaaaatttaaccgtacacataaaccatgatcataagatgcaacatggtaaaatctctggtgaagttttcgtaatcgatgatgaatatatatatatatatatatatatatatatatatatatatatatatatatatatatatatatatacaatatatttttattttcaatctatttagtaagtacatatttgttatgaaagtacaaaaataacattgtaataggtcaagctctttgtggtggtttacattgtaataggtcaagctctttattattattttactatatgtatcttcttatccattcttatattttatatcatatatggtcaaaagaaccaatcgtatcacagcagcatttgttaatagaactttgatcttggtaattacaggttctatattgaaatcgcaggagccaaaccagcaacttgggttaattattaacttcattcaccaataataataattgatcgtcaagactatttcggacacaaagacataaatacttgttttctgctctccctttccctaaatgtatcatttgatactttctctttttccctccatatgccttttgtgtgtataaatatatgtatatgaataagttcacaaaaatagaaaattaaatcaaatcttcgcgtaatttctcatcaaactccacttttcttctttttaagagaatctagggtttcttctactacttcttctttcttctttaggtggtcaaatttccaagttcttcttttagctctctcttttgtttccaagaaacctgagaagaatttttgtagatatgggaagaggaagggttcagctacggcggatcgagaataagataaggagacaagtgacattttcaaagcgaaggaccggtttggtaaagaaagctcaagagatctcagtgttatgtgatgctgaagttgctttgattgttttctcccccaaaggcaaactctttgagtactctgctggttccaggtttgaatctttcctaagctaattaatttaccaacttattttaagatcgcatatttatctacataaatattagcctatatttcatgtttgacatattgggaaaagtggtatatataggtttcacatagaggagattgatttgaaattggctgagattgtttaattaattaaatcagtttatagccaattttgtttagttcttccatctctaacttagagaagatcataaaaaatgaatgattgtacaatactatatattaaatcaaaagaagtgattaatagagatgatcgcatcaaaaaataattgtgagacataacagttccacagattatatattatccaaaaaatatgatggaagaatgtgctaattgggcaaacatgattacgaaataatatacgtattaatataatttgattcttgaggacatatgtatatatgttgaacatatcatgaataaagagagatctttcatttcattgttgtgtaagtttgttcttcaacgttctggagataattaaaacatgatctacataagtttaaagagatatttaatacaaagtgtacaaaaaaactttagaattaacacctgcaggcttaggatcaaacaagtagatctaatgctcaaagttagcttactttggcactcataggagacttcattttatttatttcaaggaaaaatataataaattcaaggaaaacgaattttaaaaagggttcttgaatcaaaataattttaatgttcttcttttggaataaatctgctatttacattttacttaaaaataaaattgaatgttgactaaaataaaaataaaatgttgactataatacaaaataattttggtggttttaactaactgaacatattctggtaataacaaaacattatttatcagagaatttaatataaaagaaatgaactgtaaataatagcaatttaatttttgaaaaataaatccaattttaagatgacgatttttttttttttagtaattgtcaaaacagaacagtaaaatactaggagacataatttgtgatgacaccgtctaaattatctccaaggttcatgtaatatctaatgcggtatcattggatcaaaatgaacgacacaccaaaagaaaaacaattatctcaatatacacaaacatactaaagagggacaagaaatctactataaatagaagagtcagctttcgatcatgattgtagtaactaataatagtaaacatgaaactttgatttgattatgttaaaataaaaatttaagatatacagctaaaatcttgttggaaattggaagcatgacaagcctttgtatagagctttgtgcattgctttgtcttttggttggcggaacctaggactaacctcgatcgtcacatgaaaatatacaaacccatgaagctacttttctagcttgtaggcttaactagaatgttcaaaaatgaatttgcttgcaaacatattttaacaaaatttgagtagacttggtgtatcgattgctatagtctaatcaatacattcaattaatgtatcaaattgtttgcaaatgtagattaaagttctcgatatagagcttaaattaatttagaaatgtttcaactaaagtacaaaaatgattattcaatatcttcaatgtatttgttgagtgatgatagtatatacatcgagtgttgattgttgtttgatatactatttttttagcatggagagaattcttgatcgatatgagaggtctgcctacgccggtcaagatattcctacaccaaatttggattcacaggttcttaagcacatttaagacatatgagtatatatatatgaatcattgtttatggtatgtttatggtaaacttaactatcgtgtatcgatctttttatcatttgtagggagagtgctcaacagaatgttcaaagctcttgaggatgattgatgtcctgcaaagaagcctgaggtaaggacttattacttacgtatcatccaaacataaaatacatacctaagatatctaaatatgtacaagataagaaattgcatctttatcaaattataaggcacttaagaggagaagaggtggatggtctaagtatcagagaccttcaaggtgtggagatgcaacttgatactgccctcaagaaaactcgctctagaaaggttatttatatgtatacaaaaacattgtagtatattttctatacatgcatggatcatttgtatatacaaatgtgtatatctaataatgtgcagtttgtgtatgcataaatatacacagatatatagataaactacacctaatcatgtagtaattattgttttggtttgggagcacagaaccagctcatggtagagtccatagcacagcttcagaaaaaggtaatacactaattaagagactatcgttgttatggttgtgcctaggcctggacgtttgagtttacgggtccggttttagtttggttctattttttggtttttgagtttaggatccattcaagtaattgttttggatattgtttccacctaacttttggtatttcgagtatttttggttattcggtctaaaaataactaattattttaggtgtataaaatgtatttcgattcgctgaatatttcagtctggttcccgttctttcagttatgaagttataatccattcggatatttacgaattttggttcgtttttctattaagttcctctcggtttggttagagtttggttattttgcctaggactacttttgccatgcaaactcatgtatctgcctgtcttttttttcttttcgggtttgtacaaaacattatacttatagtagatcttcacaattagtagtctttgattttgagaaataaacacaaatacatatactagatcttgaatacttgactcgatatgagttaaactaataaatatgtgtcttttcttttgatggcataggagaaggaactaaaagaactgaagaaacagctaacaaagaaggtgaaagtgatgttagaatctttgactatatatataaccagtttcttataaaatgtagaattcacttaacttttaagagagattagtctaggcgctagtttgaactctctcaatcaagtgtcgattttaaatttatatttgaatgttaagcaatcggtgactggtaaatagtaactataacaagtattgaatttggcaggctggtgaaagggaagactttcaaacgcaaaacctcagccatgacttagcctccttggcaacaccgccatttgaatcaccccatgagcttcgccggacaatatctcctcctcctcctcctttatcttcggggtactttaaagtttgatttcacatagctacaaagatagtaaaaatataaatgataatttgttagtgttgatcaatgatagtaaggtaacatattatagtttgtatcaatatttatttatcgtgtatatgagatgaattaataaactgcttatagggatacatcacaaagggatggagttggagaagtagctgccggaaccctaattcgaaggacgaatgcaacgttgcctcattggatgccccagctcaccggagaatagaggtccgaaacaatcttggttttttaattttctgtacttaatatatagtaccggaataacttcttgagttaagtagaaccaatccgaataaaagaaaatatcttctggcttggcattctaggaacaggcttaagaggccctcaagtttcaaactttgaacgaatttagaaacattgtatgtctaatgtgattttgtatattgtatctacgattttcactttactgtttgtgaaaaatgtaatttcagtgtaatgaaaaagaagaaaagaactataaactatattttttatgacatattaatttctatagaaggtaggagaaaacgtttaatctattttagaagcgttttgtaaacagattttgctaaaacaaaatacttgacaatgtttggtaattttctaaaagtaattacgatatttttttcaaatagtcttgactattaaatatgccattcaagagtcgtcctcacactaagccgtgtgaaccaatttacgactctgcctcgccacgcgattcctccacgccttagcatcgccggagaaagaaatattgattctctgcattgaatttcattttttccgggagatagaaacatttgtcatatgaaaaagtgtgacttaaaaactatagattaaagtatttcatatacataagacgatgtcttggtttaatttagacctttatgttgccatttgtccattgttatcttttatttatcgatatattatagtttgtcttgaataaatcaaacttcgatatatttcattttgtgtttttccatttgtctaatttatttttcttttatatataaaaacttttcttttggccatgtagcaaatattgtttttttgtttatagtgaatctcatcacaataaatagccatttgtgaaaagaaatcatatcttcgtctatggtttaaaatttaaatgataaacttcaacaaatggccttgatgttgtaacttttgatacaatgtaatctaatcaaaataaataggcattatgaaaagaagtcaccttgttttgtctttgcttcgcaatttgaatactgtagattatttcttggtgattcaattaattattaatgattcatcaatcttcttattacaatatggactttacttcaaagaagatcatgacacgcgttaacttttaaacaagcattatgttgaatttcggttgatatatattaggttttgatttaatatattgttcaaactacatacgaatatttaacaaaagaaaatgtcaaaagagtaacacactatgtatattctctaaatctactaaagaaaaaggctttttcccaaaaacaaaatagaaagaaagtaaaagactctttcccaaaagcaagtgatgatgatttggccgtagtaaaatttacctctataaaaggattacttctcaatgtattagagagaacctaatatttaaaacaacaacaacattacaacacattagtaaaaaaaaaagaaaaaaaaatcgatggagacaatgaaggtagaaacaattgctaaggaaatcataaaaccatcttccacaactccaaatgatctccaaactctccaactctctatttatgatcacatcctccctcctgtttacacagtcgcctttctcttctacacaaaagatgatttgatctctcctgaacaaagttctcacaaactcaagacttctcttgccgaaaccttgacaaaattctaccctcttgcaggcagaatcaaaggcgtcaccatcgattgtaacgacgaaggagctgtttttgttgacgctcgtgtcaataactatcctctctctgatttcctgagatctccggattttaaaaccctccaacagttacttcctctggacgtcatcgatgatccttacgaggcagctactacatggcctttgctactcgtgaaggcgacttactttccatgtggtggcatggccataggattatgcatcactcacaaaatcgcggacgcaacctccatctcaactttcattcagtcttgggctgctatggctcgaggagaggctggcgacatagtggctgatcccgtgtttgcggcagcaaatttctacccaccagcaaatgagttatttaagtttccggttgacgaaaatgccaacaagataagccaaataacgaagagattcgtgttcagtgcgtctaagttggaagagctcaggaccaaagcagctagtgaagactttgtaggccggcctaagcgggtggaaagtgtcactgcgcttctttggaaagcctttgttgcagctgcatcctcaaatacaaatgcttgtgatatgaaggtattgatccagccctctaacttgcgccccaagataccttctcttttggcagaaagcctgatcggaaacataatgttctcttctgtggtcttgggtattagtcaacaagaggaaattaaaattgaaaaggcagttcgagacttacgaaaacagggagatgacttgcaaaatgtaatcaaagaagagggtgggtcgtcttctgcgatgattggttctaaactagcaaacctaatgctcactaattattcgaagttgagctatgagactcatgaaccctacaccgtgagtagctggtgcaaactacccctttatgaggccagtttcggatggggatcaccggtttggattgccggtaatgttgctcccatgttagaaaacgtaactatgttgattgattccaaggatggacaaggaattgaagcgtttgtcacattgcccgaagagaacatgttgtctttagagcagaacacagaactcctagcctttgcttccgtgaatcctagtgtcttggtctaattaggttcttattttatgttagtaatgatcaggaacaaatctagaaaatttgttcactgagggctaaaatataacaaaaaaaaatatcaaacatcaaatatcaaataagacatacacatttcatatgaaaaccctaaaacttcttataaataccgtatgctcgataattattttaaacctttttattactacttcatttgtaatagattaaacaactattttataatatagcaaacaagacaatcacttataaattgatctccaattcgattgcgtgcaactgtcttcaccagtttctaagccgcgaaacatctctaaagtttttttttatgttgtagcaaatggtaaaattaacactaactttaacagcctgtaaaccaaaaggaaatgcaagatggttttgagtttgaccatcaaatgggaaagatctccaagatttcagattcttaaatcgttcatctctgcggacattattaatgtatattaagttgttgctcaagcgacaaatctccccatagctgaagttatctacacaaaacttaaccaacttcaccaatttctcattgtcaaccttttggaatgaatcaagaggacttaaataagcaatacgtttaagtagatctgtggttaccttaataaatctatcattgaagtcttgaaccatagaatagtgcaaaaaatagttgactttatactgatgcatgttggttatattggctatatttctttgtttatttggataaacaaagacatcttccatgacaagcatttcaatattatgtttctagcaaaaatatgaagttttattcgtaagtgaatctcatccatcatccctaagctcctttagtagattatatcaatgacgtgacattcaaaatgtcttgatctttcgagtgtatagaaatcaacaaattctcagttaatcccaaaataagtagcaccaaatacatatagaaaacataataaaaaatgtttgagggtacttgagaagactataatacgcttgacgtgtttttgagtcttcattgtcttcgttttggatatatttaagctcttcagtgatagaagaaaataaattttgactataatacagtgaacaattggttttgatctttgtctggaaaggagcttcggttcaccctagttggaagtggcgaaacgagagctctatatatcataactaagaattttcaccaattagatttttttttttggaaattcagcttaaggaaatatcatttgcaataaattgatgtcatgttgtgaccatggtttttcactgtacttatgaaggtgatgatcattttactcactcgtctggaaatgactaaaacatattcatcattatttggatagacttcggttaaattatttattcaacagaaacatatattggaactcaacatatatagagtataatttttgtatagtattcataatttcatacaaagttcttttctcactttatttattcaataaaaaagacaaccatattaccactgcttcttacaactttaaatataaccactctattacccatccgaatcatgttcttgggtgtcttttgagatttgaacgtcacatccacgaggaaacatgagcatatagcttcgagttactgtgacctctgctttcattgaccacctacaaataatatatatagaagtaacgacttagactatatagtaacaaataaattgaatcatgagtcattaggtgataaaaaacaaacctatatctacacaaatggtggataaaaatggccatcaacaacttagcaaagtaagccccaacacaaagtctaggaccagccccaaagggaatgtaattcgtggagacgatcgcgtccaagtcgtttccctgttaataaatttagatatatattagaactttcagaatttgattagtgatatagggagataataacttaaggatgagtataaaattttaaatcaccttccaacgccatggattaaattctaaaggatcctcatactttgttggatcaaaatgggcactaggatagcccatgaagttccaacccgctggaattgtataatcaccgactttagtgtcatgatcaggttttctaagaattacaggcactgtggttgagatcctaagagactcattgatcacctgaaataaaataccgtatttgtgtgagctactacactatatgtgacaaggtttcttgtgattttaactaaaaccacttgaaaatagaaaatgttagatattctaatatccaatatatatactagatttttgtagtacagtaatacggtacttcaaattaatactcaataaattaataatttctataaattaataaattcttctagtcccgagttgggattagtgtaaaaaataacacaaatcgataaattaataagataattacttttttgaaaattcaatgtaaacatatattccattaatattataaattaataattatttaaatttatcaatatatatatatatatatatattatatgtaaatatgtttaatgccttgtgactttagtattgttttttctcttaaatttgtattaattcttagtagagttaatttctaatatttttactacatcaaagtttttttaattttgtgttattttcttaacttaataattcgttttctatttgtacttagttttagaaatataatgattataaagaaaaactgctttttagttaaaactttttaaaatttttacaaaatttgtctaaactctctataaattaataattataaattataaaacttctataaattcatataatttatcaatcccgacgttattaatttatagagattttactgtatcatgttaatacataattttggcacatacttaccatattggtgaacgtcatggatttatagtcttcccatgttaagccggcctcctcagacttattttcaaatatcattgcatgctctctctgaagctcttgcatgactttaggattttcacttatgaacttcacggtagccgcaagaatccttggtgttgtttcattagcaatcacaaagaaggtatatatgtactcaatcacattcttcatgctcattgtttccttttctccttctttttctccaaatataatcttagagaactctccaaactcctctccggcttctctcttcttcaacacttcctcctttagcaacgtcttcatcctttttctcgcctaccacgaaaacatcaccatcacgacatccattcgtttgcatgaaagcttgttcatatatagtgctagtatagtaagattactgaagacttaccttcatcatattatagacacctatcccaggtaagttgaaaggtaaccgaaaccagccactcggaaaatatctccaacaaagtgcgagttttttcgccgcctctggttccatctcgcccataactttctttgcaaggcattcaattagaatctgcaacgtttaatgatacaaatacttttgagatgatataagataccttaaattagagatagtttagacaacgtgacatattttactttgcttgttgtttccttgacgtcaagggagccatccctagctccttcctccatgtgtgtgcgagtcaagagatcaatgttttccattatcctcaacttcaaactttgtgaacccaacatctggacagtcaagttccggacatgtttatgtgactctgtgctctgtaaaaacaagttgttgtcttctccaaatagccgtgctatgctctttgtgataccaggagtacgatttgtctttgccatctccatattcaattcattatccattgagattataactttgcctccgaataagcttgtccgaaaaaaccggtccatgtctatatttatttaccaaccaataaaaaagacaacttaacctaagtaagtagtgattaagatatatatctctaaacatgcataaaaaaaaaaaaaaaaaaatgaggactctcttcttgatgaatgttgaaaactgaagagcgtcatgaggcttcatgaactcaatagtttctccaatgatcggataacccattgaccctggaggaagttttccattacactttggattgctccattgataaatcaaatgaaatagcttcaccactatcaatgaaactatcactatccatagcttataaacatctaccatattaatttctctctttcaactattttgtatgtgtttgttttatggtttatcgttgcatgattatatgagggaggaactctctttttatacttgcagctgtaatataatgtacctttttctgaaacgtgacaatgaacttttgttatatagtcctcatttacaaattcacgattttcttcataaagaaaagtgacaatattcaacattcttagtagcaccacttttatttacatttattgtttttagattttttttaaagatgtcttccctcggctaaccaatcttgaatgttgaatcaaatcgtggaaacataattttttttgctctttttctgaaacgtgacaatgaacttttgttatctaatcctcatttacagattcaagattttcttcataaagaaaagttaaagcaagttcttcgccggccataactagtgtgctcttcttggtttacattaaaatatgcatgctgccaatgggttttgaatcttaggtaagattgacgagtggattctccataatgcgaattagtttgctcacaaacggttcagggtcagctctattgaacaactgttgatctcgatggtttgccatcaaataagcataaagtaggcatgttgttgatgaatctcgaagccaacatgaaattgacaagtggattgtgataaggattgttacaattctccttttacaccgtttataaagagattgagccaccggcacatcaccaattcataactctctctctcactctagtgacacgtcaccgaccattagtttcttcacgcctaaccaatgagaaactattattttacacgagtcattattcacacaatgcataaagcctaatcaaatgagaaactattattatacacgagtcattattcacacgtgccaacattagcttcttcaagcttcttctttcacacctgtggcttcctctgctctattctttcttgtatacacatatagtggcttatcagattgactggtggttccattaccttgttcttggtacattatgaatgagtcttcacgttcgtttggtagattatattccattgaatttttttacattggatggtttggggttttgattatctcattcattgctgctcctccgctagatattgatggtattcataaaccagtttcttgatctcttctttaaggaagcaaattatctacaaatataagcttgatactaatttgttactcaaataacatgaagagtattcggctgagctaagacattcatctactcttattacctctactacaatttactaagcattagtagaaaaaaaaaaagttgagtcatccaattggccactgagatcatgttacaaaaatatatagtaccatagaattatgttcttaaaaatcactaaactgttgtaaaattgatcatcaaaaaaaaaaagacatattctaatacacaacctaataagtaataaccaggctataaactatttttgagaaaaggttagatctatctgcgacttgctcattgttgcatcttcaaccacaagccttatctttcgctgccttcaagttcttcttgatcttcaagctgaccttcttccttattgttagcttcggaatttacagtctcattgttaccattattattccctccactttccttgtgaccaaagaacaatcctgaagaagacaagtcctcttcatcaagatcctcttctttctctgcgttcttatactcctttaatctttcgcttacagcaccatccacccattgcggacaacggtgtgtcaccccaagatttgtggcatttgaaaccggatgggttcgcgtaatgcaagaacattcgggtacaggatgggaaagaaaactaaatgcttttgatcttttggaagattccattagaccctcgagtatgcttctctttagtagcttcctaactgatgttatccaagtgtgattcgcctcgtacatatggtctcgaatctcttccaaaagcattgcaatttgtttcctacaagtatgagaaatttcaagattacataatctgttaatatcttctaaatagaatgatgcattcattatattacctgtctggtctaaatgttttagcagaagcagactgataaagccggtgtcccatgaccaaactagcgaaactcggatgtcctttcccatcgcgatcaaaacccgagataaacacatctgcttccacgctaacaacgtaatctatcgcttcccacaacaacttatgggcattagttctcaactcaataaccgtgctttcgggctcgttgtcactctcggctacccaaccccaccaaccttcgatgttgtagtactttggtctagctggtggaggtggaagcggttgaggtctttgtcttgtgcttttcaatgaatcatgtttcgtttctacctcgatcgaaggaggtgtcattttcttgatatcattatgctttgcctcacgcccatacattttagcaagctcccagctagtacttagagaagtacggtcaacgacattctcaaacataccatgtaaaggaattaacgttctctgcccaccaaaaacctctcccccagcgacatatatgattgtatcccatgagtatccataagctcgtaaaagaataccaacctgagagacaaccaaggcatttaatgcgggttttcgttactttaccgagcgaaaacccgtaaatatttatactatttcttacttcttctggcataagaggacataaccccgcgaggcgttgctcggctgagtctacagagagcttccctttgacaataccacgttttatcatccaagctcgtttatgttgaatcagctcggtatgaacatcctttgagtagctccaaaatgcaataaacaagtaaatcgtaatacactaagaaatcatttctttccaaaactagacaatactataaactttaaagtacctggaacagttcagcacaaccatgataggccaaagcttctcttgtcatccctggatcataagctatgaaaggtcgtcctaacggtctcagcctgtaccataaacacatgaagagtcacaagaccgtaaagaaagaaaacaaacgataaacacgggcgggtcttaaagaaactagcctttgtaatactttagtggaaagttcttgaacctctttcctaaattgtaaaccgtggaaagcaactctacaccgtaacctctgatattcttcaagatcactaggaagtatagcctacatgaagaaaatcaatcagtatatactaaagagaaacgaatgttacgaatacacgaaatttatcgtttacttgtaagcatccaccgtgcgggacaactagttcaacgaccgagtgtttaataagaacaggtagaacatgatgtaagtagtaataaggtgaagatccgtaagagactttaaaagaaggaatctgtttctttcttctagcccatttgagattcttgggaagagttttaacaactctaacatcatttgcaattgtagccatgaagtgttcttcattgtacaaatacgcaaagctcttgaactgtgaactgtaagtaaacaacaacatcaggaatctaatctaacatagagactataaaagtttcagtgttaagtccaaacctaatccctttgctactagttgttgattgtatctcaggaatcaccaaagtggcgttaagaagccgagacacagctacaacatcaggaatctaaacaaatgaccatagttaaaacttataacaagagtcacacaacattcaatatacgatgtaatttttcgttcttaccgagtttctaatctcatggaaaccaccttgtattctaacaaaaacaaaaccatttgtccttgcaggaggatctgttacacaattcaaaaacagaacatcaatctaaattcaacttaagacaatacaatctaaaagattcagtaacagatccgacaatgtaggaaaaaaaacatgaactgtcctaacctgaatgaaaacctctaggattagcatcaggaagtaatgtctctacatgtcttgttggtccccaaagtcttctatacaatggtgtctgtaacataaaccaattgataaactttttagagtcatcataagtaaaactttttgtttaaggaaagaagaaacgattctatattggcccacttgatgaaataaaataaaatttcaagatccactaaacaaaagagaaaggtgagatttttacatgacgggcaaatctgggattgtcgaagataggtctccaagagaagatagtgacagggatagagtaatcggagattgagtcatctgtgaatccagcgagaagaaaatggacaagaagagagaaagcagagagaacaagaccaagaagaccaatccatttcatacgcgacttcaagaagactttaccttctcccttcatctctacttcaagatgtgaaagtgaagtgaagtgaagtggttcttttgctaatggaggacataacagagactaaagtgagagtagaagaaaagttgaatcggaagagagagagagagagaagagacacgtgtgagaacatgtctggagaagtagatcggtgttgatcggacaatgggttgtttggtccctctctctgaaaatctgctttcattgaatttacttttttttttttttttctatgtttctctgacgcgcttattctacgagtgatttacagttgttacctctaggataacttttttttttgtttcccattgtaataatattgagaaaaataaaatatatgtctgtttcaaatttgagaaaggacctataatgacttttaaaagatcaaaaataactcaaattgtaattttattatataattttttaaactacaataattcaaaagcgatgcaaaaaagtttatatgattgagttttttcatttatttatagtagtattatcttcgattttaaaaaaaaaaagacgaaataaaaactctctaaatccaattcgaaaccaataaatcaaactctttctcgtttcatgttctttttttcggtagtaatttccgacagcaagagaaaaacaaaatcttcaaatgggccgatttccggtgaagaagtgtttctagtaaggtagttaatctaatttattgtctatttttcttaaatctaaatggtcttattaagtttgtgaagcaaaagagatcctaaggatgtctcacaggaaggttggtccaaattcaaggcggagcaaagattcgatggaggacaaagagttagcagcacgaaacgacaacttttgtgtggaggtaagagtttgaaacaatttcacaaatatgttaatgtcgaatttaaaatgaagtgttttgctttttcctaattgtttttttttcaatttccgatcgatatgaagtgtaatcgttggattgtgaaggcatttctggaaggaaagagaagttagaagttagaaaaattttaattttaatttggcgtggttggtttgtttagatacggttatcaattcatagaaggttttaagacaaaatttttgaagttttagtagacttatatgggaatttaattgtatgtaaacatagtttaggcatcattaggtgttgaatagagagatatatgtgaatatttatccgagaaatgaaaaaaaaaagctcatgtctgtgatatagttttagagccgttagagaagttgagacaaaatgtcttgacataaacaattgatagagtaaaatttatataggaatgatttaactatataggaatgagttgtagctttttaagaatgatatataggaataagttgtagcttagcattagcagagtgatttaactaacataatgtgtttatttgattcatgtgcaaacatgtgattaggtagtgaaaagaggaggtaccctcctacactctatttggaaggaaaatcacctttagagaggaggagcatgcaccataactacactcttcataattttggaactttgaaagataataatggagatgatatctacaatgatatctgtgataattcacaagttggaatgatataaaagttagatgacagtggatatgtttggcgtgggctataaggttgtgcatcatctattaaatcacttaaccattataatcaggtttgataatgcatgattatacgtatagcagtcatggccagtcctaaagcattttttacgtctttccaaaatatactaaaagtaaatgtataatattagttaatctacaaaacatgaaaggaaaaaaaacactataacaattatctgaacgtgaaacaaaacaaacactataaaacatgaaaggaaaaaaaattgttaagaaaaaaggcaatttgcagcaaaaagaagaaggaaaggggtaaactgtagttgcggtcgtttgaacacaggaccaaggaattttcaaaagtcaacaaaaccatcttagctaccaaaatctattaaacatagtactcatatattcgtaatataagcggtggcctaaagcacatgctttagatgcttatggactggccgggttgcaaggttcttatcaagtataatcatacattatcaaatctgattataatgcttgtctagtctagggatttacaatgagaggtgggatcaatactattaggcatagttagttgatgtgacgaaagttaaatgattatattattgtgatttaagttatagaacggttcacttataatcttaattaactgtcagaactattattaatatattttttgagaccttccctaaacctgacgctttaatccatctgttttacaactgattttacttgctttgctgttatttaattttcttgatattctgttaatcttaattcgaaattgttagtctattgtgagatctgagaaatttgtgtaattcgattttaaagtgttacaacgatctcttatttgagaaagtggtctttaggttaatatgacccatatcaatatactaattgataaaattttaaatcaaataaataataataattacttgttatcaatctacaacaattagaatgagtttttttaataatgtggatggtgtatgctctattattagagatccatttattctaaaaaatataaacgtttcatattttgtctacaatttacgtaataaaatatcgattttgggaagatatatgtggctatggtattgatcatgttgatgccaacctttacaagttagtcatttgcattttactcagtaaaactttcaatggcataagagttgtgtaacaccccgaatttgaacaaaatgaagaatcaaatttgggttgacttgatcaaaataaactgtttaatttcagggtttttatgatcatttcaaaagcttgacgcataatctgtaaatagagaaaagttcatggactaaagtacaaaaccatagaaatatggtgctgctcgatttcatcctttcctatttcgtagggattatttttgtcataacttatatatatatatgtgtttcgatgccccggagatttaggagccgatgctctcaacaaattgaagttcttagtgagttttcgagacctttcttcatcatctcagattgtagtatttttgagcaatttgtgaccgaattttgttgtgacttaggttgatcgtgcttctccatactactgttttagttctgggtagtgttcagctttggtagaagagtttggtaagactcatcttcttccttcttcaatttttcttcatggaagtgagtttcaaactctttaatggtggatttcttttcagaaagaattagagcttgattcataccttgttagaaatctctattcaataaaatctaacgtcgctgagatctcatcaactggaagttagaattgaacgaaatctaattggtagatatttcaattttgttgattcatagtcaaatcgggatttaactacatcggttcgtagagttatgaaaccggttttggaatggccattctatgtataatacccattacaaatagaatttttaattggttgagttttgattttaaatcgatagtaattcgaccagttcagttagaccggttttgtaatttctgatacattaatatgattgcaattgaatttatatttcgtatggtatatagtacatatccacatatacatttttggtaaaggttttgtctaaaaatctctatactaaatactattaacattcacgcccctacagattttatctcaaccaaatattctatttctaagaatttacaaataattaatttgcattaaatacttgaattaacttttttcgctattacgaatacagtaacattcaatattgagtctttcctctattacatactctattcgttacacaaacattacaatattgagtctttcctctattacacactctattcattacaattatagaccaattacacctggatatcttttatatattttttttagaaactaatcataaattattttgactcgcattgctaaatcatagtctaatataccagttagaagattcaagtctccttttatgcgtttcttcttctcatcgttatccatttttgataatgcaattaaagacaattttcataatcaatgatctgcattcatgtcaattaaatttctcaattcaacaatatggtaaatatcaatctacatatactactttccctttacgaaagacttgtaataatgcaaaatcacatttataatagccaagatatttttctcttaaagttatgatccattgaatctttttttcgtgtgtagctcacgaaatttttacctattatctctataactactattttcactaccagcatttctcatcatcacatactgttatccatcacatattgttatcttttactaattcattacaaaaaaactcagttcagaagaatggcttccactttcgcatatcgtaaagatgtgagaccctacaagacttcctggagagtccaagtgaagatcattcacgtgtggaaacagtacaccgtgagtattcgtgaaacattggagttggtcatctttgatgagcaaataagaaaaaagtaaacttaccattttaattctttgcaatcgtaaattattatgtcttgctaatgcgtcaaatcatttttaaaaatgttggtaggagaagaaaatacacgcatctatgtaaaaagagttggtgtctaagtttgtcaaccaacttattgttgatgaatggatcttcattgagacgtttgttctcaattatgaaggtggccagtttcgtgcaaccaaccatctgtataagaagagtttccaaactggaactcaggttatgggttgtgaatctaaatctgattctaatttcttgacattggcaagctacaaaagaattcatagtggagagttgaatcctcacatcttcgttggtaagggctatatctctgtttcgtagcttttaattgtcatgttattccaaatgattgactatcacttgctcttttgtgtaacaaatgttataaatcagattgttatgattggtgacatggaagatctcgaggctaataataagccaaccaagaagattgaatttgaaatatgagatgaaatgtaagtttcgtattctatgtttttttgttgtgtttgtattggtactcatttctttttcatttactataaacagggatgagagattgattgttactttgtcgggtttgttcgttaaacaagtttttaggtcttctcagaaatctgatggcaagattgtggtctgcctcttacggtttgccaaaaaaggcttttaatggtacggagatgtccaaatttgttgtaaaaatgtatgtaaattcatgcctagtttttagtgtttttcaaatatcaggtgttcgaagtttatctaatttttttgacgcttaattcatatctactacacatgctaaacaaatgatgcttttttatataaacatttttggaattattttccaaccaatatgctatttcgatttcttatttttttctaatgaaaccaaatataacaaattcaatttaatttccacataaataacaagtaccctattttttttactatccaaaatcataacaactataatatatattacacaatacacattcattagataatacaagttttaaatctttactacctctacaaaaaaactcaaagcacaaacaaaaaaataccaaattttaataataaacttacatacaacaaatatcagaatataaaacataaactacccaagctttaatagataaaaattatgtgtcatgaatatattattcatatttatccaaaaataaaataaaatatattattcatatacaaataataattcttataaaaaactatctagaactcctcaatcaacatatccacccgcggtataccgcatgtcaaaatctagtttttatgatctacggttgaatttatgtgaattaattggtaatttggagcgtgtgtaaaattgcccttaattactcattctttttttcaggtgaattttagttcccttgttagttattatacatttgtataatattttaagagtatgataaaaaagaaagaattatttgtatattctgaaaattgatttgtttgatttcttaattaatttggttatgattatgataataagatatattattttgttaagaccgatgtacatttgtataatatataggaatcaaataaagagaaaaattgaattatttgaatatgtgaattccgaaaattgattatttgttttaatgtgattattctgaatatgattctgatgatgaaatatattattctgtcaagaccggtatcatcatacgattctgatttagctagctctattgagcaatctgtgacggccggcatagccaacatatatattatgtattctgttagtgatattgaggttggttaatgtcgtggaccgtacttccttatcacctcgttagggacaagcatccctatctggtctattatgtatatattctgttagtaaatggtttgggtcaaccaatgttggggttgtaccattttgacgttgcattgctggatacctggtcgatctttctattctgatattattattctattaagctaatatttttctattctgatgatttgatcatatatttcaatagtataagttctgatgtgttttattttatctataattaattgaactgaaatttatgtctagtaaaaccaacacgtgaacattattctatgtgggatcagaccgtgttggtactagttgtagttggagttgtagtctcacttggcaatttttcgctcacataagttgtgattctgtttgacgaggagaaaggtgcagttgaggtttagagtttgtttttcggttgtagagagagacttggtagattttctaaattttaatttattttgttttttaaattttggagtttatatgagatttcaagttcatacattataaaagttctagtatttttattatattagttttagtaatgattcaaagatgcttttgaaattttggggcgttacaggaattgtaacaccctgctttcaagaatatggtggtgcatgcggagaggtttcaaagaatgatttggacacttatgttatcaaagtgcacttatcattttggtcaaacatcttgggatgggtgaccttccgagaagtgattgttggaaccatgtaagtgaggacaaaacatgaaaaaagaacatgtggtgatttgtagggtcggttaaaagtctttaaagcctcctcgacatggtgtaccgaccgtcggacaggggtgggcccatgggcccagaaaagaagttggggcccactgataggggcgaccgatgcgttacaagtggtttagagtcgaacctagatgagtgtggagtcaagaaagatcacaccatcggtggtgatggtcttggtgcgcaacgaggacgttacgagcagttagtgggggtgaattgtaacaccatggtttcaagaatatggtgatgcatgtagagagatttaaaataattgatttggacacctatgtcacctaagtgcacttatctttttggtcaaatgtcctgagagaactacacagttaagcgtgcttgagctcaaaatgtctcaggatgtgtgaccttccggaaagtgattgtcggaccatgtgattgaggacaaaacatggagaaagataatgtggtgatttgtaggatcggtaacaagtctttaaaatctccctgacgtagcgtactgaccgtcggacaggtgggcccataggcccgagagaggacatggagtcgactaatgggggcggtcggagtgttacaagttttatgtatttatatattttagttctatctgttaggactcatatcagatttatcggggctttgtgggccttgtcttagggttattgttaagcccatttttctttctatttccttgtatttaagttgcttgtttctctgtaaacaatcaatcgaaagatcaattaaaaatcaacaatcatcttcttcctcaatttcttctgattcctcatctctttcttctacttgtcatctcttttctgttagttcttcgataagtccatttcgtgcttatcaaattggtgctttcgttgagaggtatggcaaacacaccgaagcaatctgaactcgaggcgagggttggggccgacacgccgttggcgcatgagacggcggggcagacggaggctcgccgtgagcaggagataacggctctaagagagaacatactaagcatgaacgccatggtgcagcagatgtatagttgcatgttcggagattgtagtgtgactccacccatgtgtttctctagttcggtagctgtggcgaaccaacaaatgacgggaaggcctcagcgagctcagatccgacgagaacggaccgggttctcacctttgcaaaccctaaaccgatagagtttttactacctcctccaccactagctgaagaaaagacgctagagcttcaacaaacacaagaatcaaacgtcgatgttcttttgccgaaggaaaactcaaaaatatctctcaggaatttcgtcgaacaagtggtgggtgctcggtctcaaagactttcacgtgaatatgggatttataaaggcttgagtgcaactcaaaaactcagactaagacggagtcatgttagcgaagttaccacaaggcttgaaaaaagaaaaatgaagaaaaaccatcgttctcaatctttacatctagcctttcgagtgcgttctccgagaaatcaattgtatcttggtgaggatagattcaattcgatggcagtaaatctggcgaaggaaaagcaacacacagggagtcgcagagctcgtttcaagcaacattttcaccaattttagaaacgaagagagaaggataggtatcgagtggtgatagcctcattcagatcgaagcataacaaatgggtggtttcaaagaaagtggagaaaacagctctcattcgttcacgttcccacctctaaatcaattgtcagtgagtgctgatagtgtgctgtctcacgctgatacaaaattcaccgttgatgaagaatcctttgagtgttctctggccaagcaagtgtggaagcctggtgaagtaattggtgaataggaacatgaaaacggtttagaaaagtgttacaagcttgttaacgtttcggtaattacacagagggttggtgaaatgagtttacaacaaggtgcaggatattttattacttcgattaagacacaaaacaccaggttgtttaggagttgatagaatgtatatgactggaaaacgaccctttgttgtttctctctttacgcgagtgtgggatcctggagaaatcttatgtgaatcagttcaactttggtggttaaatcattactttggtgaaaataagaagcagaacaagaaattatgaaatagaaatagctaaggtagttggatttttatccctagagcgtctatgtcatggtgaaaaagttcaggctctagcattccaagatggaactctacacttcagctttggacttgttaatcacgtttgggaacctggggaaaatttagatgttgtcctgaggaatccgataaattgttgtgaagattatctctttgaaaaatatgtcacaggagtgttgcagactgtttatcaaggcaaaaggagaccaataggaagctggattacggagcttggtgtgatgaggctgctgcaaagggttcctctcatgcgttttcaggaaataattagtatgttcaaagagtttggttttccagttcagggtcaacttcgttattttgttaagggtctaactctggcactgcaaactggtgtcgatgtgaaatttgtgttagattctgttaactgtaatcatgtgtggaagcctgtagggatcttggtaaatggtacttatatgagtcataaattgcgggttgttgatgaatttctggagagacaaatcctttcaagtgtcatggacttacttgttggatcagaattatgtgtatatgcttatttggtaaaggctagttcggagggaagcaacatgaatcttagaacaacaaagatgaatcgacagctagaattatccacacatggtcctgctgtggaaggtgttagaaggtttaaagctttattgttgagaattttggttaaacgacctcgtggcgtgaggcccaaacaagattggtggagatttttgcagaagttaatcatactgaaccatgtaccagatgatgaggctaggactcgaaaacaagaatacaaagtttcggcatttccacaccagattgaacgttttctaccaattcaccttgaggacaaggtgtatttttcaagggcgagtagtaataggtgtggatggttggtctttgatcgaggaaagaaaaatagaatcttaggatatgttatgagtatagttatatgagacatgaataaaacccagacccataaaaagtctcacacccaggtgtaacccttaaaaatataaaaactcagacacgagagtacgaggaacaaatatgaatgtaattgtgagaaaaataagaatgtacgttgaagtttccttcttatacaactcgtcttccgcataagagatccccctctttaattaataccaaataacttttgattcccaccggccatgatgctcacaccaaattgtgacataacgagtcacatccttaatctgaagatcccttaaacaactctgtaatatccatttaccagatctccacccccacataatcgagattgcgtacataaatcaggggatccgagatatccttaaccaagcaccacaaacaatccggaaatcaaatcactttgattccccaaatatatccatccaatagacccgacacaataaaaccgctggagaacagatcttcctccctattaaacaaatctgattcggttccccccaaaaggtatccacatctagaccatagagaaaaccctttaacaaatcctcaaatagtagatccgcaatgatccacataaagagaatcaggagatcataccgaatcgagaaatataatgagtcatctatccagatccaccataacttaccaaatcgatatatctgtggaacctttacttcaaaccaaagaaattaaaattcaaacttcctgattactgtaccattgcaaatcccatagggagatccaccgcttgatccctctcactacacaaagaaacaaccagaagaagccgatagcaagaccatgttcgatcgaatctcctcgtctcatgacccgatttcaaaaccctactgtcgccattcgagtcgccttcatcttttggtataaatattgaagatgtttatcttatttttttggcaaaattcaatacaagaaaacgggtcttttgttagggaactgcgacgaaagccacttcctcgcaaaacgcgcgtcgcaaattgaaatcggtagttattccctcgcaacttttgcgacggaaataatgtctcgcaaaacacttgcaatttgcgagggacaataaacgttgcaaagatgttgcaaattagttgtctcgctaattccttgcaaaagttgcgatggatttgcgattcatttatctgtagcaatttgcgatggacttgcgagtctacgtttaggttctagcaaatccataacaaactttacgatggatttgctatttagttgcgacactcttagtaattttataaacgtgattactgtagtatttagcttaatgaatcaaatcttaatgatttttttaatttaatctaatcctaattttatatttgaaaacagataagaaaacgtaattgaaagcttaaactcataatttagattgaaagtaggaagattcagaaacagaaacttagaaacaaaaaaaataaacttagaaatttaaaaacagaaactcataatttggaattgtctatatttgtgatgagtgaactaacaacagaaacctagaaagtgttagatggagtggatcaagtgtttgcctcagctccaacttcttcaactccgatagccacatgtgcgatcccagaagatgtagcaattgtggcatttggcacctcagatctctgattggcgctgaccggttagtcctagagggtccgactcaaaagaggacagcgaagtctagatctttctcggcaaggtagtcgaagtacacatcaaagctagtgatcttctccgcttggtttgcaataagaacttcagcggcagccagcttttgagatagtacaaccggatcttctctaggtagagctggactagtgtgagctgatgaggcttctagctgcaatgaaccagccccatatatcctccctttcttctttggagccacctataataaactcaaaaccagaaacaaatgccaagtcactattacttaatggaaacacaacatacacaaacaagcttgaatcactattacataatgcaaccatgataagcgatctgtcacaatgccacaatgccaagtcaaatgcaacgacaacagacaaagtcagacaaaacatcgaacacaatgcaaagtcacaatgccacaatgccaagtcactattacttatgtaatcacaacacacaatatcaaatcaagacaaaacatttaacacaatgtcaagtcactattacttattggaaccacaacacagaaaaacaaatcaagacaaaacacgatgccacaatgccaagtcactattacttaatggaaccacaacaaacaaaaacaatcgatccaaaacacttaacacaatgccaagtcactattactacctggaaccacaacacacgaaaacaatcgatccaaaacactcaacacaatgccaagtcacaattgggaaactatatagaagagagagagagagagagagagagagagagagagagagagagagagagagaatttactgcatcataaatcttgttcttcgccttaacagataaacccatgaagctgtgctctctgtcgtgtcccttcatgacagctgagactcctactcttgaatcctaggtgatagttccttgtagatcttataatactcgtctctcttaaccttgagacggcgtactttcatcttttccattcatttattcaactttttcaaatcaagtcttgaaataatatatcataatttcgggaaactttcttttattaagaatcaaaaaaaaattgtcttaaaatagtagcataaataaactaaaatcggtggataaaaatgtataaagaaatcgtgtttagaaatataagaaataacgataaatcaaataaaaccccaaagtccccgaaataacaacaagacagctactcaatgataacactgtattttactcattttaggtgtatgtttatcatcatttagctgtgcatttgctcattgtatcagatcattttgcaccattttagcttattttgcatacttaggcatctaggatcatcttgcattcgcatttcatgttttggtgtgttttcaggtgcagaaggatctaaaaaggactctactcgacctctttactcgatccaggatgctcagaggaggctgcagtttactcgacccttttattcgatcaaggcaaccttagatgaagcagaagattgatctactcgcccctcctactcgatcctctactcgacccatttactcgaccaagggtgaccaactctacaagacttgttgagctatcaaagcgtcttgggatcctcctcattccctactcaaccagacatctgagcatacagatagcagaggaagaagcatctactcgaccaattgatcactcggagcataaacacaaaggcgcagactttgcagcaccctctttactcgatccccaagatcaagtattcgccgaaaccgcctcaagtctcttgtcttctagtgaatctagggtttcaacattttactataaatagataactttggggtttgtccaaaggatctagtttttatcctttagtttttctttgtgtttatgaatcttaaaaccttaattactcttaatctatttcgtttttgcatttgattgtttaaataaagttgtttagcttgttcagatctacattttggtatgatttcagtaatttttgggtttgtgttcttgagaatgttgcttgagtagtgattagggttcttgaggatggactagattagggtaatctctaagttagttaggtggttagtgtttaggtttgaacctttctggattcgcttggcccctatgcgattttcgctggctaatgtggagattcgatcatagacgtccggcgtccaaaagacgttcaaatggatgtctgatctacgaattccagagatttgtagactcgaccaagacattggcttgactgcttattggcttttgtaaattgtttcttaaaacctgctctgctatgtttcatcaacgacaattgagattaggaagttgtagagttatgggggtctctgtcacgacaatggattgacccggtttttgaatctatcgtcaagggtacctacctttcacctattagccatctgatgaaccctagagtttcccttatcaatgaatccatccttaggacttctattagacctatttgtatcccttgttgattgcacttttatttacctgttatttgtatcccctattgattgcattttagttctgcttgttggttctactcgacccaatgatcgagtagggcttttaagttctcatttttacttgtttgaatcctgtcctaggattgttactagaaacccaccatcattataatctggcttgacttagttgcttctgtacacgtcttgattgctagcaataacagtggactagattgacaccccctatagctgcatcgacatgttagtgtttgtaggagaactgaactgaatcacacattcaacataagtaggcttaaaaaacatgcttatcactcaacattctcttcctcacctgagggaaaagaaaagggggtgagtaattaattactaagtgaagacagttaaaactgtccaccgaatcacaattacacgattatactttcacacaatatccatttcataagcatagactcaaacaacaagcatatagcttaaactttcgtagtaagcaataacagacaagcttccgtcttgctcaccgcaagatcttttacttttttctgagtttttaacatatgttaacttatggctcctcaagccaatttatggaaaaccaaggcccgtagctcgatccttcctctcattgctcgtcagcgattaatgacctgtaatgaacacgtcggttccattacattccaacctcttcaatcttatcctttcttttcatattattattattttttatttacttttttctatttttattttaaaatacgtccttaaagacgtcaagcaaatcaatacgcatatcacgctaacaacctaacgcataatatcacacaacacatattataatattttatcaattaatttctaacatttaacaatcagcacccaatttctaatcctatacaaatgaacttcaaaagtacaaaagtagaaaagtgatactatgtttccacatatcccgctcacaccttagcaactcggttggataacacggtttaggactagcaacaacggaaccggctcaataacgatctcaatcttcctcaataagctttctcgtcggcttcacgtgacgggatgaacagcgaagtggaggattcggtaacacagatctctccggtgaagacgattcacacgacgacacaagatggacacgaacactatcaccagtggcttgagggtggtagaattgaggtctagggtttctgttgaaagtctcggaacttgctcctgcttcttataatcacatgggaacattaggtttttacttgggtttgaatagttagtgggctggacttgggcttcatggtctaattgtaaaataggggtgttacagatctccttggattttccatcaatgaaaccaccatcatgttttctatgtgtctaatctaagagcacaagaaaatgtggagtagtttctccggtcatctcacactacaacagaaacaaatcaggttagttgtttgtgtaacaaagttgactaagtaagcgtgtaaaataacttacacgtttttaggcacgggctttgtaagaggtctggcaagacctgtgtttatgaatcccaaggccatccggatcatgatatcttgaattcctactgttgatactcttcagttttgacttaggatctcgccaaaaactaacaagaccggcccacacttcaggatccaaccatcgaggcatcgccaaatcacccttttctctccactttcccttccaccgagaaacttgatcagacatcctctccttcagctttgcatcaaactcaatcctaactctcttgtttattgctttgtcccaattatacacttgctacaaaacagacacaagtgataacaaaaattagttggactaacagcaactaaaaagcttcacacaacaaaacacaatttgaaggatttacatcaaaggtttcaaaccagcgatcaaccactggttcaggtgtcattgaccaattagcatgaggctccttgaaatctctttcaaagatgctccggacagtggatacaactgaagtgtcctcgtcaaatcgagaacaagcctgagaagaagaaagcggcggagaggtagaacggcgatggagaagaagaacggtaccagagacgaaaatgaaatcgagtgagaattagggtttgtttgggaggcggctgggtttgagcttcgctcaaactcgatcgcgatgtatatgtagaaataaaacgcctcgcaaatccctcacaaatttgcttgggctttgcgaggaaccgacaaaccaaccaatcaaatcgctctagctttgcaagggacttgcgagggatccgtagcaagtccctcgcaatattttagggttacacggtgtctcgattaaggttttcagcttacactgcgagggagttgcgaggtcgcagtgtagtaaatccctcgcaaaatgttagggatttgcgtggaactggtttaaaaataaaaacaaattagaaaaattatgataataataactgaaaaatacaaaattatagttatgaaccttaaaattagataattataactttaaaattattaaaatcattttctgaatttattcgtttattatattatatttcgtaaaaacatcgaaagtagacaacatatagtaacatttattctgattcattttctgaatcattacaatcatttttggactcaacgtcttcatcggattcgccgaattcgtgtgattgttcttcttctttggaacagttatgagtgatgtcttcgaattctctgttatgtaggtcaatgtggataatatcttcttttgttatgtctggtatggaaatatctctgacacttttttgttgcatcacaacatcatcaactaggccaactatacgacttctgggattaactttaataaccgataaccaaacttcacgcctaggcctcacacgcgggtaagatagaaagcttacttgccctgcttgtgatgctagcataaatggttcaaactttgaataagtcttgtttgaattgacatcaaccatgcttaagttatttacccgtacccctcgaccaatcacaggattaaaccaatcacacttgaaaagaacgcatttcaaattcaaaagtcccgaatattcgacttttagaatttgttgccgaatcccataaaactcagtttcaccttcgacatggattccataatttgcagttgctcttcgacttccatatggatacgtatgaaaggtatagccgcgagtgaagtacataggtgcggttgtgatcttagatcttggttattgaacgatctcatgcaaccaaagtggtaaaggtttatttctacatccgttagtaacctacataaattaaatgttaattaagtttatcatttcatcttgtagtaattaagatatcaaattttccaaatattatttacatagtattttaaccatccagcaaaatcacgatctttgtaagttttatacttttttcttataatccaggacatgcttaacggatttgtgaatcaaataacctacaaattaaaacgttgatgcttagcttctttaattagtatcacactaattattaaatattaaaaattatgaataaaatttgtgtggctttatacctttcaaattttttaatgtaatcaacatttcggagtatataattgtgagctagtcgagaaagcgcatggtcgtcccaccaaacttctttcaacttttctgcgagtctacctatttgggcaaaggtatctagaatattaagaaagttatatgtaggtgcaatgcctccatcatcatatcgtcgaggacgagtctttttggttctaacgcttggactaaagtaatacgatgtgaagtgggatgtttcctcggttaaacttcctgcgactatcgacccctcaactctagcaagattttttgcctttcctttaagagatttcatgaatcgctcaaaatgatacatccatcagaaatgcactggcccaccaagagcagcttcatgtggaagatgaatcggcaaatgttccatcacgtcaaaaaggcaggagggaatcatttctccaagttacagagcaacactgggatattcttgtctaattgttctatgacatcagttgtcaatgttcttgtacataggtccctgaaaaatactccaatgtctatcatgtatcgaattaatgtaagttaatagtcgtcgattaatgattgatttaaagaatatagataattattacctgcaattgcttcatgaatatttgccggtagcaactctagtaacacaaatggcagtaatcgttgcatgaatacatgacaatcatgactcttcataccagaaaacttttgggcttactctacgcatcttgaaaattttgacatatatccatctgggaacttcacttcagcaacaacccactcggacaacaccttcttttcattaggagacaagcgaaatttcgaaaccggtaattttccatctcgtgtaacatgcaactcaggtctgctgcatatttcagccaagtcctaccttgatttcaaactatcttttgttttgcccagcacattcaaaagcgtattcatgaaattatcgaaaacgtttttcttgatgtgcatcacgtcaaggttatgccacaagaggagatccttccagtatgggagttgccaaaagatactttgtttgtaccaattgtgagtgcttccatattcatcaggcatattcaccagggtgtgtcagttacccccacgtttactggttttctgagcatcataataatcgatttgttcaaacaaatcatttatagaaacaatttatggcggaagaagacggactactttactcttcctaaaatatttcttgttcctctgatacggatgatgtaggggaagaaaccgacgatgacaatcaaaccaacatggttttctaccttttttagctgaaacgcatcggtacgacccatacagtagggacaagataatctttcatgcgttgtccatgccaataacattccatatgccgggaagtcactaatcgaccacattagcactgcccgcatattgaaattttgtttgctcgagtaatcaaatgtatgaacatcttcataccacaacttcttgagttcatgaatcagcggcaagaagacatcaagcgctcgtttcggatgctttggcccaggcactaaaatacttaagaacaaaattttgctttgcatacacatatctggaggaagattgtatggcgtcaagataacaggccaaagagaatattgtcgtctagacaaaccaaatggactaaatccatctgtgcataagccaagatacacatttctacactagttagcaaagtcagaatataccgtttggaagtgtttccatgcctttgcatatgatgggtgcgttatttctcagtctgcagttgtatgttgagcatgccatctcattttcgccgcagttctttccgattgatataagcgtttcaatctatcaattattggcaagtaccacatctgtttatatggcactcgcgtccttctactagtagtctaatatttcggcttcccgcaaaacggacattcctgcagattttcatcatctccccatagaatcatgcaatagtcatcaattatttatgatggtaatccaagactcgaaaccaacttctgtatttcataataactctctaccgatatattatctggtggcaaatattccttaattaattcagcccatgaatccatgcaattttcacttaagttattatcaactttaatagtcatcatcctagatgccaaagataacttaaaatgcccttgtctacatccctcgtagattggttgatttgcagcatctaacatatcgtaaaagtgttgtgcatctacgttgagttcttcactaatattttcaggaaatgcagcaatagttttatgaaatgcattcgtaaccatatcatgaaatctattttcctggttatgcccataaacaattttatcaggtacttgctgaccataattcgcatcattattaaaattactaggttgctcgacatcataatttgtattactagttcctgtgctatctctacaatcctcttcatgacgtaaccatacatagtagttttgcataaatcctctattataaagatgcttcttcactacattaaattccaaatatttcccattgagacacttacgacatggacagaatattgtaccgttctcacgagcaaattttttttgtttgtaagtaaatgttgtgatttgacttatgattcttacatattacgttggttatttatagatgccaaaaaaaaactattgcaagggaattgcaaggcagcttgcgagggatttgctagaaactgatctttatttgcgagggaagcccacctaccaaccagatcagtaagattatttaaaacgtgctcacctaacccgtatagactcgcaattctgtcgcaaatattgttacagaataacaatgcgtcgcaagtgcatcgcaatatgcgaggaatttgcattacctgcaactccctcgcaaatttgcgacgcttttgcgaggaatcctgctttccatgcaatttcttcgcaatattctcgcaactttgtgagggagttttccgttgcaaaatttgtgacagagtagcgaggttgtcctcttccctcgcaaacttctcgcaagtctgtagcaatgtgcgagggaaattttcgcaaatcgcctgttttcttgtagtgttaggtctgttttcttgtaatgcttaattaagcattggtattaggtcaaaacacatgttttacaaagattaagatttaaataaatttagagcttacaaactcaaatataaaggcatctagagatgcaaaaaagttaaagataggatgaaccgacaatggatccatgaaatttcggagacaagagttggaacacaagttgccacaagcgaagaaatggtaagtcgggatcatatccacgtactcttcgaggattgaggaattagtaacattcaaaagaactggtgacgttgaaaatacttccaaaaccttcggatttgaacattgaatttggttgcaatcaatgaagtggtaatcaaatattccttgaacggatatcaacacaagcctagaaaggaggccaatctttgtgtggtatagactcagtaaaagaaaagaaatatacagattaatatttggcctatttgatgaaaagtatgggccgtcacttttgaagttgggccaagaaatgaaccaaaatggatctaaattggaaaggcacaatagcacaaaccctagtttctctttgttggctcggaaaatgatgtttaggctgtggcggctgggtggcggtgatctaatgatcaaaattgattggggtatcattagaggttgtggcatcatagcaatcaagctcgacgagatgcggttcctcttgggaagagtgactaagggattagtgatagaggatgcatgatggattatgttaatcctttcgttgtcattttaaccactaattcaagcaaagctgaattttggtgaggtcgttggttcgaagcaactagccttcatggatctaggtgcatgtgagagattaaactcagattgaagtgttaaaccgggtttggagttgagtgattttgccaatcttaaggtggagcaagattcatcggtatccagttgaaagggggaccgactgagaagagactataaaaagtttcaagagtatatctctaaccaccattattaaaagaagattataaacagtaaaacaaagacgagagagtgaaagaagatttgctaatgtctccgacggtatcggaaaaaatattgtggagtcttttttgatattgatgtccaattttttattttattttttatatatattgtgaattagattttacattatacgtgtgaaaatattgcagatgtttattgtaattacctttcctctgaatatgaaaaaaataaattgagatcaaagtcgagttacttatatattaattaaggtgtaatataaattattattaaatcacgataatatattttgtgaatgaaggttaacaaaagaaaattagaaaatcgaatgtttaatattagatcaaggtatgaactatctcaacatcccttcaaaatggactttagaaagaaaaaaatattaaattaatattgaatcgattaaaggtcataaatttagtgcatgtagatcgcaataaacccatatgaatatttttatatggcaaggttaaatgtatggatacagtcacaaatagatgacgattactaggtgtcatgtgtacagtggtaagcccaaagaataacctagattatgacattttgattgtaaataataaataatgtctagagattaactaaataattgatgtatcgttgatttctttttgggaaattttaaatatctccattcgatttggttaccgtgaaagtttagcacaattgttttattaattttagttgtgttgaacatatctagtgtctctcccaaccttaattcaatttcgatactaaatgggaaaaataattcggaatggagagacatcttgatcatagcactccctttgatggccatgatgttgtgttcatggaagattgttttacaataacagatttgagtattgcccttgatcacagtaaactcaaatgatgggatgcctgaaatcgtacatactttatgttgatgtaacattgtctttagggtttttatgtccggtgaggtggttatgaaaaaaaaaaatcaatattttgtagaagagttttgccaagaatgaaaaacttaaaacaatggcacatgagtatttgaaaatatctaatgttgaatctaggttaaagatactatgacttcctaggtctagtaatgtattagtgtgtcttgttctcatatcactttttggactatttcctcaatttaaagtaagcaataattatcataaggagaaattagagtataaatgagttgatagggaaacacactagatatcaccaaccacaagaaggaccatataaaaatgcatgtgccaattatcacacttgccataccggtaaaggtatgactctaattttggtttgttttaaggaaaatttagtttttgtactataggacatttggtgagttgattcgcgtacaacagctcatattattgtggcaattcaagactacctccattaccaaaaaccttatgacgttgaaatacttatttatgtaggagatggtcatggggttagagtgtaagcaaacaaaatatttataattttggtaaagatcgcaaattttatagatttgaaaggtgtttatgttgttttgtgtattggacgtaacttaatatcggtatccatgtttgataagcttagatacttttgttcctttagaaacaataaggttaccatttcagttcgttagataattggcaggggacatttggcttgtccatataatctgtatttgtagactttgttgctttctaccataaaataatacatattaatacacttgaaataaaatgaaagtttaccaatgagacttatattgtgttattatatagacgtttgtatcgtgtctctcaaaagagaactaatagtcacattagcgagtcactctaattattctataaaattgaatccacaatctacatcaaaaccactattcaaatagatcggcaatacaaatcttgacaactattttcatcatcaaaataatgagcttgttgaattttactggtgccataaacaataaattgtatcatcgtcaaaactcatacagttcaaccattttttcaaattgtattggttgaaatcaacttttatcaaaatggtttttattttgttgactgattttaatttgagctcaaaagagttcttcttggaaaatgttatttacatatgtgatatgatgtggtttggcacaaacttttcgtgaaaaactatctgttttactgtttacactacgagagattaaaagtaaagaaaaacttgtgaattcttgccactctataattcctccaaatacactaagaaagccggtcattcggttggagaagataccatattaaccatgtctgaacaatctgttaagaaaactacatcttggttgtcagcaccaatcatacacttcatcgcccaaagaagagtttccacttttgcatcttcaaaatggatttagatttgctgaaattttatgaagttagttaatagttttattattggtattatgctacgagtaaaatttactaattatagttatactcttaatattcaccgcaagtgtacaggataacacagtacgttttagggatcgaattcataaagaccaaagaaacactcaaaatatatacttgcaactactgaaactaagctatgacagaagggttacaagaattcaagtaattttatagaaataaaataaataatataataatggtcaataggtgatttggcctaattcatatagggtttaaaaaaaattaatgacggagaatagttagagatcataacaaagaaatacacttagatttagcatagaatcgatctctttggggattccaactgttcgatagaagtacagatcgatcagtggagtgcaatactgatcggtaaaactttatgaagatactacttacacatgacgtaggtgatgtgctatttattttgcctcaaggttttaccttagagaccatacattaactgcaaatgcacattaattactagtcgtatttaaggatctatcccacaaagagacatagctatatatattgaatttcaaagaagaagatttagctaagacaaaactaaacttgggggttttggttttggttttgggtttcctaatgactaagcaatgaaataagtaatgcaagaatctaaacgtcatttgtaagctatcgattaaaggcgttgcaagttctagagtttctcagggtatcatagttcttgactaactaatgttaggatctcttatctaatgtttttgatctagttcctagctatgaatcacaaataaacgattaaccctagggtatagacttaatcggaaatatccatatattgtgttacttaacttaatgtaagcaacaacacatagattaaagcattaggatcgggttcgctaagttctctaagctccaaaacttaagttgcgcatgttacgacattaagattcggtaacactaggtctgaggttaagtttacccagttagagctcctaccctcttggatcagtgtttggttatcagtccaaacaacttgtactaagtaaacgatgtctcacaagaatttaagtatgaggaaaattaagatcttacaatctaacaagaattgaacaatgaatacccttaaatcagcccataaaccccaacaaagagaactactctcttattatgcaagtaaacgacatagatatcataaagtatatcatcataaacaaaacaacaacaataaaaaaaggttcaaaggaaacttctctagatgtcacaaaagataacttttctccccaaaagcggtacaagaaagaatataagagaagagaaaagaaagcaatgaagaacaagagagatctataaaagacgacttctataagattggaggtggaagacgaagagcttgaaggctataggcgtcaagcttgctgtgaagagaggcgagaaaagaagctctaagaggttgtagggttttcatcttaagttccagtatttataggtacatgtgatcattgtagaagaaggatcaaaagttttcaaggaaatctaccaaaggttttgaaatattaaagcataaacaataaagaaagaatatgaagaagggaagcacaccttaaagctataaaatcgtaaaggtaaagtgtgccttgcggctaaagaatcaaacatgtatctatcaggattaggacgaaaccctagaaataagaaaagacggtttaacaaaggtccaatcgatctgtggccggcatctttcttaaccggtcggttcagtgttttcaccaatcgagcctcctaatcggttatttcttcttttgacttttttgactatttcttccttcaaaagtccacttacggtccaaaggctcaaaattttaaaaaacacttgaatacatcgaaacaacttgtttccaaataaaagactcgataaaacatacaaacaaaacctataaaatgagttatcacttaacatattatgagatgcatatgttaccatttcataaattatattcgcaattgtttaattttcaaaattggaaactaaatacttttaaatatcaaaaacttgtaatatttctttttgtaaataatatattttcccatgaaatttttttatcttatcacatattatatttttctaactatgtacaaataattatttatttatagattttatttgtttttatgaagtttttgtagtcggggagccgacatgccaactgatggaaaattttgcattccgacaaagcttattagttagcctgcttataaacggtggtattgatattttatgtccacacataacccatggtggacaaggtagagctcgacccgcggggtttggtccgttttgagacatattttaaacaaataacatataatttatgttaatcaaaataaagaacatctatttcagttttcatactataaatacattttttatttactttattttcatcgtattttaaaaatataaaatttaattccaatcgtcggccaattatcatgatggacctaacggggtaggtccgatcaaaagtgtttttcccatggttctctcaagccagcctattgtgattcagaaaaataatgttcatcgtggaccaatccaaatatatgtggaccggcttagatagacgcggaccagcttagatggatgcgggccggttcatttgttatttaggattttgtcattctaccttgtagttaggtatagtgcattttgtttttcagttaaaagttatttagtgcacatgttgtatttttgatatgatgatatcaatgaatagtacaaaatatgagtaagtttcatttcaacttgatctagagtgtcaatggcggctttgagattttagttatttctcgattctatttttcccaaaaaacaatatttagatttatcttaaataatttattcatcttttttattttgtgaaacttttttttgtagtggatatttggtcaaaaaaggatttatgaaacgatggttatatatcacattttaaaattcgtacaaaaaaagaaagaacttaagaatatgaatatgaaaacatttaaaagattaaaaaatggatatttttacgtggacacaaatccaacccctaaaagtgcaaaaaaagtgtatatactcttcttagttcttaactattaaactaaaacaaacattttcacatgttttaaatatgtgatactatataaggggaaagctgatgactaacctgttttcaccaatcaatatgcttcactttctcagatgttatagtgaaagcttggataatgggatatggaaaggtggctgttcggaccctccattgcatcttgattggaaagtaaacgaatttgctctgatataagggtttggctcagaagatttgaagccgtcgattttgggtgggttctataagatacgccaatgaagtcattgaaacaatatatgatttttgattctttgtttataccagtttgcttaaatgagtgtgtccattatgactttctactttcatctaattaataaagacaatttcaagttaaaaaaaaataaaaggttatataacaaaagcaccgtttcatatttgtagaaccgattcgcctttaccgagaaataatgcatacattgacttgaatagtaatcatgttttggtgaaatactatcgttagtattcaactaggtgtcataaccggtagacttaacgcttgaaaaaatattgtttttttttccaacattcatcttcggattgcgactagactagccatcggaaaggaactactttagaatactttttggcgccgaaaactcctttcactgaacgtgacaacaacagttcgggatgatgatgttgggactatgtttgattaaggtaacattgataaaaacaagagatgcatgaagacaaatataaaattttatgcgtctcaaaagtatatattttctagaaaattcaaacaatctgtaaaatacttgggttaaggaatgtggtgtagagggtgacataagcatttggtaagggttccggaaatagattacattacgaaattataaaaacttaaaactatattttgcgggaattggttaactagaatgttttgaaagactagaaagatttctagagaggagcggaaaaatttaacttatattcgtcatcgtttgataaatttctattaatttatagaactattctattaaactaaaaataatggattttgtgcaaaaaaaacctcttaagtcgtttatttttgcaagtttatgtttcacgtccaaaaaatacaaattagttctattaagaggtccactaaactaataaactagtcttcattattgaacctcttaatttattaaactaaatatatatacatatgtataatttttattttttttattatatttttttttttgcttttgggtccgattggattagtttggaaagatcgtatcttgattttaaggcggatggtaccggattccgatgtgtaacacactagaaccgcgtaaaaaaaattgttatgatgttttccacatatgacatatgtgagttttggtgaatgttaccaagcaaatacaagataggttgtgtattgatacattaaaatagtttgattgaccatgaccatgggttacttaaaactaaaccctgaaatatattggctaacaaaggggaaaacacacaaatttcgacctaaatatatataatccaacgatggtgagaatgagaaagtatgcttacgacggtttaaagaaccaaataacccgttatttacgctacttctctatttttaagaggagataacaaaactcaattacaaaaaaaaaaataacaagaaaaacttgagaagtataactagttgtttatatccatcggacataaccgcaaaggatgcgaccagttgtgaggagaaaagtgctttactccctgccatcggacgtctcactcaagaccatttacgtcaacttgcccaaaagacaattactttccaataccactcagcaaaaaattcacaagcaaatttttctgataagaaaagtctttgtttggtttagtttatttataaacaaagagtaaccgttgacgttgagtatttatcacccaattaatctttctatattgaactagtcgtggagtagttcactcacctaattttttcttttatcatccacttttagttaaaaagtaaaaaagccattaatgtgaaacattgtttatacataactgatgtgatacagtttaaaatgaatttttgtatcaaattatctgtttttacatttgcgtatcgaaaaatttaaaataaagagaaatttgtgaactcatccttatcgctctgaaatttttccaaatattttgaaaatgcttgtcatttagttgaaaaacacataatcttcaccacatatgaaaaatctgtaaaaataattactaatcatacatttcactcacctaattttttaataaaaatataataaaatacaattttgactagcaaaataaaaatggtttgataataacacgttcgcaaaatttgatccatgacctaaaaaagagtttgttgttatagtttccacaaaaaaattgggatactattcattttacatggcaagaaacgtaaaggaaccgaatcataataaacaaatgaaagatacttagagctaagcattaagcatcccattttgcgacaggatttgacgcattatgcttacctccattttaaaatttgatatctcttgtcaaatctttatttatatatattatacatgatatgtataaatatttcacgaagaaacaaagtatagatgcttcttattgtctgatcagatctctactttttattgagaatcttgtatcaaatatggttctttttgagccaaacacgccaactttcaataatcttcactttgctgactactacttcatgttgattaacatacttattccaaattacggctctaaagaaagtgaaactaattaaaacgtgcgtgttgatacttgatagtatatatacttcttacgcatcgcctgattagatatttgtttttattaggattccatgagagctatattgcatggttaattggataaatggtcagagagacgattaggattaaagtaaatgacaaggacatttttgattatttctcgattatcatggtgggtgtaatttaacatgctgtttaattgaacgaagatactgtactaatattttacacgccctaagtaagactcactttatcccattttatatagatttttttaagaaataataaacattttatcatgataaaaattcaaccaatagaaaaaatacggcagaattcaaatagtcataaaatatcaaattaatagttatgcatagaaactataaaaaaaaaaaaccttataacaaaccatcaatatattgcgacaaaggcagttataagtaatctcaaggtaatataacatgcttatacatccatattacaaaactcatggataaattataatgggttttctgcaaaagaacctttcaagtcaatctcgtttgcaagtttaccctccaaatccgagttatgcaagtcaaccccatcatctctaaagtcatccgcaatacagccttcatgtatatcgataacgtggcactcaataactctgtttaaaaacataagggttttatggaaaaaaaactctcaatataaatttgttttgcaaaataaaccttcatgtcaaataaatacagatcaaactacaatctaaaaatctcatgaaatataccccttttgtgtatcgatgacatgacagtcgatacccattcagagcatgtgcaataggtatagattttatgagtcgtttatttaagattttctgctatcacaattccattaataataattttatatttttatctattcactattctcgatcctggtttatctaaacatagtaaataatttttcttattttttattcatgataaatcaattacttatttaatttaacgttctataatttatatttcttttaataatttattcaattaatacttaaataataaagggtgtgctggtaaatttcaatataaaaagagtaagcatagttttttcaaatttgcataaatcatttgaactcgttattttcttaattatataaatggtatgtctttcactttgtacggagtatcccaatgtggggtacataaatattaagagaaaaaaagagatcaagcttactagtttaagcgttaataattatactgactgaccaatctacttgttcatgtagctctaatgttattaattaatatatagtcttagattgatctaattaatgtctgtgtatgatgtcactttgtgatgatggaagtcatgagagcttccattacttaactctctctctctctctctatctatttttacggtcatgtatagtgtaatcaacaataacaagaaaaagccaagttcaaagcactatactattagttaaagacaaatgcgataatgatacgattctgagcattacttgagtcacaatatatagtcacaccctcatcaaattctttctatcttaccaacttctgaaaaaaaagaaaaaaaccaaaagacaagtaaatacatatataaatatacactcacacacacacacatatattgatatacttataatcataaatcatggtaaagtttgatacaaaactatggaaggctgtgcttatgatgtccatgatcaacattggtttaagtgttgtaaacgttatgttcaagaagatgattgatgaaggacttaaccgtatggtcgcgaccacttaccgacttgctgtaggaactctgttcttgataccattcgcgattttcttggaaaggtttgtgtttgtttttgctaaactgcaaatatcatatagatgaaaaggtttgtgtttgtatatgtatatctagttacttgtcttcttcgttttgaaagtttaagttatacttgaatttttggtttaaattataagtggatgtcttgtttatacaagtttctagttgaatgttgttttcaaactcttttctcctgtgaatatgttattatatattcgtattccatatgaaagattttgtaaggaaaataatttgttctttttttgtttctctctttttgtagacataacaggccaaaactcacgggtaggatcttgtgttcactcttctttagcgctcttctggggtatgttcattttattagactgttcacttataataaatgtttacaaataagttttgagttgtttattttgatcttgatcgttcatatatttgcaggacaagtttggtgcaatacttctttcttattggactagagtatacatcttcaactttttccttagcgtttagcaacatggttccttcggttacatttgccttggctctcgtctttaggtattgaaaaatcgatcaaacacatttggattcttcatatatatgctctagtattatcaaaattatttataaactatacgattaggcaagagacgctgaacatcaagagcaacgtaggaagagccaaactgctaggcacaatgatatgtatttgtggagctttagtgcttacgctttataaaggaaccgctttaagtcgagaacacagtactcatatggaaacacatacaagaactgattccaccggtgcaatgacacaaaagtgggcaatgggttcgatcatgctggttatatcgatcataatatggtcatcttggttcattgttcaagctaaaataagccgagtttatccgtgccaatacacgagtaccacgatcctctctttctttggcgtgattcaatctgctttgttgagtttgatctcggagaggagcacatctatgtgggtcgttaaagacaagttccaagttttagctttactttattcggtgagtaatccaatatactatttaatcaacctacaagatctatatgtcaacatatataaaattttattttagttgtaatttgtaaacaaagaaaaaaagaaacaaaaaactatttatgtttgcatttgacatggatattttctttcttgtcccccaatgacttgagttcaacttttttcatgtcccatatctatcttttttgctatcttttcttcttcgataaatttagtttccgaatccaccactggtgtagggtatcgttggatcgggattgtgctacgtgggaatgtcgtggtgtctccgccaaagaggtgcggtgttcacgtcgagcttcatacctttgattcaagtctttgctgccattttcagcttctctttccttcatgagcaaatatactgtggaaggtaacctaatgtttctttctacttatttatatcatttactatgtttaaaatatctaacaacttcaactaaaacaaataaataaacaattgatgaacaacgtattacaaacaaacaattttaaattagatcaaactcatcataatacaataatattgcacaatacatattcaaatatctattgactagtaagtacaagagagtagagaatatgcctatattaaagaccctttcatctgcattcaaatgtgtaattggaattttacgctttacaccaaattgatgcatgcattgcaatagacaattttaaaaattgttagctttatagaatatcattgagacccataatagacctttaatctgtgtgttatataactgaatttgaaccggattaaatatgggattagaaatgattacataggagaaagctaattagtagatgggtttctttcacgtaaagctaattaaatggttctttttgacttttattgctaataatatctaacaaatgaactatatatgtggcatgacaaaaagtgtgataggatcaatggtcattatcgtgggactttatatacttttatggggaaaaagcaaggataagtctgcatcagtgaccaaacaagaaccattagatcttgatattgaaggttgtgggacagcaccaaaggaactcaatagtactgcccatcaagtgtctgcaaaataataacttcaagatatatctaactgtttcccatatcgtcaatgaatgatttctaacttgaacttaataaaagttcataataaagcatatgttacactaaatatggtattcagaaataaaattatgaagtcaagatttgtagttcctgaaaaggaaactatagttaggtttaataagaacgaccaaagattactataactgcccgtctagctcagttggtagagcgcaaggctcttaaccttgtggtcgtgggttcgagccccacggtgggcgcttgtttactttttgtttatgttgtttctccttaaaaatcagtgttaggcacaatcaaaagtatttgtatccttaaattttcttttattccaattcttttcttgcaatgacttgaatgatcaattagtgaaaatccttgtgtatttcttctctcctttaaaattagatgaattcccacgctacgcatgagtttgttttgaaaattgtttagataaaaatatgttaattgtttttgtcgctaatttctgtttattttttgtttgttattttataattagtaaaattagactcatcttatgtacttgcattttttattgttaggttcatttttgactctaaatatcaatttctatatgttttcatgtataatctgattatttttatatccaagattctaaaatttgtttattatcatgaatatacacaacaagaatataagatgtttttatttcaagagttttcatatgaaaaaaaaaaagcaaaaattaaagagttattttagtaacactttttagatataagacaaatgaatttgttttgaatttcgtggtatgtttaacgtctcaaaagtctattacgtacttgaaaatgttgaatgtcaatgttacaaacttaccataaaatacaaaaataaaatgacagaatttcatatgataagatatgaactataacgtaataataataaaaaatcaaggtaaaataattaaactaatattaggtagcaaacaactaaactacaacacaaataactatttagtcattatagagtgatgaccattgaccattaattttttttaaaaagtatgaaataataaagtaaaataaaagtagtaattgatttatttaaataaataattttataaattttttattttgaataaaatcatttaagaaatgaattaatggaagatttaacacaatatgagacttttgattttctctcaattaattttgctgatttttaatttaatcaatgttaaatgacacatgtcattttcttgtgtgatgatgtgtcactcatatggagaaagttggccaactttcatatatatgattctccctataagaacttcgatatcaaaaagcctaaattaaagaacaaaactaacttcaaaacattgtcacgactaaggatgttacaaacccaagaaactaaagagagctctcatcaatactagctagaagctactattactctattagacaacacaagaatatacatagaaacaaaactgggaccaacataattcattacctaactatcaaaatttatcatcatgctcaaaatcttgtttcaccaatccgcgacaatttaaaacttgtctggagctcgattattgaccggaggcttgcgtcgaggcttactatagatcggataatcatcacgcaacaaccgagccagtttctccatatcattggttgaagtagatggttcaagtgtcggtaggctggtaaggtcattgacgatgatcatcatcttcttacaaaatgtattctgtatataaatttttatatataagaaactttttgaactagatatatagataagataacaaagagactaagagactaaatctatataagtcttgaagaaggattacaagacaaaccttagtggtgtcatgatctgccaatatattggtctgcttatgctctcctgcagtaaagccaaaacatatctagaatgaagacatgttcactacttttaccaaacattttagaatctaaaataaagttctttttttataaaggagaaagaaagtgttctttgtacaaacaactaaagatgattaccgaagcttaagcataaaactaatcagacgaactaaaaataatattctacaaaatattacaaattatatattgttgttgtcgtgattataaattatgtctaggaggatgacgtgctggtccacgataatcatcatagaaagctacaaatggaccagatgattttttcttcttgggtttccttttaaatgaagaactcttacttcttttatgaaaccctaatttacgttccactatcaaatgttttgatgcacctgaaatcttgaagctccaactatcattgttcatcgcggtaacttgttccttctcggctctcgttgttctcccaaaccttactttcctcggtgcatcgaatagttcctgtcatggtgtaaaaatttataaaatgtattggtttcagtaaaaagatatcaaagtttgagaaggatctattgaaaataaatgtattacttttggatgcagcgtcgatgaatcttgatctccttgatagtcaagactcttgtgaccagcctctccacctatgaattcaacatcaataaaattagtagtaaactttgttattaagctaatcttcagagaaaagaaagaaaaaataaagtaaggtatggaagtaaaggaaaaattagggatctttatgtaaaggcaccttcatgagcatagactaggatatgttcctcttctagggattgaataatcaaaaggaaagctatgactatgattgtgaatcgcatcatgattatcacagacagattcttccaagttttctttctctctctctctctttaattttgaagaagatttacatacatatgagggtaaagaagctcaataaaatatgttcgttacaattttatatttctttctgtggtctcatcgataggttaagagtaaagacccgagtcaaaagggcacggcttctgtcgtctagtaataacaaaaagaatattattacttctaggtgcatctttattatcaatgcatgtaataatataatattggctggccccttgattatataaaggaaaataaaatggcctccacacacaacaaagtaattatctgatcttttcacatttttcttgagggattttttgttttgtttaatatttaaaattttaagttcagaagttttatatcttttaaagttgggatttataccaagttaaatttataccaagttaaattcatcttccataaattaaattcatctcccacaaaatttgtagatagctagataaaaagaaatgtgtagttggaggagcataacacaaacatttttaccttcgacgtaaggcaatagagagcaaaatatgagattcattacctcataagtgatttgttaaactatagtttattgtgaaagtcttttatccaagtggtaaaaagtttaaagatttttacactaggtttggactttctttaaaataacgcatttatatacagattattggtgtaatactaatcatacgttttagaatattgcacgcagaaccgttcgtcttggtcacgaatagtttttttttcttttttttatgaatacaggagattttgggtcgaagctgggtcgaaacccgtaattatttcagacctgaaaccataacatataatattagtttcgtcccaagcgtcatttaaaccggcgatctctaaaattcacctagaatatttatcaattgagctaacgacacttgctcgtcttgaatgttacatatacgagtgtctatccttaattattatggcaccacacaattttcaaaaaggagatccaagtgttatgaaaatagctaggtgcctatcatgaaattcttttgtagagtcgttcattataatcacatactaggtcagtacctgtgctacacacggtatctttaatttaatcaattatcaaatcttagttctgtgtattccacagaaactctattatattttcattatctttaaacatgtagttgtttatcatgtattattggtaccaactaaatatatttactctggtcaaaccatattttgtttagtatatatagtttcctcggtttgtagcatggaaaatatatgtctatagttggtatgtacgtttgggtacgtaattgtatattttgtatatgtagttgtacacatagaaaatttgtatattttcgtgtatgtcattaacatgtaagtgaattataaaatttgacaaataataattggaaaatgtcttttttcgtacttaaaactaataactaaaaaaaaaaaaaaaaaaaaagaatagattacataattctccattggtattaaaaaagcttgcattaagtaaatgggaaaatgaaatgcttttaatatattcaatttcttcaaaaaaattttaactaagaatcacttaacgtagtcatgctttaattagtttatcagtttcacttctgtatatattacgaatttaatatattcggtttatctataaataattatttgtataatttataaattttaaaagtttctcaatttattattggtatcatttaaacatggatactattgaatttattacagaattgatgtatccctttgaatacataattgtatatttagtatatgtagttgtatacatggtgtgtcggggtttagtgtattttattaatatatatattaattatcaaatttgataaattaataagacaaaaataaattttatcaaaatcagaattatagaagaaaaaattaaaagaattattaataaaaacttatattaaaattcaattaatttaattaacaataccaatatattaaaatctaaactacagtcaaaaatatttacacaatctcaatatattagtgaaagagaatctatcgatcagatttaagaaaaaatattgtataccttataattttgttgttcattggaagatagtagtcaaattataaatcatcatcgtgtttatgcaaattaacaggaaaaagaccgtaatccctatcaaaaaattcaatcagaattactcatcttataaatatatagagaggtaaaaaaagcttaacttattacttcgcataaaagataaataattagaaagcaagacatactttaacaaaatcatgtgagcgtctacattttaatcttccacattacctgcataaatatttttaaaaaaatatatgagaaaaacctatttccccacgggaactatcgatatcacgccagatagagcccgttctttcatctcggtctatttatccataatatggaagttaaatgcctatatccccaccaagtcgaagttctacagcttaatgtccccgagactgggttttgtcggtttggtgagttaaccctataccaaaccaattattggtcgtaagtaaaccgaaaatatatccaattccttttaaagacccgacccaatattcatccccaaataatcaaaagccattctcaatcgataattcccactctaagaaccctaaaacatcgaaatcttaattcccttagttcgatttgaaaacccaaattcaatttcgatgagcaatctatctactagttcgacgggatctacaggtcctcgtggaagaggaagagtcgtcggagtgcctaaaagatgttggtgcggagaaggaatcgtggctttaacttccaaatccgattcgaatccttaccggagatacttgcgttgtggttttgctgcagcaaacaaggtaatttcatatatattcatcaatgcttaagctgaattagaattttggatttatgatttttcttgttcattgatagctaaggaatgatgaacacacattcaagtgggttgatgatgctttgatcaatgatttagacaagttgaatgcaaagattgaggaagttgaacaacaagtgaaagagcttagaacacagagtttggagttttagaaaatggtgattgagaaagtccaaatgaagattgagaatgagttatttgagaaagtggacgatgctttggctgaatcaaaagaaggcaataagaagatgatgatagtcgtagtgataggatgtatgatcatgattggattgagcaaattagtcggatgaacaaattagtttggagttttatgtctctgctttgtgtttgtactacgtttgtgtccactacgtttatgaacaaagtagtgttggattgtgttcttgtttgttgtatttggttatgattaagaatcgtttatgaacaaagtagtgttggattgtggaatacagctatgcttatttatcatctcaaacatctcacactcgccatttggaatacaactatgcttatttataaacttcctaatcctccacattgaatctgaaggcagaatcgcagcatatacttgccaaaaacactttactccatcttccttaccatcacaacccacacatttgaatccaattttatcagaatcgtacctatactgcttcagattgcacccagttcggagagcgtaatcgacgacggcttctttgaaagcaacaccactgaaaaatgtttgcttctcgtacaaatggccatcgccacgctggagatgtgtttgaaatcttgcttcgtcttcgtcgttttcttcacggtcgctctccggataaacatcatggtggatttgaggttcgtcggtccattcattcagcatttcttccatgtgaaattcatctctatcttcggcttcaggatcgacatcaccaacattcgtagggtcatgcatcatcatcgccatctccacgaccttgagcagcagatcgaaaagcttctgggtttctcacttttctagggttcgtcgggattttagatttttagggtttttgatttgggggtaaagggttaatgaattgttttcggatacttaattgggttgtattcggtttagtctgggtaaaattaggtttgcttaggtttaaacggttactttattggttaagtatacagtaaaccgattaataccagcgtcgtggggttattgatttcgaacttttgatctcggggacattaagctgtagaacttcgatttggtggggatataggcatttaacttccatattatggataaatagaccgaggtgaaagaacaggctctatctggcgtgatatcgatagttcccgtggggaaatagaccgtttttccagaaaaacatgaaaagaatagagaaaaacagagagtgtaagaggacacctcgatatattgctttctccatggtctcatcgatccacaacctcagttttcttctggtagaataaaaaaaaaagcggaagagtaaaagaaaataggaactgatgagtgagttcttgaaatgagacgtacagtatttataaggtataaatttttaggtaaaaaatatgcataaaatattaaatcgtgaaagtcaagtttaatgattatgatgaatcccataattataggagaatgtttagcaattatcttataagttgttatttaattaggaaaattgttcggaaactttatgttaattcaaaaatgaatatccaactaaatatttgattacctataattatggagaagtgatattcaaatttaagaaaggaatatacgcattgaatattttaaattaatatgattcagttgctgaaaaaggaattcacttaatataactaacaaaaattaatataaaccaaaaatgtaattaatcttatttttaaatgtttaaacatattttttctattttaaatatcaaacataaaaaataatttagttaaaattatttttccagttatttaaataaatttagaatatttaacacaatttcgaattcaaacatattaattcgatatttataatgttatatctataaataaagcagatttgattagaaaatgtttttaaaaaattaattggattagtaatatatgggtataattagttttccaattttaaacccacataattatgaatagtattgaataagagaatatattaattggaaataaataaaaattatctctccaaaaattttgctgtaggatttattgaaaaaaaatcaatggctacaattaattcaatcgaatggccaagattataacgtatgacccaaaagtttaaatccgggtcaaaaggatccgcgtattttttaagtgaaggcaagagatcgaacggacacaaacaattcaatcgaatgacaaaaattataacgtaaattaaatgattctcagtaaaaggtaattttttccatgacattaacattttaaacatatgattttaaaataaaaaaaattttaactgagaatcagttaacgtatatctcaaataatagtatagatattgcatgtagatatatatgatagattgatcatcatgcataataggatttaaaaaattatatcctaaatatccatgatgataacgtagcaacgaccaaaacaaaaataatatttttattagaaataagttaatgtaagaaaaaaagttaaagtgaactgtataagacaacacatatttcaaggcggaacttgatttaagttaaataaataacgagatacaagctaaatatttaacgtttgatcaataatatggacaaaatgatatgaaattattattttgaaacattagcaaaaatttatgaatactgtaattagaaaaattattattttccaaaattatgatattatttatgaaattttgttgatagaacatatgcatcttactatattatttcggaagtacattttaaatataactttaatttttgtaattaattacatggtaatgccattagaaaaaattaatcaaaaacaaaattctttgataacgtcattaaggttaacaaaatcatttaacgacaatattcatctcttaattataaggcttattggacctatagacgggtcataaaagatttcctaaactgaagcaaaatatactgaatattcaaatatctatctgttaccaaattataaacaaataagttcgtaaaataatttaatattttacatacaaaatcaattaaatcttaatcacataaaaattagcacaaaaaaatattcaacaattaaaaaattatcaaatctcggtgttatataaattttgatactatattcgaataaagtgtaatataccttttcaatttgtattctttaactaatttatgctaactaatatatttgctaatcgtatacctatcaaaaccgactatcgtttcttatctctatagtatttttgcaagacttttttggtggatttgggtaaaagtgcattcgggtcatatggtacattctcctattaaataaatatggtgcactcctatgttattagctaaaatgtttagattatcatttagagtcatgtcataaataaaattaatattaataaaataaatggtaaaacaattacagaacgggttttattttggaattgggttatatggtggatgtatttgaatcaatatctataaaattttaaaatattattaatatgttgttttaataggggttaaaacttcagtcttttaacaattgtctcatggattcgtggtatagcgttacttaataataattataaactgtgaaatataaatattttataaaaataaaatttgcaagtttaaatatatattacttttagaaaataaatcgtcctgcggtatatcgcgggttaaaatctagttagttttatgttttattactagatgatgatgacaaaaagaaaatgtgaaaaaggcacaagaagtgcatcaaatgaagtgcatgggttgggaacatgaacatgtaaatttgtctttgcatggatttacgaaaaagttacgaagactttactaaacaaatcaaatcattagttaactaaaataaacttaggattcctaaatatatttatcgttggaaacttgaactaaccgcgtgttgcccgagctggtccctctctgcctaacctattactaatatatttcttttaaccgagtcaccagaaccaatccctaaaatatttgatgccacatatcagatagaacatgagagtgatttttttcaagaataatatcgattaagtttgaaactttgtgttcactcttcaccacaagcatatggtggtcatcgtgtacttgagtatttgttggatatgggctgccgataatgacaaagcctggcctaaattgttttgtttagcaaagggaaaatgggtccagctagcccatctgctcggctaggcccaattagacttccaactgaagaaagatacaaaacaaaatctgtaatctgcaaccgttaggtcttgtttccgactactaaaaacagattcaaaacttacgagtgtggtaacaaaattctggtggaggtggagtacaaatggtcaatcgagagaaatgcatttgttggcttgaactatttttataatctgaatcaagacataacaaaaggttaacttattttattcaatggcagattatgatttacaccctctttttgtaatttatgataatctgctacctaataaatcttataataatttattattgatgataaaatttctatatcggtttgagttttaaaaaaaattaagatttaatacaatgttataattataaaccaaattatatatcgatttgtgtttataaaaaaagaatagggctccgtttgtttctccatccagatggatcatctagatgcagatgaaaaatgatgtttgtttttgacaaattaatagatcatttggatgttccatctgaatgactttgtaaatttaagctaatttgtgaaactcatttggatggacttggtagaaccattcggatggagatgatctagtccaaaaaacaaatgacaaatataccttcttttaataatgttaattttcaatagatttcttatttaatattttttttaaattacctattgtaccaaaaactctaaaaattgtgaaatcactgactattattttacgtcattcgtttttcccgccaaaaccgcaaaatcatattttctcgccaacaccgcaaaatcatattttcctgtcaaaacgttaaaattatattttcctacaaaaccgcaaaatcataatttaccgccaaaaccgtaaaatcatattttcccgccaaaaccgtaaaattgtattttcccatcaaaaccgtaaaattatattttcccacaaaaccgcaaaatcatattttctcgtcaaaaccgtaaaattgtattttcccgccaaaactgcaaaatcatattttcccgccaaaaccctaaaatcgtattttcccgccaaaaccgtaaaatcatgttttcccgccaaaacgttaaaatcatattttcttaccaaaaccgtattatcatattttcccgccaaaaccctaaaatcgtattttcccgccaaaaccgtaaaatcgtattttcccgccaaaaccacaaaatcatgttttccagccaaaacgttaaaatcatattttcctaccaaaaccgtattatcatattttcccgccaaaaccgtaaaatcatattttcccgcaaaaaccacaaaatcatattttctcgccaaaaccgtaaaatcatattttccaccaaaactgcaaaatcacatttcccgccaaaactgtaaaatcatttgttcattaaaattatatttggtaatgatgttaaataattgtcattcgttaaaattatagcatgggtattttagtcatttttattagaatgagaatgttgatgaattacaaaatgatcaaacaaagaaatatttatttaaatacatcatttatgtaaaatactaaataatcaaacaaacatcattcaaatgcatcatccaaatagatcatgtaaatggattatttggatgaaaatgccaaatgatcaaacaaacagggcctagataaaaaaatatttggacaacttgagagacatggtttaaattttacaattaaacaactctcaatgctcatccttggacatcctaataaccaacctaaaaccaaatcatttgtgtctattaataactttatcataaacaatatgcaacgaggaacaatgaaaacaactagaacaatcttcatatttagagatgaaccgacttattcaaacaattgtaattaacttaatctatacttaaaattttgaaacaatctgagaggatcatctaaaatacttgagatgaaccgacttattcatcactcactaagcctgaatttaatttttaaactttttttggtgtgaagcatgaatttaattatggaccaaagtagttgtttaaccaaaacaagacaacattatgaaatcaacaagatgtcaagatccaagacaagaagtcacacaatacacaattataaacaaatcaataaaaccaaccattcatactaattattttaccacatatataaattgatatacagaaaatggatcatctcggcccatgtgcaagcctagggccattatggctaagtttatagtctaaatagtgtattggacggtttcaagcaattatttttaatgacaggtgtaagcacttatttttaataaaatggttttaattgatttttatatttaaataaagggttcaattaataaattaaagaggaaatacatttttttaaaactattaatctaactacatttttaaccactcttaaaaatcattttcagatcattattggttatatattaagtttcgttgggacgaacacaaaaagacaattaataaaagaagacataaacattatctaaagatgtgtcttatcatttctgttagttgaacaaataaaaaataacaaagaccaaagagatttttatttttgaatttgttggtattctccttcttgcaaagatctaaaatagcacagctcctcgagtaacacgtgtcataatttcacgacttcatcgtatctattctcatctaaatttatggaaacatcactttcacacttccacaacaagccacacattccaaataaccaaaccaagctactaattattcttccaataagaaaatatttacatctaaatccttaatttataagagcatttaacctaaataaactattttgtaactattaatatatatgcaccctaccaaaaaaatctaatatctatgcatatttctatttatagaacagttaaataaaaaaatgtttagggcttgttctatgcaaactgaaagtctttttttatgttatgataagttcccgtttcttctttcttttttgggtaatattagaaagtaaccatagaattgaaaagaatgtagtaactaaccattgtcagtttatatgtgagtaaataaccttatgacggcataagaaaatacaaaaatatccttgcaagttgaaccaaaagcaagagtatgaaaatagcatgatatttataaaaaaggtgacattttataatgtgttataagaataaataatatgttatatgaaaaagtagcatgttgacagagaaagatttccagttataacgtgtaattcgaaaaagtagcatggtacaaaagaaaataacatacaatttaaaaagaaaacataacgacgatgattccaagaaagaatcaaaatcgaacaaaataaatagcacgatatttatcaaaaaagtgacattttataatgtgctattagaataaataatttgttatatggaaaaatagcatgttgtttgagagagattttcaattataacgtgtaattcgagaaagtagcatggtaaaaaagaaaataacatacaatttaaaaagaaaacataacgacggagattccaagaaagaatcaaaatcgaacaaaataaaatgagaaatcttctgcaaattgagggaaagatgatccgtcaatataaataacgtttagcagcctaaatttatcgaaaaagagacttggtggttgtgatggtggaagatgtggtggttgtggtggtggaagaaagagagatgagtggtggtttgttcggattcatcaaaagtttttcgccatataatcatctaagtgttctgtgtgattttgtaaaatagcatgtaatacatataaaattcgacaatgggtataaaagtaattgcaaatgatgaaagagagtgtattctgacaccatagttactttgttaattcttttacaattcatagtcattttgtgcatattctcttcttttttttaggtaagaatatgactttctatttcaattcaaaagttcttgttatccaacaaaatagttaccatggatttgtatttatactatactctaatgttattgaaataagatttagaacatctttaaatcgtaatacagtgacaatgattatgtcatttaaattaacaaaatttgatctataccaaaaagtttgataacacaagataacttgattgtttagattcaaactcaagcatcaaatgtccttaaagtagaacttaggaaaaatgattagcaactgcataaaaagactccatcatataatcaaactttaaaaatatcttattagctatacacaatattgtcattatataagcacatctctaaacaaacataaatcatattgtaaacaccataaccattatacttaccattttttttgtgtcaaaatccattatacttactatgtatctacagaaaaagacgccatcacatatggaaacttgaaaaatatcttattagctatacaaaatattgtcatcgtatatgcacatttctaaacaaatataagttatgttacaaaacaccataatcattatatttacttcttttttttttctcgaaacctattaaacttactatttatgtgtaatggttgccaaaattcagaattaaccgagattgactagtgctgataaaaaactatattatttatttttaaacacataattaaatacatttctccaacacaaatattttatatactattgaaaatgttttaaccaaataaaaataatatttactctcttttaaatattcaaaactctagctattttaacatatcattttgtaagaaaattatatgaaactcaaaaatcacaataactcagtgaataaaattaaattaaaagagctactcacttatgactatgaagagtcatgctcatgaacaaaagaattaaaaaaagaaaacacgtgctaatgcttctcctcctcctcctccacatcgccgggttttcctcttcctcccccgtgaaaactgcatttatatcaattcttcagattccccaaaccctaaattctctctctctcccaatttttctccgtcgttttcccccaaatttcctctcttttttatgtcttcaaacttcaaatccaatcttcttctctctccagctcattgactcaaccaaatctagatcaaagtttgaatttttaaaacctttcttttttttgttgcttccttccaaaaaaaaaaacgtttcttttttttttcttcttcttcttccttctgcatctgaaagtttgtatttttcctgggtttttacctttcttggtttgaatagacaaaagggttttcaaaattctgtagatttcattgttacaaaaaatgggagcggtgacgtcatcaatggcggcgaagtttgcgtttttcccgccaaatccgccgtcgtacggcgtagaagtggtggaaggaaagctgaggctgattggtgtagagaacgtgaaggagaatgttgaagtattgaagctgaagacgaagagaggtaatcaggtggttgcggcgtatattaagaatcctacagcttcacttacgcttctttattctcatggtaacgccgcggatcttggtcagatgttcgagcttttctccgagcttagcctccatcttcgtgttaacttaattgggtaattagtttgttaactcttcttgcttggagtttgattgattttaagacaagatttgaaagttgtttttcatggattaggacaagttggttttgttttgtcggaaatgttctaaaaagtagaaagtaaaacatttgattgtctagaatcaaactgttggatctgttgtggttttggtgaacttgtagagcttaaagaaccaaatattggagctgaattgcctcaaaaaccgacacttctaggaatcgagattctatatattttgtctttggtgcatagcgttggattgatataagtgagatccattggattgatctcagcaagatttggtagataatggatctgttgtggtttttttgaattttgatgaacttgtggagcttaaagaaccgatattggagctgaatcgcctcgaaaaccgacacaaatatgaattgacatattcgatatgtatcgcctttagtcagtagcataggattgatataaagtgagatccattggattgatttctgcaatttttggtagataaaatttcgagcaatcttgaagctgttctcattagggcaagtttttgttttatcggttagtgtcggctcatcttgaggttgtagatagttagaaacaaaggagaatcatgtgaatggatcttggtttttagatcagacataagtgagatccattgtatgaatattgatttgtttatgtgactgtgttgtgtaatgattcaggtatgattattcgggttatgggagatcttcagggaaggtatgatccattgtttttgatttttagtcaatcaaatttctcaagaatgatgtttttttttccaacagcctagtgagcagaacacgtatagcgatatagaagcagtgtatagatgcttggaagagaagtatggtgtgaaggaacaagatgttatcttatatggacaatctgtaggaagcggcccgactttagaattggcttctcggttacctaacctacgagccgtggttcttcatagcgctattgcttccggacttagagtcatgtaccctgttaaacgaacttactggttcgacatttacaaggttcttgtacaaacttttcttttttccacattccctactttacttatgtgctaaattttaattgttgtgattgcagaatgtcgagaagatatcgtttgtcaaatgtccggttttagtaatacacgtgagtattatctcacgtttattcggtttttaatgtcgtttagttattgatccgaggatatcgaatgtttgtgcagggaacatcagatgatgttgttaattggtctcatgggaagcaattatttgagctatgtaaagaaaaatatgaaccgctttggatcaaaggagggaaccattgtgatttagagttatatccgcaatacataaagcatctaagaaaatttgtatcggcgattgaaaagtcgccgatacttagaaatggaccggtgccactaacagagaaggcaaggagtagtacggatattagagaacctgcaagaccaagcacagatcagagagataaatcaagaacaagcacggatcaaagagagatgccgaagctgagtacagatatagcgagagcaagcgttgataagagggagagaacgagaagaagcgttgatgggactgagaaaccgagtaattccgcggaacagcaactagtacaaccagagaaaggaaggaatagcattgacaggtacatttctcagagtttctatgatgtgttgatgatcatgttgttgatgatcatgtatgataacaggtttggggagatgataagatcagtaggattttgcaacatagattgtttcaagcctacagcaacagctaagtgaggtaaaagagaagaaacataaacacactcacagacaatacacatggatccaagacatctaactttagttgtttgattttggtttgttatctctttctccacttacttcctcttatgctatggaatttaacaagtcacacatcaatgtttgattcaaaagcttggtttggttattttaaactatgaatgatacaacagattagaatatgtttacgcctagtacatcgatctttctattgcttaaggtggctttgtgcctaggcatgctcttaaaaccaaatatgtatatagatatgaagcaatagctaagagtcatgaaaaggcaaaatatgtatctgcattacaatttttatacagagtttttttacaaacaacactcatggtggtatataacaccgaagcaaaagtccgcttagaacactcaacgacaaaagtacaaacatataagagaagagaagtcttgtcttcttcattatttgatttcacatagaagaaaaagcaaaagctaaacaccaaactgcacattttctcataccgggatttactcacgaggagcgttcttcttgaatagcgcataagcatcgctgtaaatggcgattgcattggacaataccgcaagaacaatcatgaaaatagctaaggttgtgtccctgtttgttgctttgtcatgacgatccctgcgagaacatacaaaaatcgaaataaatttaccaaatctgccaaggattgtgtggaggtttatataaacaatctacttactttagtatgatagaagctgggaagatgaagccgagacaaacagcggcggttgctccagtgaattggaaagcatcccaaatgcttgggatgaagtttgcacccaagaagattacagagatgagaccggcagtgaggcaaccgaacctcacatttgaggtagataatgatcgagcggaagggaacaagagcccgtcaatgttaatccgaagagggtagaaaacaatcgggaacacgagcatcaaatgaagcgcgtagctaactcgaaccgcatcattaaggatagaaccaaaagggattccaagatcagtgtcaaagtttgcaaggacatcatcaagagtatcatcaccaaacaagaggaacccgaaaatacttgtcattatgtaaacagatgagcagagcataagtgctgatcgaacaacaggtcttatctgagaggggtcttcgagctcgttctgtatactgtgaactgcaacaagtcaaacaaaaccaagaaccatgagattattttccattttttaaagctatgcttccaaattaagaactaagcacatacataccattgtaatggcaaatgaatgctgtgacaagaacaggtacgactgtgaagagattccagaaagatgttaagtcagtaacatctggtaacaatcttggcatcgccacaccgccactgatcaacttcataattgaaattcccgcagtaataatgagaaacacaaccgccagagccacggataaggccgatgtaaatttcaaagaatctgcaaagaacagcataatcatatattcagtaccaaacatagaaatatctacgacaaggaacgaatcagacactaaccgattcgcttgaagcaagccaatggagcaaacacaccaagagtagtaatcagaagaatagcagctcttccattccaccaatggtgaccaaaccatccttcgagaacaccgaaatgatggataccatcttccgtctttccagccaacacatcaccttcaaacacaaacacaagattcaacaacacagtggcaacataatatcgaaaaactcgaaagacgaggataacataacaatacctataatgatcatgtatacaatcaaaacaccgatgttattaactaaaaccgcgacttgaagcaaaatccttccaggattaccaaaagaaccacccattaaaccaccgtaagatcgattcttcccagctttactaaacctaagcaagaactcaatcgacgcatcagtcaagaaagccataacaacaatcatcgtgattccaagtccaagtccaagaatcttcattgtagcaggcaaagccatgataccagcaccaattatagtcgtggcgaggttaaaaaccgcgccactaaaagaagctccattgaattcatcatgagcaacttcatctccatgacactctggtaataacggagcagcgatatcattagagcaagtagaactgttcctccttggaattggagcaacatctccaacaactgtcatctttgaaattgcaagctgtcaaaattcatttagagaacaaaaataacataagacatcgtacaaaaataaatctttatacgtattattgaagcaacgaaccttaaaagagacgaactttgattcaactgattagacaagtaggaatcgaaaaacctaaaattgattcaagcccagttgattttgatcgaaagttgacccagaaattggattctgatgaaattgattaaaaaacgaaattttactgtttgaaaaaaagactttgaactttgattcaaaaattacaagattatacacaagtaggaatcaaaaagctctaaaattgatccaaacccaattgattttattacaaaaaccaattttattacaaccttaaaaagagacaaaacttggattcaagtgattaagacaagtaggaatcaaaagatctaaaattgattcaaaaccaattgattttgatcgaaattggtttgacccagaaaatggattctgattgaagaaatgaaatttgactgttttgattcagaacttacacgattagacaagtaggaatcaaaagacctaaaattgatcgaaacccagattttggtaggagaaaatggtttggtgctagaatcagacaccaaggtagaagaattaggaaaatatttatgaaagagtggagagattagagagaagatttttaatcttctaaagaagaaatttgaggagaaatgattttggagatgaagggaaattataggcctcacgattttggttttgctgacgatggaaattgtgattgtgtacgacactataatcttttaaaaatggattttgtttgtttattggataatgaggtacgtgtgtatccaggaaaggtgaattaaatgagattagattaaattaaattgtcaaatttactgtattatgttgactatttatttgatcttaggtggtgctgattggattttggagaaaatcgacgcagtgtttaggattttctgaattgtatataatatgcttgaaagtttataaaatagaagagaattatggtctcaaaaagatactatatataaaggtaaaaacattatgtaattggtttaactaaacatatgatattttattttattttgtatgttatgtagtattggtaaatttacttatgttgcatgattaacagttttctaattctggtttcttaaaaaacgtaaattgtaaaaggaaaaaatatagtttgatacgcgaacttataaaaactggttatttagtacgtgaatttcgtatattgtaatttaatataagtataattcattgaccactcatttatattacgtaaaaatcgttgaccaagttaaaatttatacgatgttatttggtgttaacagacatgataacaaccgttaactagtttttgttagttttcaatacaatgttgtttcaccacaatcgaaatgggaaaaaatgtcgtttgattgttcaacttttaaattgtagatattttatacatcaaattcacatgtgatcattttatacatgaactaaacgttgatcagccattttaaatataagaatatgtgaccagactaaaaagacatatcactgtctaggcctagatattcagatttcggtttggattttgttcggatttaatcggattcagataattcatgtaggagagtgtattatccatttggattttataactattcagttttgataggtgttagatttggatccaaaactgatatgaatctaacatctatctgaagtgaatagttataaaatcctaacatataataaactctcctatctgaattaactgaattagaataaatccaaaccgaatctgacccaaatcttaatgtttaggcttagatagtggtatatctttttggcatggtcaacacattctcatgtcttaaacggcttgtcaacatttagttcatgtataaaattgtcacatgtgaagttagtgtataaaactgccatgttttaaaagttagtgtattaaatgacgtttttcccgtttcgattatggtaaaacgacgtcagtattgggtactaacggagattagttaacgactgttatcagaatttgttaatgttagataacgtcgtgtagattttggtctggtcaatgatttttatatgtattaaatggccggtcaacaatttttacatgtattaaatggccggtcaacaatttttacatgtattaaatgggcatatttgaagttaacgtattaaatgaccaccttttaaaagtttgcgtattaaacaacatcttccccaattgtaaaagtgaaaagataactttttatcatttaaaattccgccaaaagcaa

SEQ ID NO: 1324 - DNA, 19353 bp, Arabidopsis thaliana
aaatactttttttttgttaaagagtcaccaaatagtataaaataaggcataaaatacagtaattatatggatactctaaatacagtatccaacgactaaatacagtaattatacggtataaattacaatataaaatatggtataaaaaacagtataaattacagtattaaaatacaatatccagcgcttaaatacagtaattatacggatactctaagaaagctattgttcagcaacccttaaactatcaattattacataatttaaatgctattataaatttaaagtactgctatagttacgcaatttaatagcaaatagtaattgctattgtaaaattaacaataacacacaacaaaacgctatattagttgaaatttttatagcagaacccaaaccgctatataaagtgttcgacctactataacaagcgcatacatagtgtttactacaacgctataatatcttataatattgtttttcctgtgctattgatactcacaattcctgtagtgaattctttgtcgcatagtctcattccgaatctagaacttgactgtcgtttcattgactgcaaaaacatcgatcagacttgttttgtctcccaatctccatattttattcacaatcatgtgaatgttacccacatgtggagcctttgtattgagaaatttgccaatcacaaaatctttccataacggtttagctcctacaaaaacctcttttgggacaacaactctcccttgaccatctacttcatcaaccacaaacttttgtttagtaaaaacatgtttttgagctgcttgaacgtatgactttttgactgttggacccaccaccctttgagtctacggagattctcgttggctagatgcatgcctccattgtgaagtttgatcattgagatcgatggccatgttctttgagatcctccttctgacttacctgaatccatgtagtttgtatgcctttaacctctgtcgccggagcttcctccagctgctctggagaagccgacagctgcagcatacatgctgaaactacaaaaaccctaatcgagttaagctttgttcatctttccacgtctacaaagcttttcagtcttactaatcgagttaacaatatcatatttgggttcagactttcgggtgacaagtaatagtataacaaacaaaaccaaaccaaaccgtttggtttgagacaaaggttaacaaaacgattgaacatatattttttggttggttcatttccctacttttaataaaaattaaatgacagtcccattcacgacttcccttttgtggacaaaagcaaatatgaaatttactcgatgcttctatgtcccgcttaaaaaatgaacataactaaatgaaatcaaagtccctaaatcccaaaagttataaagacgacattgcatgttttctgtttttactcaaactaccaaacataatgtcgtttggttccgttgaatcatatgaattaacggttgactaacatctgttatataaacttatttttacacataatttaaaaagttaagaaatctattttttaaaattagtcgttaagataaaaaagacatcaaatattttaggggaattgacaaaaatagcaatgaacaagtttttctttcagaaatagaatatcttttgaaaacttccacaaagagcactattaactttaattaaatattaaatataaaataactaatttaattaaaataaataaataaaagaaaatatttcccccgcaaaaaaaaaattgtcaaattttctcaccaaaaaatttaggaaggtaactacgaaattcgggaaggatttcacaaaatttaggaaagattctacaaaattcaggaaagattttagaaaattcagaaaaggctacacaaaaataaaaattatgaatattgtgaaaaccttccttaattgcttagaatctttcctaattttgtaaatcatgaattttttttttttggtggaaaaagtttgacaaaaaaaatttccccgaaaacattttggcgggaaagtttttttggaaattcttttttgataaagatactttattatctaattttattttttggcactacaactaaatagtgtagaagtaataatgtttttttcgctaaatacctttaacatttacaagttttttttatatatttagaactaatgctaagctttactttaagatattggaaataattatttttcataatgttttaaactcaaaacattcatatatacctaaatgaactttcacatatttatgttaatttataataacgaaaaaataacatttgcatgcatgtataccgtttttatatcttggttcatgcacaccattgtttccatttccaagtgtcggaaaaaataagtaagaagaactaatgtaatgtcgtcatgacatgacacatgaacaataaacaacaacagatatagttaataaaagaaaagaatatctgaacgcacaaggaatcttcctacttcactttaaactaaaatacgcctacacttcttagtgatcaattaatttaaaaattatatatcaattttgtacaaaccttctactataaattccttaatgcccataactaaaattccatagctgcacttacaacacaagaaaaaagagactactaaaaatcataatgaggccgacaccaaaagtagaaatctggaagtcaccagtaccatatctctttggtggtctctttttgcttgttttgcttatagctttggcattactctcattggtctgcacacaccaaaaaccttcttcctctagcaataacaatcatatggatgaagaagacgatgtcggtgacaaggacgctaagcctattacaagagagtacttacctaagatcgtggtgattttggccggagacaataaacctacttgcttggctgttccggtcgtggttcctccacccacttccatttttcgttgtaactgtgacaatgttactgtcatctcaacctaaccattaacatctttttcttcttttgccgacagaaagattaagagatttcgacttttgtaataatcagcggcaattttgtaacagtcgataatttttgtggcaatgttagtatagattaagttttgtgttattgcttttgtttgttgagtttgtttttggaacagcttatgaattattgttctctttttttagtacaatgtttaaatttaaagatatattaatttgtcatacgaattttatttttcaaacatcatttttagatctttacttacaaagtagatgagcatacttttttttttttttgtcaaccgatataaattagaactcaaaagagtcaatctcgagggatattgtttacatacgtgacatgatgcggtacggtacgaatctttcgtgccaacttatccgcttttacatttgcactacgagaaattaaagataaagagaaatttgtgaattcttccctatcactttgcaactcctccaaatacactgaaaacgccggccattcggttggagaagacaccatcttcaccaagtctgaacagtttgtaaagaaagctaagtagatgagcatactttgggttcggaaattgcaaatctttgataaaaatttttaactcatcgtagaatgattatattgaaacgtcatcaatatcactatggaattaatgtaccgattgaaaaaattattattaacaatatttagggtttgaacatgataaataattcacaacaacaatactagtatactctaattaatagtagaagtaatgtgcattaataatgataaaagtatgtaaaattttaatgtgggcttttctaatttcattcacataatgataactttcacattgattggcagctattggtggacgccgcggcttgaaaacgcaaagaattggacggtccaaagtgtgatcttttacttttggactatgtggctctcaagtggtcgccatcttttctcgtgtgatcactttatttgtgcgcttatgcatatatactagattttaaaataaaatatttaatttgtttaataaattaaaaataaatataatttatgttttatattatctaaatatacaatttttatatttatatatatttttactataaaattgctatgtttgatttttactgtttaaaaatattagaataataacatactgtttattaagttaaaatctaaattataaaaataatttaaatttaaattattttattttttgatattctttattttgtttagggtttaagataatataattttattttgattgttatatctaaaattttacctgtgatataccgtctcgtattactattcactcaaacccgtcctaccatctaatctcgttcagtgaaattaaacaatctaattaatttcacctgtagtatattctctcgtattactatcgacccaaacctgtcataccatttaacccccgttcaatgaaattaaacattattttgttatttttcttttaataatattttaatttaaaagatatataattcaaatcaatctaaaaatatataattcaaaattctcatattatagacatgtgaatgaaaccgtgcaaatttttgaagagatttttagaaacgtttgttgagcgcaatataaaatatttaaattttcaaatatgaataattaataccaactgatatattgagagatttttggcaactattgttgaacgtaatatcttgtatataattatcaacatttgaaatttaatgtcaatgacattgtcttgtaaataagtctctacttcaggatttattttactaaatggctgcaaaaatgtatatgtagatatatataggttttttgttttgaaacattaaatatatttatttatttactattattatgattcaaagatatttgtattttatgtttcactttgggtttgatgttataaaaacataaaaaatgttttgttattttgaaaagataataaatacaaatttatttttttaacttccgactttcttatattgtaaacggataatacaaatagtttaaaagcaattccggtggtacagtaaaagtttgataaaaattagatattgaagcttcaaatcatgaaagtttgtctatagttgtgttctacttgtaattacacatgtagaaatctcataggttctactttggacaaagctattgtcaaaattacatttaaaatatccctctggggtggactccattttttattactctatatatcgcatcggtctagcttgtgactgactaatactctgtatgaactctgtagtatcttgtgtagattcaatccactcagaagcttcttgtacacctttctgagccaccttccatggaaaacaaattatcttttgaaagagaaactcgactttcatatacgccacattatccaaaaacgcagaagaccattagaaaggggaagatattgttgtttttggagctgcagagaaactgaatattatcctcacggttgtcagagaaagttgcttggctgcttccaagtatatttgcacttctccacacaacctacaaatgacaagtggaaagtaaatgattaatcgtctcttcctcataacagcatcttagactgatcggatccgccataatatttcttgttcttagctaagttgttgtggataaagccccctaataaacatcgccataagaaatgttggatctttggagatattttaagtcaccatatatcttttttaagttctaggtctcccgcaggtggttgaataacttcgtcctctagaaggtctacattagtggcgacccaatatcccaatcttactgtgtgttgaattttgcaagtataggcccactcataagagtccctttccttttggagagctacaactccttagccaatggttgatcctccagattaagcacgccttcgaaaacaataagatctcgttttcacttaccatctttccaaagatctgcgactttcatattattatccaaaactggtccactggcaggccttagaggtaatgtaggaagccaatgatcttcccaaattttggtattttgcccattacctaatcggacccgtaagccttgttgtagtaaaagtttgccttcttgtattgacttccaaccatatgatgcttgtccaccattctacgcttttaaaaatgtataattagagtaagacaaacctttttaaagtcgagccataaggcatcgtgggttagtaagaatgcgtcaagcttatttcgcaagaagtgccttattaaattgatgtaaatctttataaaaccgagagtgccttcttttttaggaagagtcatttttttccatgcaacccaagggatcttcgttctgccattgtattgtccccaccagaatgtaaaattgtagctctacaaaagcacatggaatcatttgcgaatagaagatgagatattgaagggcaatctgttgttaacttcatcccatgtatccgcttatcattctctgctttccgaagcatattattcaaaacttacgcacaaaagaggaatagataaaggcatagtgaatcaccttgccggaaacctctagatggaataatattgccataaggtgatccattgataagcacttcatacgaaactgatgttacacatgtcatgatccatttgacccactaagaagcaaatcccatctaaagcataaccttttccaaaaaattacactcaactcagttttatgctttacttatatccctctttactgctaagtaatcgctttgacagcctcttcgtggttttaagaaatggcggagttcatgagacaacaatacattatctgatatattgcgtcctggaacaaaggctaagtctgatatcacaaatccaaggcactattttaatctcataatcattacctttgagataatcttatagctaactatgcagggacttataggtcgatagtccgacatatgtttggtgtcatggatcttaggaatgagacagatcttagttttgttgatactaggggataatccgggctacgcccggtgtatttggaaatttattttattttttatttaatttaattttctaatttcctaattactctgcatatttcaattaattatcaactttatcgagaagtttgctccgccgcgcaagatcctcgatgtgacgctttggttaggccgacttataaagcaagttctagcttctatagctaactaaataccttatctttccccgcaagaaagcacatcaaaattattttgtttatgggagggttttgtttttatttgaaatattttctaggaaagttgagaagacatttgaatttctcatattgttgatttgattatttttttgttttaaaattaatagttactcttgaaagtagtttgtatctgctgtatattaaaaaaaaaaaaaaattattttgccaaaagtcgattaattgtaacttattttgtgtaagccacatagcctcacaagcatacaaataacgacaaatcaatatagatactctagtcttgaatttcattcctttcctttacaacccttgttgtatcttcaatcttcactattggaggtggtgtttgtgcctttctcgatgaatattgcagatttgttcactccttttgtaacatatttgaagagatatttgatagcatttgaagagttacaccattccactttattgagcttgtaaatggagttgtactttagatcctcttggtatgggaatatccgatttgcagaaatgaatccttccattgggtttgactgttggatgaatgattaatttagattcatgttgggtttgtatattaagcatataatagacatacctgggagtagatgaacagtaattcaaaacccatcaatatgttgccttttttgatattccgggcttcccagatataaattagtcggagtaagacttctttttgacagaaatctccatcaatatcatcaaaattctgaaaggtgtatggctggagagactgttgagctttatgtggtgccatgtttggattgtaatgagaagtctgtttttttttatcctctggaagatttggttttatagtgaaacctaaatagatgggaatggtagtggccattatttttttttaatgtgaattgaacgtgaatatgggggagtgaagatgaggtagtggagtagtttcggtaacagtggcgttttggtttttatttattggagtaatctgaagcgatacaactaaaaaagatagagatgatggtaagggatgggacgacttagggttcaggttttagtatagtaggcccgtcttatctaattttatgtagatttgggcttacagtttttgttatagatgtgggtttgttttttatttgtaccagtgtttttaattagtaattgggccattgtagctgctgaagtttatgataatttaataataatttaatttttcgttttggcatttgtctatgcagaatattaattgaatataataattttgaccttcaattaatgttttttttttgtcagtttttgttaattattaaagaattgtataggaatgtattatattttgttttagttagattttaaaatatttggaacttcgtacactctatatattagcatttgaggtttatttttttctaaagattgataagtctggtttattatatgggataatgggtggtaaatttttttaactgaattggtggggggttttatatatatttttagcatttttgtttttgtttagatggtaaatattctgtaattattttggtttttttatttaagaaatttaaagttagtatgaaaagtatattatatctgcggttataattattttctgtaattatgaaaatgattgtggtattttaaatattttagtttgtactagatgagtacccgcactacgtgcggatttatgtattactatttacaaattattttatataatgtttgttcatataaaataaagttgaatgcatcggttttgaaacataaatataatttgtaattgtttttgaaaagtccaactatattagttcatctgaaaaacgaatgtgtttgagttgtttttattgttgttttagattctcaatttgttttttaatttatatatccttgtttttttggttatatgtttagattgtgagacggtaaaatttttaaaaaattattttgtacacgaaaaatataacatgtctttattaaccatgtctctgcatattcaatatatctaaacatattcaacttgatggtcttgaaaagtttagttaagttcttgtcataatcttatatcttacgtattagttataaggataactccttaaacatctttcaaaattacttgttttcttaacataaatctcgaaaagcttagatatatttaatctgcatattcatttagtttctttcataataatgtgtaatttttagacaaggaatatgtgttggattttatgatcactttagccacttaagtagatctcaaaattaaagagaatatattgaattaaaaaatgtagaaagagtgatagttcaagttctgattaattatatcctcctattttagttgttatgttgaattaattactaattatgtgttacttattttatgaagtttaggtggcaagctctcatgtgctgatgtgtcaagttgtggaagagacttagcctcctttcgtatatatgattattatttgatgttttttttttgttggttgtagtagttacatgtatttgctgactattgtttggcccacttttttttcgaaatacggtagtttgttttatgatttttgattggttgggtcttcagtatgaattttgtttatagcggtttacgattacattgttgggcctttattattattatttttttctttctaatttggttaatactgaaggttgtggatgcatgtcttgaagaaaatgtagacgttgaattttttttttatattgattttggatttattgttgtgaagctaaacctcggttgtcctacatattggacaatttttctttgcatataaccaagtgactatacagtcatggtggtagatgtggttacatgctagattgttgatatcatctcgtcctttgaatgtttgtagacaaatggcgcaatcttcattttcctccgatgtagttggtactcttttggcagtttcgagatgggcaatgagtacgtcggtgtcaatcctagaatcagcttgaaagttgtaatctgtaaccttgaagtatataagaatcgccttatctcttttactttgtgttgatatgtgcacggccttgagaaagtgcaggaacattgacgtcattcttgttgcatcactctcttgtatttgatgatatgttagaaggtagtggaggttgcttctcagtgttggccatgttggtacttcgccgtttggagtgtaggggatttgaacgacgatgtcactttaatctgtgcgtggccttctgataataaagacgatttgactggaggtgtgaaagttagaggtaatttgataagagaaagataaatctagattttgggtatctcccatgttttcttgtattttggtttatttttttgttgattgggtaaggaataaatagtgtgccttggtccttttagattcttcttttagattcatctcctcttcaatttttgtcgttaatggactctctttagtgttaatattaaattagttttaaggtaatgtgatagtaggcaatttaatatagaattaattatattttattcttatctcgctatgaagatacgtagccgatacatacatttgatacgttagttttttgttgggcggttattaaacccaaagtttagttaataggccgaagcccatgtaaattgtgtgagcccatttgcattttacgaatatttgtttaacacaattgtttttttttttggttgagttagaatcagacctgcattcatcggttcgtttttgtctgtagttttgttttttatttctctattgagcgcttaattagttttgttgccgttaattattttagcagaaattaacgttttttggttttctgttttctgcatctattggagagagtagatggagaggagtgagtgatttggtgctccaattataccaagcgcaacgaagtagaagcgataatgattcttccggcggactcttacattggtactgaaagaataggttggtttttcctttaacttaattttttggacagtaattcagacttgtatatgtttttaatttgtcgaatttggaacttctatgtatgaggaatttgttgcctcgcgcttcttttaaaccatttggtaatgtcgctatttgggttatgtgaatcaaggtaggcgtttgttgtgtttattttggtgtatgtgtattttctttgagtaatttggtaattgattttattatttcttcgatatttcgacatgagaaattggggtaattgggtttgttcagagattttgttgaactctcttatggctaaatttggttaggctgttgattcctgttgtaagtaaattgaaaagtgtatgtgttgaactaaagtagtttaagagttggtaaaaagtctaacattgttgcgagaaaaagaaaacatattcggggtaattttttctttcttctctatgacttgatgattgacatcttgaatgtttccatagctcctggtaagtgatgctgttaatgaaagagtatgaatattagtttggtgtgaaagtagatataaattttcattggaatttgtatttttattttggttgagtatcgtaatatgtatttggaataacttacgattggatgatttcaggctgtaggagcgctatatagctccataaccattgaagtattacctgaaccattttataaagaaagtaagcacatatagtttgtttggaatttagggtaagtagtttacctgtttcttttgggaggtcattgtagatttccttgtagactatatttttaactccattaggctttttgtcctctccttgtaggatggttagtcctgtaggtgatgtaactctagaaagagccacgtagagttttccatggctgaaaactggatttggtagataaagcacgactgatttcaaactttgaccttgacttttgtttatggtcatggcgtagcatattcttacatgaaattgccgtcttcgaagcgtaaaagggtgctctgattggggtggcgataagataatcctcggtatggaaacatttttaccagcatgtgtgcctgttactatttgtccttctatcactcgttcccccaaattagtgacaattagtcttgtaccgttgcacaaaccttccttttggttcagatttcttagtagcataatcggaactcctctttttaaggttattttgtgctttggcaagcctgcaaattctaaagagtttaaatactcaatagggtagagtgcttcataatctgctccaactgtgtctgcttttccaatgctatctgagcttaaatattcttttgaatcccctccaacttgagataacatgtattcattaatctcatcaacatactcattccggggagtaagaattgctcgttctgccaagtattggaagttgggctgggagacactgtatagcgcatatgctgcctatgtgacttggtggagggggttcccattgtgttccaaaaagaaatttgactccactttgacgacttcaccatcatctttatcagttgcatcatctgtttcgcatgttgtagcatttccatttcctacacttagtagccaagctgcaaactttgtttttgagtggtggagtctcatgtttttttccaaaacaaagacattgcatgcatcccataaataggactgacttatagcggcaagtacagtgtctgctcgtgttccatgtggtataactggtagtatttgcctaaaatctcctccaagtagaatagttttccctccaaatggtttttcgcttgccaaagagtccaagtctcttagtgttctatcaagtgtctcgaacgtgtgtcgatgcgacattgatgcttcattccatataatcaaatcagtcttgattagtaactcagctagcattgtccctttcttaatatcacaaatggaatcttctgtaacattcaaaggtatcttgaatcttgaatgtgctgttctgcccccaggcaaaagcaacgctgcgatgcctgatgaagccactggtaggacaattcgtttttctgatcttagtttggagattatggtcttgtaaacaaatgtcttccccgttcctccagggccgtaaagaaagaagagttttcccatattgttgtagactgattccaaaactgaatcgtagactttgttttgctcgatatttagactgctaaaaagattctcgtattcttctctctcttgtttttcattgtactgaagctcctgtctttacagactattccctaattgttttagaacgtttgaatcaggcttaggcatatctttgaactccgtgagtgttttttcatgttgatgcaagagtagctcaatctcaatcaaagtataatgatgcagctcatgtctttgaatttcattctttgattcccaaaagggcgtcgttgctttgcaggtatgtcttctgacattgatttccaagagtgttcccacaaccgtgatgagtttgctacttcacaatagattagtagaaggacaaacagatgccgtagttgaatcagggttgcccattgatttgcttcatccatcccatgatgccactctttatcgtcgtctagcaaccctctagcatgacatgatgccttaaaactgtcttttatttctccgtgaactgtttttaactcatcgtagctttgtggccctgtaacaacattgagcaggatccgaaggtagtatagctccccagaggttgggtggatattgacaattctaccaattgagaaaccccgttgtcttttacgccacactttgccgtcattgtcccagacaaagtggattggaaattcgatataggtgtactttcgagcttcttcacaatgtttattcatctccatccatgtagtgaacattgtcctcttgatattagctctagacaagacatatctcaaattgtctgactttttgtaagccaccaattgttgtccttctagatggataatcaatttttgaactgatggtttccttttgtggattttgaatgcaaaagtacgccacatagcttcacaagcagacaaataacggcaatctagatactcttgaatttcattcctttcctttacaacccttgttgtatcttcagtatcgaaggtggtggttgtacctttctcgatcaaaatggttgctttatctactccttttgtaacatatttgaatagatatttgatagcatttgaagtgttgcaccattccacatttatgtgcgcttgatatttcttcaagattggcagattatgcgggataacaaattgattatctaaccttgttcctcctttgacgacgaagttgtcttggtctggccgacgacggtagacaaaatgtccagatttctcaacagatgtgaaagcattgtatgagcgtgggtactttttagtgcaaaccttattagccatgcaaggagatgatggtctatctgttccacaaggaccatgcatcatgtgtttttctacaagctcaaatccgagtgggtctgtgattttgttgggtagttcagcagagatgattgcatttatttcagcagcggttgggattttagatgtcttctctagccacataagtatatgtgcgtgaggcagtccgcgtttctggaactcaattgtgtgtagcactgtaaaaaattttaaaatattttaataacaaacttcttgaagacagtaattggtggacttacaaaaacttggtggacttaccagcaatagatggactgaagaatgtgcctttctcgaggtctataagcaattcgtcaagtttcatcttgaagacacggcattcaatatcaagtctctcattagctgaggtgccaccataggttgccaaatgttcctttatttctggtcaattagtgtttgcagtcattgtgatgaacaaagtaggattaccatatgcacgacatattgccattgcatcatgatatttctctatcatgtatcttggtcctcctgtaaaagttgatggtaaaattattcttttccccacttttatgccttcggtgtcacctttactgactgcatcgaatacgttgttcctgattgtcttttgcccagcgaagtcgctcttgttcgatgatagtgtatacatcaacaacatattggtggaataagcgtcctgcctttatgaatgtcattccttctgctagcctagtctggatttggtaagaatagaagtctcgtatactaagataagttcttttcctttcgccggctgtggtgactgcatgtggtatttctgtataaaatccatattcaccataagggaacaacaaaggatattgcaagctcatgaacaaaggatgatcatctctaatttcttgtaagtggcgtgactgcaattccaaaactacatctctgtgaccagaagtagttgttatatcccctacaattaagcctgcaacttcattgacttggggtagatcatattgcttacccttacctttttggtctaccaatctcattgttaagtcttgaacttcatttgctttgtagcgatctctagctttccgaaagaacatacacaagcaattatggtcatctaacatcttaaacaaacccacaactatatcttcttgaatttcgtttgctgagtttttgcgcggcattgtcatcattcgattggagatttcattttctgtatcgtagatatacatctgaagaaattttggtgactgtcctggcagtggtagcaatgatccaatgcgatggtagttttggccatgtattctgaaacatggtggtcctctgccagatgtgacactgtgatctatttttgctcccatagatgtgaatgccaacatcgaattgtagacacgtatgttaagacgaaatgtgagactgttttgtagtagtttgtcgagaaaatctggagtgtttctgattggtggaagtttgacacgtccttgctggcaacatattgtgaagattggttctcctgttttgctatcatcccctgtattttctgaataccataccaatgtgttgcaatgagggcattgtagtattgggttttctttggccatggattctgaagtgtaataagaaatgatttgttgcattattttttttttttgaatttcttattgtttgaaattgaaatattgagtgtggatactaacctttaagtttttttcttgcttgtctggataatggttggggtgtcgttgaggactcacctgtaagaagatattaaaaatgcgttagtttattcaatttttagcagttattttatcttattattgaagttctccctgattagatactcaccttggtgtttctttgaaaatcttttagataagatttgagcccgtctcattgttcgtgcatttttttgcaacactataatgtgtatttgtggagtgttagttaatgatatagggatgaaataacatgattgatgtagatcttaccatattcaaaacatctttcgcatccacctatattttgtaatttgatttgttattaggtgataaaattatatacgattttatgcacttgatgtggcgtaggttatagatggaagtagagaactaacttacagtcatagtagctgggtgtcggtggttttgctttcttcttgatgtaggttccttgaactaaaggtttagctgagtatgttaagtataagtatgtttaagtatttgtaactatgaactgactgaagatgtataccttttctatttctggaagttgatgcttcgtggttattgttgatgctgtttttttttcgctttttgataaattgttgttttccagaccctgattttgtgtctcgtgccctccatatttttgacagaaggattgcttttcgcctacaccttgcttctctacaacggactgtgaaataacatacgatatgattaaaatggtaattctacaatttgatattgaaaattgcagggtagagatacttgccgtagatggagcatgtgtgacaaccacctataaggagaaattaaatttcaatgttagatgtctattttcttactcccagtttgttaatttgaggtaggtatgtacactttaatatttagtagggtttgacagtaacttacaattataatagttgattgtggggattgctatattttcacttgtttgtcctgttggtgaagaagaagatgttcaaatgtcttgagagagagtaaaagtatgtatactaacactttgtgtaatgtattgtataagaaagtttttggagatgtaccttcatcggctggaagttttatttttctttgtttcttttctctcattaattgagtttggatttgttatctgtctgatccttaggtaaaacgatctgcaatagtaagaagggatttatagcgatttttttttctgcttctttaagatattagccgtgaagatgtagttttgttagtggagagctatggtttctgatttgattaaaagaaatagagaggaggtggagagttacatgtaaacgtttgtggatatcgaatattaatttggatttctttggtcaatggtttaatatgccagtttctattagtggagaagtgaaaggttgcttgattgagattctgagttttccgattttacttttttttgtgaatccttctctgttattccaatgtacaggccggtgtctcatgaataatccataataacattggtgaaggtgcatcgttggcaacatattcggggtgaaatatgttttaccagtcatcatgtatctggttttaaaatataatttgatttgatgtttgactttttgaatttagtaaatttattttcgcagacaatttatcatgtttaagtaaagcttggaaatggatttgtttagcgattgatgttagattagtgttggagtttgtattgtctttgtgcttaaatcgttggtctattgtttgatggtaaaccaaaaaacagaagtggagcaagggaaaggcaaaggagaagctgaacaacatggtgttgtttgatcaagctacttatgagaagcttctcattgaagctcccaagtttaagctcattaccccttccattctctctgaccgtatgagggtatatatctgtatctatctacttatttcttactctagaaatgacagttatatcatctggcagtgaattggtttgagcttctattgaatccaagtagtaaatattgttgtgtgtttatacatgatttactctagctaagaactgcatgaaatccttgttcatgagatagttctttgcttcctcattggctcaaatgttatagcagtgctatctaagtatataatcatgtgtaattggttgtcactttggctctggtctagagcttgacactttttttataaccaaggctttgaccttgaagaagaataagactaagttgtaaccttgattccaaataataaaaattcggttctttttcttttattggatttgagtctttcacatttgacattgatgtttcaagatgtttagagattgattcatttgaacatcattctgaaatagttgtagagacctacaattatgtttgatttctcagaaaatgtgatttctcagaatttgtggttgagactcattgtttttgcttcaatgctaacactgagtttctaaagattagaacctgcagtttatttcagtagaaaacttgaaattaagtccacagtttgtgatagaaactgcaactctctttgcaaaatataaacgatcaagtaatagtgttgggatggtagaagtgaattaatactgcatcaagatccattggttcggtttaatattctgaaaatttggaaaagaaattatattaaacctgcagtttggttttaagacctgcaacggctttgaccaacaattggctgtaatatttgcaattgtttattgtcaatatcattacgtctttggaaaacaattaacgtgaagtgaatgaaagttgcagtttttgtttgtttgcaaataataataatcaagtattcagctgcggtttactcgattgagtttcatgaaagtcaaagtcagtttatgactttatgatcactgaattcatatgaacgaatatgataaaaagataaggcctgcaacccatgtggccagtttctctataagagtggaggctgttttttaaatgtaaaagaacgcaacatctcttagttttaagtaaaagaaagcaacaaagtttattttattttggccttacattatggaaactccattaacaaatttaaaa

SEQ ID NO: 1325 - DNA, 36034 bp, Arabidopsis thaliana
gccggataaagtttgttcggagaagacgggttgccataaaattcaaagattttgtttttgaaaacgaaaacaaaaaaaaataatttctcttctcttttttttttgtttgcttgatgtttcggttttatcgctgtttttttctaaacgctttggttgtgtgatttttctcctatggttactgccacatatatttatagaagcacgtaaaaccttatgcatgtacatacacgttttacctgttagatatatatagatgcccatgtgtacacttcttaatcggtttgatgcagataaattaatctataaaaaaacagtgacaaaaaacaaattctaaaattacaacggaatctttgtaaagaaagtaaaaattgatcttgtttattcttacgagttacgactaatttgctgatttcttgtcatttcaatccaaagggaatcttaaaataccataaaattttaagtttattcttaattttaattaatggactcattgcaaagttttctacttatgtagtgattcttgattggtatcatatatgattggagtaaataataacaagttgtagcatatagtattcgtaattatataaaatctagaggctacgttatttagtttaggtccacaaatattagctgttttcggaaaagggaaagaggaagattgtggcgtaattttctgagagagacaaatttaaaaataatgataattaaggacgtcagagacagcaaggccctgaccataggatgagtcatcggataactatttaattaatataatatatgataaagttttttcaaaatcaaatatgttttttaggattttttattgttattgtttttttgggcggagacggtggaggaagatatgaaggatgagtggatgatgaatcggattcaacatgtggacctggacttgttctttgaatctttgacttttctaaattggaatctccggaatcttaatgactactagtttgaattaatcaacaaaaagattcatttcttaaaaaaactaaaaacttaatatgtttactacagcacaatctcaatttagagattcacctatgctttttttctatatatataaggtcgtagcacttcgatataaagaaaattctatatttttgttgatctcttactctaattaaattaagagtgtatttctattagattgtttatgtttgacatttatttgtaaacataacgcaatagtaaaactacaaataagtaaaaaaaaaattatgttctatatgtcattatttgtaaatgatgtgtgtatattttataactatgagaattataattataatcttcttgatattatacttatcacaactaaattaaaaatagatgtggtaaatggctagatttggtatttgtaaaatcataaataagtaaaaattgatttgagaagtcaaaaattgaacgaattattttttcttttaataaaattttaatttttttttaaagacacaaaaccagatctaagtatgttttttatattttttttctttatcactgtttagtctttagtgcaagttgaatcgtcgacaaatcggtagtcaatattatttttttctacaatagtaatgaaagctagaggatctgaatcttgatgcagcttagcggtaaattttacagttgttttgagaagttccttcactaatacaatggtcgaggacactaattgaaggtgatcgatgataccagttgagggtgaacctcaatgtaagtgaatagattaacaatggttcatgtcggttctaaaactagttttggatagttgggttgcgcaaacggttgtttccactatcttgatttgacattttcttcatcgagtctgaagttaggtcagggagttgaaataatgtcgtagttttctaaatctgacatatttagtaaaaaaagctctatgttttggtttttggcgttagtttgtgaccagattcactaactctgatcacgtcgacggtgctatgatagagtaattcttattagcggtgatgtttgtaggtttagatgtttgtatccgtcgaacagttatttcaaatcacgtctttacttgattatatgatttggatgataataaaattttgtttaaataaaaaattaaataagatgataataaaattttgtttaaagaaagaattataagtttatttttcacatcattaatagaaaatatattattctacaatcattaatttatttaccgcatcaattacaaaaatatattctaactatcttaacatttaaattatctatttaatcaagggtaattctcaaaaaatatcacattcaagttttgatttttaaaaataccacttaaattaccctttatattttaaatctaaaatagttaacctaaacctaaaaaatttaaattctcaggtcttaagaattatttttttgtttgtagtaaactttttactgatattttggaataattttgataacaatatttgaatatatggaatgtttggataacaaaatttgacactgtattagtttaaaaaacttcgttactcaattatgattgccatattcattaaattatgtcatcattcttccaacccataccacttgacacagtaatgaagaggaaccaaccaaagctaaagataacttacaaaaatgtttaacatgaatttgatgtcgcaccttttagaaaaaatacaaaagagaatctttgaaaaaagcagatctttacaacaacaacaaatataaaaaaaatacgagtgggaccaattcgtcctcccaaaaaggcaatgtcaccaagttttggaaaaactaaagaaacaaagtatttatttataatgatgtgatttgagccgttaaattgagggaaggagagggtgagaggtcacgtgagggagtaaagagagtaggtgtacattagacacgagagtttccagctgtagccgccatttttattggtccaacccaactacgcatgcaatattcattttttgtttcttaatctttttattttttattttttatactagcggtttttataatgtcaaaaatacaataatgtcaacaaaattaaattagattgtatttttttggataaaattattattttattagactaagtggtaacgaaaattaatttcaagaaaaataagtttgatgtaaatcagattgcattatcgacattaacctactgagttatacgcgtcgtatactcgtatataacaaatagaatcatattttttaattagttttacgaattggtttatcgtgcaactggtaaataaaatatattaaaaaaataaacacaaaagaataatgtcttctaaatacattttaaaactcaaattagtaaaaaaatatgaaattagtcataaatataagattatgtatataggtgatacatttaaagtatcaagagtcgtaaataaatttttaatagatcagataatatattttgtctgatactgtatcagtgcagtgattcttttgatatccagtatcaagtgatctagagactcatgattcgtctttgaaacgcgttcattcccgaaagcaaaaaaataataataaattcattcttctatctgatagtctttctactgttttagctaactaactatattttctgcgagtgagtaattttacggcttttttgtaattatacgatataattttgcagtaattttgtaattttatgtttttctatatttattttttcattttgcaaataattttatttttaatgataccaatatctctcgccactgaaaacatatttattatcaatattataaaaaaaattaaacaataaataaatattaaaattaatactaaaaaattattaatgatactcataaagtatcaactatatgcatgctctaagaagctttaaaaccaaaagaaaaatgagttttatttacaccaagcttaaaaaaaaaatggtttctagtgtaacttgtcaaaataagagttttatctgctaaaaggcaaggcaaggacgaataaactttttaaaaccaaaaaaacctcgtgtttcagtgctgacttatatgtaagatggtgtgaaagattatggaaaaatgtcgtttaatacttcaactttcaaattgtggccattttatacctcaactttacatgcggccattttaaacatgaagatatcgttgaccaactgtttaaactataaacattcgttgaccagaccaaaaaaactaaccgttaacagtcgttaactgattatctaacgtctgttaacatctccgttagccacctttaaacgatgtcgttttcatcttttaaaattgattgacgaacgtaggattcgaacccacaacctgcgacaagaacaagacccttacttaaccatctcacctattgtatttgataggtaaccttacgaaacaaatataattatatagttttaaaagctttcttcttcatctttaacctacatctttaatctacgaaatctgggttctctctcagatgatttattttatagtattaatcatatcatttttggttgattgaaaagattttgaatttgttaaattcaattcctcgcaacctgttcttatgaacaccattgatagagtcgtcaattcatatgaaatcagtaacacaaatagcacagttcttcgtcgtctcacatgcaccttcgttctcgcacctacaccatatgtatatgttctgttattgctcttagcggatctgatgtatctaatggcataatatataattacgtgtttttggatagtaatcattaaacagtctagcttatttggtattgacaagtacagggagcaattgaaggtgaacagttcgaatcctataatcgtcatttctttttaaaagataaaaacgacggcgtttaaaggtggctaacggagatgttaacagacgttagataatcagttaacgactgttaacggttagtttttttgtctgatcaacgaatgtttatagtttaaacggttggtcaacgatatcttcatgtttaaaatggccgcatgtaaagttggggtataaaatagccacaatttaaaagttgggctattaaacgacatttttcccgaaagattatattatcagtttctcttttttttttgttaaaaatattctcagtttctcactaagtgtttaaataagttttgaaatattggtagataatttatgaaaatttgaaaatattaattatccaaacgagtaatttgtgtactcccttttttacccgttaaaataagttgaacaaataatttattattcttattcaaaaatttaactaatctggattggatacctgtataattgaataatctaatttaatataaaagaaaaattctagaaaaataatattttaatcttaattttgtttattttctattttttatattttaaaattttcagtcgatttcatccgaaatttctaacaaagataacaacacgattacgcaagtgacaaataaatcagatgaaagataacaaaagtagatctcccataaattattaaagtactactaccgcgttactcttcgccctcgtgcttaaaactatgctaaaaacgtcaaaatcaaattctaaacaataattaagcatgtttttaaagctattaattctacaaaactacaacagattgtacatatctttttctgttttatataaagtactgctaatctatataatgatctgatatatattttcttcatagttgagttaaagttgtttgggtagctaaataaacaaataacccgaatatttgtcagtatgatggacctatggtactgtaactgtttacaatttagttttgtgtcttattcacctaatcattataatgattttcctttagcttcacctcgtccgtctatagataactaaaaacgtaactaaaaacaaataaaacacatatataacaaatatgtagcactaatagaaaaagacaaatccagaaattcaccacacaaaactaatatagcatgtacattattaggtttttacagctagatgtattcatgtttttttgcgaaaccaatttttactaatatatcctgttgtgtaatattttagtggggcttcgaatgaacttatataatactttatatagaatactgattagtgaatgcaacaagttgagtcctttctaagcaaaagcaagttgtcgtcctttcaaaacccacatgccaaaggttttagtaagatgaaaacgacagtcccatgagctgccaaattaattcaatcgtgatgagtcaacaatgagtcgatgccaacaatgtttgaaatagagagaaaaagttagcaaattattaaactaacacatatattaatatgggaaaatgtcaaaaaaaatgctaactttcaaaaataggacgaaaaaatcaccaactcttaaaatgtcgttttaatcacatacttttggttaatttctccaaataagtaaagttttgttgatcgggccaaattagtcatcgtgttaagtttccgctagaacgatgtttacgggattaacaatccgttaacgcgcactgtttaaccgaaacgacttcgtttcgtcaaaaacaaaacgagccaaaacaagacaaaatgtctttgttgttttagagacaaaagctcaatccccaaatcgattataatccctaattctaaaattgaaaattttcaaattctctcaatcacttgtcaattgatcccgatgacgaagacgcggggaggaaactggaatcctcgtcggtcgcgtagactaatggttatggcaggctacgataatagtgcaaacattcgtaatccacctgaagtggttgagatcccagaatcaaaatcaacttagggattgagattctaaaatcaatttgggggttcagaggctcgtttctttattaaagagacgaaatggttttggttagacggtgtccgttaacggattgttaaccccgtgaatatcgttttaacgcgatgaataatttggtctggtcaacaaaacttgttatttcctggaaaagtcaatcaaaagtatatgattaaaacgacatttcaggagttgataattttttcgtcccattttctaaagttggcgatttttttgatattttcccatattaatttatgtgcgtatgtatgcattccatatagcaatttcagtttttacaaataagttcaaaattcaccaatatacgtacactttcgatttacttataatacttgtgtgtacgaaattctatatgaggaaacgccgtaaactcacatgaattgtttactggttgtctacttttattacttaagttagagtcaaacatatggtataagttcatacgataaatagccacacataacagagaggctaggattctaagtatataaccttttaaaaaaaagctttggtatagaaaatttggtgaaactgttttgggatagtttttcagattaatcgatcatttatacagtgttcattaacagggttctctctcatcctctagagagagaaattttttctcttccccgtgggttttgttcggcgagctttctattctcttctcccttctctaatcattagattacagggagacagagtttagatctcatcttcacctttatggtgtaaataaattatggcatacttgtcggacttttgtctccggctaattccggttctctctcgtttgtaggcgagattagatctcctttccatctttgtcctatccatcgatttctctgttttcttctaagtttttccgatgtctccaattacttgtggagtaaaatcttcgtcactttcctttgctcaagacgcaagagcaaataaggatcttagactacatcaatttgggtgcagtcggtggtggagcttccatggagttggtgattccttgacaaattttgaaccagttttaattgatcaaatccaaaagatttcgggtctttttacattggattggagatcagcataagggaagaggattctcaccgctactttgctgatcggcggcggctaatcgaaatttttggcggtgtctgacgaatttcgacagtagtgcatgaagacctgacgcgtggtctttggaagaacacatcttctccacgtgtctatgctaaatcatatgtgcaaattgcaattatctttctttgtttagttatgatttagattggaccgtttgttgtaatcctcttgggctttcacccttatgtactttgccctttgggctctatgaatcaaaatgttggccgacaaaaaaaaaaaatcgatcatttatacaaaaaccattatgtaatcaaattaaaatatgtatgaaagacgaactctaagtcaccccttacatatataactgttgatggtttaacatatgcatattttttaaatctagaatattacttttgacaagcatatatctattgttgtatctagaatatcacttttgacaagcatatatctatagttgtacttaaaattatattaaaatatttaacattatgttaatacaaaacatcgtaacatcaatatctgtgaacaagcaaaacagagagaaaataatcgccctaattaaaaaaaaaaatcaattatagatttgccatttttgaatagtttgcagattttttttttttttttttttccagattacagaaatattatttaacatatatcttattcgttatgtttgagtttagtcggttgtagtttttcttatgtttaaagttttcggtataaaatacgtatttttattaaaaaaacttaaatatgtatatctttaagtgttataaaatggtaaaatttgtaagtttttagtaaaaatagcaatttcaaaagattttgatgaaaaagacaaaaaatcgataataatctaaaaagaaaggccgactaattatatcgaaaaataaaaaaagtgtttgtttatgtcataggtcaactaaaatgttttagtggagaatgagtggtgcaacttgtgaggactttatagacctatatgcaagttttctctacttacgacgaggatatcattgtgaattaaatcaagattctcatgaatttagattatatcactcccatatatatataatgtttatttattttttcttcttacagagatttccaatttatttttaccctataccaataacaacgtatagtaaaaaattaattaatacacattaaaaaaattacaaatacaatgaaataatacgaatatacgttgcccctcagtcacataattgattcaaaatagaaaaataattaacttaatccgcacttgaaggcccagactaattaatgggttaaatgcagcctatgtagtggcggatgtagaaatgttttctgtcgcactaccaaaatcaagggatctaaagttatttttcaagtttgatatatttctatttttactgttttacctatgatttagatacatccttatttttactttttttttttctagaatttgtttagagtctttttacagttttttcaagtatttaatggattaggacaaaaatggagataaggagacattttggagtaaaacctgaagaattaagctaaagaacgaattcaattccacatcaagtcgagagtgtcgattgacacactcttagtgtctatcgacaccagttgtggcccaacaaagtctaagacagtttagagtttgaagaattgaaaatttgccccaaaacatttccctattcactttattagtccatgtacattttagaatatatatatatatattaggtcattgtttagacctgtgaagttttatatcaacctttattctagcttttgatattttggagactaagcaattcatacattggaaatccatgttttcagagtttcatcaaagatcttttctaactctttttttcttttgcttttgtttatgctttcttattcaaacatgtcttgttattcaatgatcatgtctgagtagtatgcttgttagggttagggtttctcattagggttataaatgatttagtagatcgcccaccttttagaatatctgtaggactcttcatttttgttgttcttaatgttagttttagaataactaactagaacttgatcgtaaataataggtagtactcaaaaaggcatctattacgagatctactatttgataagccgggtttatagatgtgtaataagaatcggtctatttacttaggtgaacttatcaaactcgtttagcatgcatgtttagaattagcgatttgtgaagccaacgctgagagtctttagttttagacaaagtgaataatgcgaagccaacgctcggttattctgtagtggtgatttgagttcaagaacggtttgataatatcctagcaattattagatctactaatcatttgtttcctgagaataccctaagcctaacgtttttattatctgattgtacatcctcacaatctgctatttgcttgttttgctttcattttattttcctacttattgtttagcttgatctcgatacttatgtctattgtatgaacaaaagagctttgcgaattggatccctaagtggcacaactgacctctttatttgagagagtagtttagggtaatttgacccacatcaaagttctctaaagtgatgactctaagttttttagcttcacttgagaaactgactttaagtttaaagtcataaatcaatatgggccataattctttaatgggccttaaattttgtctgaacccatttactttgtcgaattttagttatgtttttgtctgaacccatttatatttttgtctgaatttcagttacattttgtctttaaatttttgtcttaactaaaactgtaaatatacactacaagaaaatacgccagttgcgagggaagaaaccgtcgctagtccctcgcaaagagcagttaacgagggaattgcgacgaattttagttcctcgcaaaacgcgcgtcgcaaaatcaaattcgtagcaagtccctcgcaaattttgcgaggaacaaattacctcgcaaaacacacgcaatttgcgagggaagtaatctgtagcaaattcacggcaaattatgggtctcgcaaatttctcgctagttgcggcggacgacctgactcgcgaagcacacgcaatttgcgagggacgtactcggtagcaaattagctgcaacagaagcctcgctctttcctcgcaagttgtgagggaatacgtcagtagcaaagtagtcgcaatttttttgtcccgctaatgcctcgcaaactttgcaatggatttgcgtggcttctctctgtagtcgcaaatccgtagcaaagtttgcgatggattttaagcatgattactgttgaatatagagattactgttctacttaacaatatttaatgattatcttaattggatctttatactaaactttgaagttgaatactaattaagaaaccttaaactcatattcaaaagctgaaattttaggtttcaagtacagaaaacaagccaacaaataattttacataacaaaccaaaaaaagattcaagttttgatgagtgaaaaagaaactgaatacaggatgttagaaggcctcagatggagatgacccagtgtttgggttagctacaacagccttaggttcgacagcctcagatccgatcccagcagctgtggcattaggcgcatcaggtggattggagctgactggttcagttcttgaagaggatctggctcgaaacaaggcagcaaactccagatccttttcggcaaggtaatcaaagtatgcgtcaaaactggtgatcttctcagcctggtttgcaatgagggcttcagcagcaggcaacttctaggaaagcacaaccggatcatctcgaggaagcaccggaccggcatgagctgaagacgcctcatgctgcaatgaaccagccccataaatcctgtctttcttcttaggagcaacctgtcacaaactcataaccaaaacaagcaaacatgatcaaagcaaagtcgaaacatatagacataatgcaaaactcttaggccgaaaatacaatgatattattcagaccaacaacacaactgaatcaggccaaaaacacaaatacacaacatattcaattcagtttcacaacataatcatatccgtttacacacactgccaatttgcaaaccaaaaacacaacatattcaattcagtttgaatcacaatgacacaatgcaagccacaacatacaaattcaattcaagccacaacagaccaatccaattcaagctaaaacagaccaatccaattcaagctaaaacagaccaatccaattcaagccacaacagaccaatccaattcaagataaaacagacaaatccaattcaagccacaacagaccaatccaattcaagctaaaacagaccaatccaattcaagccacaacagaccaatccaattcaagctaaaatagaccaatcgaattcaagctaaaacagaccaatccaattcaagctaaaatagaccaatccaaagcaacaaaaaaagctgtcttctatattgggttgaaagagataagatacctgtgcatagatcttgttctttgcctgaacagataacccgcctgaacccgtgctctctgtagtgtcgcctgaacacagaagtgactcttcctcttgaatattcgaggacacttccttatagatttcctccgactttctatcgatgaaactcccatcaggtttcctatgtgtttcatctaagaggaggagaaaatctggagtactttctcctgtcatctcacactgaaacacataaacatataggtcaattgtttgaaatacaagctttttaaagtatgaaatttaattaacttacacgtttgcgggctctggctttgtatgaggtctgtccagaccggtgtttatgtatcccgaggccttccggatcatgataccttacattcctactgttgagactctttctttccgacttcggatccatccaaaagctaaccagacctttccaaacttctggatctatccaccgcggttttgcctcatttcccttctccttccactttcccttccaacgaccaacttgatcagacatcctatccttcatctttgcctcaaactccaatctaactctctggtttattgcagggtcccagttatatacttgctacaaaacaaagacaagacacattagaaatagacaagaccaaaagttgtaccaaacaaaacacaaaattatttcacttacagcaaatgtttcaaaccatctatcgaccactgcttctgatgtctgtgacccatttgcatgaggctctttgaaatctttttcaaaaatgctccggacagtggctgcaactgaggtgtcatcgtcaaacctacaaatcaagactccatcagacagacaaaactaaacaatcaagtaatagtgaagagaacagagcctagtggcttaccagagagtaccaggaggtcgattggggtctaatttaggcaaccctgcacgaccagggctagcaagcaactcttctatagtcaggtcattgagccgagcagctagtggagtagtgtgattggcaaaaccgggaggagattgattggcagaaccgcgaggagattgattgacaagcggaggagaagcaccatttgcttgattgttggaattgattggggtttggagattaccctgagtggctgaaccgtttccttcactaggagaacgacgttgattttgttgctgagaccgaaactgggaataatcattgctagtgaatgacatcttgcaaaaaaaaagagaacattagtaaaggagaattcgaaatacaacgaaaattaacgaatacaagcaaaccctaaacagatctacaatgaaaatcaaccggaaacaagaaaccctaattagatctacaaatagaaactcgaataagacagattaaacccgattcaactctagggtttgaaagatcaacacaaaaatcaaaacgaaaacccttattatagaatgaagatacactctagggtttgaaacattacctttgggttccagacggcggcgacgaacaggtagacacggaagagaggatgaacacgcgtcgatgaagaagctccagacggcggcgacgaagaacaagcgtggatgagaagctccagacggcggcgaagaagatgtagacacgacggcaatgagtcgctgaagaagttcgagccggcggcgagtagcttcggcagtcgtcggatcgagagagaataggcgaagaagaaagaaaattagggtttggatgagagacggctgggtttgagcttcgctcaaactcgctcgcattttatatataaacttaaatcgcctcgcaaatccctcgcaaagttgctagggctttgcgaggaaccaactaaataaccaataaaatcgcttcaattttgcgagggacttgcgagggaccgtagtaaattcctcgcaaagttttagggttacacagagattcgattagggttttcagataagtttgcgaggaggttgcgaggtccctagtaaatcccccgcaaattgcgagggacttgcgtggggccgtagtaaatcccacgccaagctgtaaggttacacgcttgcgaggaagttgcgtgtatccgtcgtaaatccctcgcaaattgctaggggtttgcgagggacatggtaaaaaataaaaataaaattataaaattataagaaattacctttttttactacccttatgcaacaatacccttttatattgttcatttttaaaaatatcccttcccttgaacataatgaccaaattaccctcatctaataagaacatgtaattggaaactttcagtttttggcgccaaaatttattttttccgccaaaaaaaaaatttccgccaaactttttttcccgccaaaaaaaaattcccgccaaaaaaaaaaattcccgccaaaattttttcttgtaaaatttttttcccagccaaaaaaatgcttttaaaaatccttgtaaatttttaaaaactcttttaaaaaaccttgtaaagttttttaaaagctttggtagttgctaaaaagccttgtaaatcattttaaaaccttttaaaatctttataaagtgtttaaaaacataggtaaatactttaaaacccctttttaaaccttcgtaaatcatttcaaaactttttacaatagttttacaagatttacaattgttttttaagcataagtaagtgacattgaatgatttacaagggattttaaaagcttataaaagggtaaaacatgattcacaatcgtttttaaagcataagtaagtggcatagaatgatttacaagggatttaaaaagggttagcatggtttacaatcgttttttaagcataagtaagtggcaatgaatgatttacaagggattttaaaagcttataaaagggtaaaacatgatttacaatcgtttttaaagcataaggaagtggcatataatgatttacaaggttttttaaaaagagttagcctggtttacaatgtttttttaagcataagtaagtagcattggaatgatttacaagggattttaaaagcttataaaagggtaaaacatgatttacaatcgtttttaaagcataagtaagtgacatagaatgatttacaagggattttaaaagtgtttgtattgtttacaatcgttttaaagcataagtaagtgacattgaatgatttacaagggattttaaaaggggttaacatgatttacaattgtttttaaagcataagtaagtgtcaaagaatgatttacaatggattttaaacatttgtaaatcattttaaaactcttataaagtctttacaagcattttttaactcttagaaaaagaattgtaagtatttaaaacatttataactctttttgaaccattttaaatctcttgtgaacctttacaaaaggttttaaaaacatttacaagagtttttaaaggtttttcttataaattcttttaaaatattttaaaaactcttgtacatcttttaaaaccctttaaaaatcccttgtaaatcttttaaaacatttttaaaccctttaaaaatctttaaaaaactcttgtaaatcttttaaaaccctttaaaatcccttgtaaatcttttaaacccttttaaaatctcttgtaaatcttttaaaacccttttaaaatctcttgtaaatctatttcccgccaaaaagaaattttttacaggaaaaatggtttcgtaaataaaatttggcgggaaattttttcggcgggaaaaatattttaaaaaaaaaatttggcaaaaaactttttttcgaaaacttttgacgggaagttttttccgaaattttttggcgggaaaattttgtcgggaaattttattttggaatattttaggcgaaaaatattaatatttcattttgttaacctaaatcaatttacaaataggggtaaaatggtcattaaaaatttaaagagggtataaataaaaatggtaaatagaaaagggtagaattaaaaaggggtagtgtgaaaagggcactagaaagaatttttcaactttaaaattataagaacaacacaatgcaaaattataataataaactttaaaattatataattataactttcaatattattaaaaaaaaattctgaatttatttattatacttggttaaaataatgaaagtagacaatataaaatacaacatttattctgattcattttctgaatcattataattattttctgactcaacgttttcatcagattcgccgaattcgtcttcttgtttttcttcttcggaaccgtatgtgatgatgtcttctaactctctattttgtaggtcaatgtggataacatcttctgttgttatgtctggaatggaaacttctctaatgctttcttgttgcatcacaacatcatcaactaaaccgactatacggcccctgggattcactttaataaggataaccacacttcacgctgtgaccttacacgcgggtaagatagaaagcttacttgtcttgcttgtgatgctaggataaatggttcgaacttggaataagtcttgtttgcattgacatcgaccacgcctaagttatttttccgtaccccacgatcgatcaccggatcaaaccaatcacacttgaaaatgacgcatttcaaattcaaaagtcctggatattcgacttctagaatttgctgtataatcccataaaactcagtttcaccttcgacatggattccataatttgcagttgcccttcgacttccatatggatatgtatggaaagtatagccgcgagtgaagtacatcgaagctgttgtgatcttagatcttggttcttgaacgagctcatgcaaccaaagttgtaatggttcgtttccacatccgttcgtaacctacacatagaaaatattaagtttatcatttttttaaagtaaataagtaatcgaatattcgaaatattattatacttacatagtattttaaccatccagcaaaatcacgatctttgtaagtttcatactctttttcttctaattcaggacatgcttcacggatttgtgaatcaaataacctacaaattacaacgtagctgcttaattagcttccttaattaatttcacactaattattaactataaaaattatgaataaaactaggttgctttatacctttcaaatttttgaatgtaatcaacatttcagagtatgtaattgtgagctgctcgagaaagcgcatggtcgtcccaccaaacttctttcaacttccctgcgagtctacctatttgggcaaaggtatctgtaacatcgggaacgttatatgtaggtgcaacacctccatcatcatagcgtcgaggacgagtctttttggttctaacgcttggactaaagtaatacgacgtgaagtgagacgtttcctcggttaaacttcctgcgactatcgacccctcaactctagcaagattttttgcctttcctttaagagatttcatgaattgctcaaaaagatacatccatctgaattgtactggcccaccaagagcaacttcatgtagaagatgaattggcaaatgttccatcacgtcaaaaaagacagggagaaataatttctccaagttacagagcaacactgggatattcttgtctaattgttctatggtatatgttgtcagtgttcttgtacataggtccttgaaaaatactccgatgcctattatgtatttaattaatgtaagttaataatgaccaagtaataattgagtaaaaaaacatatagtatatatatatatatatatataataaatatatatatatatatattacctgcaattgcctcatgaatatttgtcggtagcaactctactaatacaaatggcaataatcgttgcatgaatacgtggcaatcatgacttttcataccagaaaacttttggccttgctctacgcatcttgaaaattttgacacatatccatctgggaacttcacttcagcaacaacccactcgaacaacgccttctttgcttcattagacaagcggaattttgaaaccggtaatttcccatctcgtgtaacatgcaactcaggtctgctacatatttcctccaagtccaaccttgatttcaaactatcttttgttttgccctgcacattcaaaagcgtattcatgatattatcgaaaaagtttttctcgatgtgcatcacgtcaaggcaatgccgcaagaatagatccttccaatatgggagttgccaaaagatactttgtttgtgccaattgtgagtgcttccatattcgtcaggcatattcgccgtggtgagccaattacccccacgtttgcaggtttcctgagcaccataataatcgatctgtttaaacaaatcagttccagaaacataagatggcggaggaagacgaactattttattcttcctaaaaagttttttgttacgccgatacggatgatgtaggggaagaaaccgacggtgataatcaaaccaacatggttttctacctttctttagttgaaacgcatctgtacgacccatacagtagggacaagataatcttccatgcgttgtccaccccgataacattccatatgccgggaagtcactaatcgtccacattagcactgcccgcatattgaaattttgtttgctcgagtaatcaaacgtatgaacaccttcataccacaactttttgagttcatgaatcagcggttgcaagaagacatcaagcgctcgtttcggatgctttggcccaggtactaaaatacttaagaacaaaaattcgctttgcatatacatatctggaggaagattgtatggggtcaagataatatgccaaagagaatattgtcgcccagacaaaacgaatggactaaatccatctgtgcataagccaagatacacattcctacactcgctagcaaagtcaggatataccgtttgaaagtgtttccacgcctttgtatctgatgggtgctttatttctccgtctgcagttgtatgttgagcatgccatctcatttttgccgcagttctttctgattgatataagcgtttcaatctatcagttattggcaagtaccacattcgtttatatggcactcgcgtccttccgcttgtagtctggtatctcggcttcccgcaaaaccgacattcctgcagatttacatcatctccccagaaaatcatgcaatagtcaatgcatacatcaatcatttctgatggtaatccaagactcaaaaccaacttctgtatttcaaaataactctcagccgatatattatccggtggcaaatattccttaattaattctgcccatgaatccatacagttttcacttaagttattatcagctttaatagtcatcatcatagatgccaaagataacttagaatgtccttctctacatccctcgtaaagtggttgatttgcagcatctaacatatcgtaaaaatgttgagcatctacgttgggttcttcactaatattttcaggaaatgaagcaatagtttcatgaaatgcatccgtaaccatatcatgaaatctattttcctggttatgcccataaccaaattgatcaggtacttcctgaccataattcgcatcattattaaaattactaggttgctcgacaccacaatttgtattactagttcctgcgctatctcaacaaccatctccataacgtaaccatacatagtagtttggcataaatcctctattataaagatgcttcttcactacattaaattccaaatatttctcattgagacacttacgacatggacagaatattgtaccgttctcacgagcaaatggttcgtttatcgcttgatacatgaaaccgcgcagtccgtcgtaatactctctcgtcaccttccggtcgtttgatctctatgattatacatccaacttcgtaatatgtaaatctcatgctctccgccccaagacattcttatttttgtaataagttctttttttgatttttttttttttttttttgtaagtaaatgttgtgatttgagttatgatttcttagacattacattggctatttatagatgtcccaaaaaacattgcgagggacttgcaaggcatttgcgagggatttgctaggattttgctagaaatttgcgagggaatcccacctaccaaccagactggtaagataatttgaaacgtgctcacctaacccgccaagactcgctactccgtggccaaagttgcgacagaataatcattcctcgcaaactcgtcgcaatttgcgagggaggctggttagccgtaaatccctcgcaaatttgcgacgagtttgcgaggaatgacgctttccacgcagattcctcgcaaacgtctcgcatatttgcgagggatttgttcgtcgcaaattttgcgagggattagcgaggttgtcttcttctctcgcaatacactcgcaaatccgtagcaaattgcgagggagattttccaccgcaaatttccctcgcaaatcgcctgttttcttgtagtgataaaatgaagaacaataacccaatgaaatcaaatatctcaatagtaggaacaatacatcatatactaggtaaaggcccgcccgttgggcgggtttggtttgtttttgtttttaaacttttggaaaaaatatatatattttatataactttattgttgttgcacatgtatatttttattgtttaatttggtatatggttgtgttcttcttgcttctttaattaatatagtgttttattgtctttaaaatgtaattatgttatttttttatttttatgatgttttatgtgaaatggtggttttttttttgttttttctatttttaataaatatattattttttattattattttggtatgtggtatttgtttatatatataaatattgtgttttagtaaaccctttacaaatgttcgaatcaacaaaagcatgattgataaaagagcattattattttattaatcatgaataataagaaaataatatgaaggttatactatttggattctacaattaggacatgtagttctatgacgtaaccaagttgaaatacattcatggtgaaatatgtgattgcaagatagtgttaatgttttgaagaccatgtagctcttcaagacagattgagcattcagctttttcttcttttgtggtttgcctttgtaaaattgataggtgttgtatagtgacttccacatcaagtcttgtcgttgcatttggattgttatcttcgattataaaaatgactttgagtggttgtggattgcctattccaaatgagagaagagctgcttctataaaatttgtcaaattgttgatcaaagtacatgatgttgcttcgtcaatgtcatggaaggtaagatagaagttggtaagttctctgaaatgttattatttggttgaagtatttggtcgtgggagaatgagattctgtagctgatgttgttttcttgtcgatggggtcttcataaatccagatggagctcgttgggtggatgggttgatgttggacttgcttcatagcgcattgcgtattgtatatattccattttgatatttttgttgatgtaattatggttttctgcatgtgtgtttttgttatttatatagtgacattgttaaggtttaacattactgttatttgattatataattgaagagcttttaattgtcattattatttgttggatttatgtgtaatgtgtagcattatagccgttgggtctatatgctgttacttattaatatttttgtgtctttttactcccttgcataattgtaatatattttacgtaattgtatatcattatgcgtacaattctggacttcacagaacttatatatttaattaattgtgaatttttgtttttttggtgtagatatatcaaaatcgtaattaatattgatttttccccacaatttgtataatgtgtccagcgttttgaaaaaatatgtcagaatattttattttgatattagttgtgaaattggtagaattactactgttcaccaatcatatttttcctactgttatttgggtttgacataacacaagcattgggctttaatgggtcaacaaaattggcaaggtgaagaagaacaaaagtgtgggcaaaaagtttgtagcccatttacgtcacctatatatgcattacaacgtacgacgtatggtggaggtaggtgagaaaagaatctaaagagtgttctagagaagagagataaaaaagagcttcctaagcaagctttcttctttctatttgttgttcttaaatctttgttcttcttgagtgcaaatatgtaaaaaccaaaagacaacatcacaagttagtggtgtgtttgtaattcctttgatatagtgaagctttgggagcaagagatctccccctagacgtaccggttgaggccgtgaactcggttaccaatttttgtgtctttttatttatttaacaagcaatctctatcactcttttctccacatctacagtagtaatttgttcgtatatttgtctttaatataattgtattaacactcttaacacttgtaaaaggagaatgaagacaagaagaaaataagttcttaacactcttatatcattgttagcaatagactgctgtaaacgtttgatcataaagtcaccaattaatcttaccaacatgtgcatcaagagaagcaacacgctcctctccaattgttgagaattctattgaccatataactcaggaatttggcaaatcgttgctccaaatgattcacggataaaaccattttgtgtttttgaaacactcacgctataaatcagtacatagaccagagctccaaattcttgcaactaatcaaatcaagcgaagagaatttaccagcggagacgacggtggagaaaatgcgttgatcaaaagggcttgaagcaaggtcccaaatctcattaggatgagagaataaaccctcacatatcaggtcagatccaccagatgacaaacgaagagaatatgaaccttaatagcatctcaaatgttggagagattaaaaaaaaacacttttagtatcttgatgattaaatagaagacaaaatcaaaatcaagagatgggttcacctcattttcttcttttaaactaagagtttcactgagaaaacttgttccgtgagatcctgatcttaaattgagacactgagcatgtccatggaaatctacgtattgaagattctcgaataagtgacggttgtccaagcatcctattaatatatataaccctatgtaactagctcattcactatcaaacacaaaagattcatgaaatagattacattagaatatgattaaagaatcctacaaatcataatctgaataaatttcattgaattataatatgaagaagagtagaaaggagttcagaatcctctctgcatggagtggattcttctctccaaaaatgtatctcttaataaaaacaagcttaggtctaaacaatgaccataaaattatgtatatgggttactaaaacgtgcatggtctattttgcaaataaagaaaacttcagggacttctgaaagactggatgaaacgtgaaaattccctttgccgaataagggtgtcgatcgacataggtgaagtgtggatcaacactatcgcgtgaaaaacgtctctgataatcttcattgctgaaaagcttccaaagttccttattatgcttcatagctctcaaatgtataattgcacttgtaatgactcaaaacatacgaaaaagacttgaagactccaaaaactattctaaaatcatgttagaaatcagttaaaaccatgatatatcaactcccccagacttagcctttgcttgccctcaagcaaaacataaaactgaatctgtggaagaggtttgaaaacataaaaactcccaatctctctagcttattaccatgatcatacaaaccaattccatgtactaaacagttctaatcaagtcctaaccaccatgaagttctccgctagctcacacaacatcctagattccataccaaatctcacaactacatccattagactctcttcgctgggtctcatcaatcaagctaatatccaggaaccctctagactcattcctctactataccattataaattgaccattttttgtttttttggtattctttctcttccctaaacttattattttttaagagtaaacaaaggggaactcgcatactcgattgacaccctcggcattttcaaactttgtaattgatcattgcaagtaatgtacaataatggggtcatgggaaacatccctatacactacctaaaatcatatcagtcttgtatttattattattattattattttatctagggagaataatactttttgttttatatcacattgatcaatttatcaggtatgaacaaggagtcaactccaacgaacactaaccgttttgatgaggtaaaaggaagagaagtgagattagctctagcctttgtggattatattgggattggatgtccttaattatgttggtttgctttctggattttccattagtcggactgaatcgaatctatagtacttaagaaaatccaggaaataaactcgagagaaaggtcataatttcagacaaaagtttgactcaataaaataactatctaataaagacgacaataatcaaaaacttcaacttcgagaataaatttatgaggcatctcattacgcttgctgatcttccccttctctaacaagaatcgcatttcaataatgaatttgtgagcatcccgaaacattgtaggccaccagaaacctgcttgaaggaacttagagactgtcttgaaagtagcaaattgaccaccgtagctggagctgtgacaatacgatagtatatcatgtacctctgttgtagtaatacacctcctataaactccatcagaacaatgcttatataggtaagtttcatcccaatagtatcgcctaatctctcgcagaaatctcttcttgttgtaatctgtgaaatcatctagttccacatctgcagctaggtaattgactatgtcagcataccatgggtagtccttttcgattgttgtggcggcactgttttcagtcggtaaccaatttcttgtcagattaggagggtgtcaatcgacatcttgagtggtgtcggtcgacaccatcgagcaataccgagtagcatccttttctttatagtgaatgtcgatcgacataggtggagtgtcgatcgacactgtagctcgattatgcaacacaacaattttgcagtcatggtcctcagctgtatctatcatgcaaatgttttcctcaggcaaggaatcattaatgggaacatcatctttaattctaatacgtgacaagtgatccgttacaccattttcaactcctttcttatctcgtacctcgatgtcaaattcttgaagaagtaaaatccatctcaaaagtcttggcttagcatcttttttttttcatcagatacttcagggctgcatggtttgtatggacaatcactttagatccaacaagacaagatctgaacttctcgaaagcgaacactacaactaacaactctttctctactgttgcatagttcatctgagcgtaatcaagtgtcctactggcataatagatgtcgtggactttcttatccttcctctgccgtagaacagctccaactgcaaaatcactcgcatcacacatttcttcgaaaggcaaatcccagtatggtggttgaactatcggtgcgctgatcaaggcttgttttatctgctggaagccatcatgacaatcttgtttaaactcgaactggacttccttgtagagtagagctgtcaatggtctggggattttgctaaaatctttgatgaaaatcgtctgtagaaccagcatgaccaaggaaactcctctctaggacaaaaattccactattctgagttttcaggtcgtggtccctttctataattctgaatttgaagccactgatattataagctgaaaactttataaccttactagatggactaggtgcaaggcaatgaatatcagcaaaaatgccatcgaggctgttcttttctaccttttgcttaatccattgactaaaatggatatgcacatgtcgatctatatctatcatatgtcctctttttcaacgtcgtaattgtgatctgcttaattcactcttaaatacgctacacattttcaaagggagacaaatattaccattataaatgaccacagtcaatcaaaaactgtcagcctaaaatagaaaacttacttgcgatagtcatctaagaatgaacattcaactagaatgtatttgtgtgcttgctgcctctctataggactaagtgtatccaatctggaagcaccaacatgcaacatgtctcccaagaaaaggaaaactttgtggaatttgtgattcagacctaaatcatgctccaccacagagtgatcatccactctcccaatacgattaaatcttgtttctacatcatcaagatacatagagcaaaacgtaacacactcatcagcaatgtattgctcataaattgatcctttaggttgtgttcgatttctgtaacgcccgtgaaccagaaaatcggttagggtttatttttaaatcatccggtttaattggttgggttaattggaaatcctagagtgtgcctataaaagaaggaaactcgaaattagggctttagttagccacttttcgttttataaaggagaaaaagagagaaaaggagaaggagcagaatcgttagggtttgggagaaatcagtttcgtcatatcaaatcgtggtaaaaggtaacgaaatttggtagcgttattcccaagtcctttatcgttattctacagtttacagaattggatttggattaaaattggttgagttattcgcagtttcgtgagacacgttttctcagacgcgaattaggaccagcggagattgaaactgagatcgtggtcttgtctgttttccgatcgtcacgagattttgtgggcagctttgtgacgtctgcatctaggatttcattggagcgattgaatagttaacggttattttgtattttagggtttcgtctttgagactgcttgtttctggtttttcctgtccactttgcttcaaggttgcttttggttgtggacttgttgtagaacgtttctggactgtttcagacgcaaggagagtctctcctgggtttaattgctattagaatcaatttgttaaggtgagtgcgtgaccatgagcttatctgagcgattgggttgtgtgatttgttttgtgtgatgatatgtaggtgtggtgaatgtgttttgggtgaattgttcaatgactggtttgtttgtattgtattcgtgattatacccttttatttgcttgtgtgtatagctcgtagatcggaggatcgcctcactaagtatttatgataatacttacgcatctcattgtgttgttgatgcaggtaaagataaagtgtgatcgtagaatcatggcaaggaagagaggatgatctaggaactcgtttgttttatttttggtgtttttggttattggaacccggttaggattgtcagttattcttggttttgttggtcgaattatttatttattcataaaatagtatttttgacttgcggtttaattattatgttattggttggtttaattagatatttatgggaatatttaattatatatttaaaaaaaaaaatgggtcgggttgtttcaatttggtatcagagcgattacggttctaggatgtgtagaaaaattaattgatgaattattttcctgatgattgattatggagtgtttagtcaattgtgtgttgttggagtcctaacatcatcttctccgagccttaaatgagattccacggtaagttgtttgtgatatattcgtttgttttagtttcttagccatttgttcttgagtagcgcagatggttagaggagctggagttcgtggtcgtggtcgcggtaggggacgagtcctcgagggtacaggcgagagtgatggccacagtgccacagttgagcagagtgtgggttcgcagcctgagtttgtggagcccggggttaggaacggtcttggtgccgataaagctggtgcagccggagtgggggctggtggagctggtgtcggtatcggtgtgcatgtcgttggtgctgagggcccaggagtgatgggtgtcgcagccggaggagcccaggttccagaggttggtttggcgggcctgctgaggcagtttttggagcggttaccaggtgtggtaccagtgcaggctccagtggcgccacgagtggcggaggtgcagcagagggctgcggttgctgaggaggttccatcttatttgaggatgatggagcagttgcagaggattggcaccgggtatttttctggtggtactagtcctgaggaggccgacagttggaggtcgcgtgttgagcggaacttcggttcgagcagatgcccggcggagtatcgggtggatctagcagtgcattttctagagggggatgcacatttgtggtggcggagtgtgactgccaggaggaggcaggcggatatgtcttgggcagattttgtggctgagtttaatgccaagtactttccgcaggaggcgctcgactgtatggaggcgcgttttcttgagctgacacagggtgagcggtcggttcgggagtatgaccgggagtttagccgactcttggtgtatgcgggtcggggcatggaggatgaccaggcccagatgaggaggttcttgaggggacttcgaccggatttgagggtgcggtgtagagtgtcgcagtacgccacgaaggcggcactggtggagacggctgctgaggtagaggaggaccttcagaggcaggtggtgggagtgagtccagcagtacaaccgaagaagacttagcagcaggtggcacctagcaagggcggcaaccctgcgcaggggcagaaaaggaagtgggatcatccttgtagagctggacagggtggtcgtgcaagatgtttttcttgtgggagccttgaccacaaggtggcggattgcacgcagcgagctgagacgagagagttgtaccactgcagggagaggagacatctcatgccgaattgtcctaagctgcagcggatgacagtggcagtggtacagccggcggtgcagcacggagcgcaggtgcagcagggagtgcagcagttggcacatattgcagcggcaccgcagggttacactacgcgtgagatatgcggtaccagcaacagagcgaatactggtatgatttctgagactcagactttgtgaattatttctgttgttttggatatcattgttttgtgatgaatgttagggttcttagcccatgagatttgtgtagggaccttattagtgggcggtgtagaggcccatgtgttgtttgactctggagcatcgcattgcttcattaccccggagagtgcctcgcgcggcaacatccgtggggatcctagtgagcagcttggagtcgtcaaggttgctggagggcagtttctagcggttctggggagagcgaagggtgtggatattcagattgcaggggagtcaatgccagcagatttgattatcagccctatagagttgtatgatgttattctgggaatggattggttagatcattacagagtacatcttgactgccaccgtgggagagtttcttttgagcggccagagggaagggttggtttatcagggagtgagacctacctcagggagtctcgtcatttcagcagtgcaggcagagaaaatgatcgagaagggctgcgaggcttacctggtgacgatatctatgccggagtctgtggggcaggtagcagtgagcgacatttgggttgttcaggagttcgaggatgtgtttcaatcgttgcagggattaccaccatcacggtctgatcctttcacgattgagttggaactagggacagcgccgttgtctaaggcaccctacaggatggctccagcagagatggcagagctaaagaagcagctagaggatttgttgggtaagggattcattcgtcctagtacttcaccttggggagcgccggtgttatttgtgaagaagaaggacgggaatttccgcttgtgtattgactaccgggggttgaatcgggtcactgtgaagaacaagtaccctttgccaaggatcgatgagttgttggattagttgaggggtgctacttgtttctctaaaatcgatttgacgtcgggttatcaccagatcccgatagcggaggcagatgttcgcaagactgctttcaggacgagatatggacattttgagttcgtggtgatgcctttcgggttgactaatgcacctgcagcgttcatgaggttaatgaacaacgtgttccatgagtttttagatgggtttctaatcatctttattgatgacattatggtgtattctaagagtcctgaggagcatgaggtacatctgaggagagtgatggagaagctgcgggagcagaagttgttcgctaagttgagtaagtgcagtttttggcagagagagatgggttttctgggtcacattgtttttgtagagggagtttcagtggatccagagaagattgaggctatcagagattggcctagaccgacgaatgccactgagatcaggagttttcttgggttggcagggtattacaggaggttcgtcaaggggtttgcgagtatggcacagccgatgactaagctaacagggaaggatgttccttttgtgtggtcaccggagtgcgaggagggtttcttgagcctgaaggagatgttgacgagtacaccagtgttagcattgccagagcatggagagccttacatggtgtatactgatgcctcgagagttggtttgggttgtgttctgatgcaacgtgggaaggttattgcttatgcatcacggcagttgaggaagcatgagggcaactatcctactcacgatttggagatggctgcggtaatctttgccttgaagatttggaggtcttatctttatggcgggaaagtgcaggtgttcacagatcataagagtttgaagaatatcttaactcagccagagctgaacctgaggcagaggcgatggatggagttggtggctgattatgatatggagatagcttaccatcctggtaaggctaatgtggttgcagacgcgttgagccgtaagcgcgtgggcgcggctccagagcagagtgttgaggccttggtgagtgagattggtgctttgcggttgtgtgctgtggcacgagagccattgggattgaaagctgtggatcgagcagatcttctgactagagttcggttggctcaagagaaggatgaggggttgattgcggcttctaaagcagagggctctgagtatcagtttgcagctaatgggactatccttgtgcatgggcgagtttgtgtgcctaaggatgaggagttgcgacgggagatcttgagtgaggctcatgcgagcatgttttccattcatccaggagcgactaagatgtaccgagacctcaagcggtactatcagtgggtcgggatgaagagggatgtagctaattgggttgcagagtgcgatgtttgccagttagttaaggctgagcatcaggtgcctggtggcctgttgcagagtttacccattcctgagtagaagtgggattttatcacgatggattttgtggttgggttgcctgtgtcgcgaaccaaagatgttatttgggtgatcgtggaccgtttgactaagtcagcacattttctggccatcagaaaaaccgatggagcggcggtgttggctaagaaatatgtgaacgagatcgtgaagttgcatggagtacttgtgagtattttgtcaagcagggattccaagtttacttctgcattttggagagcctttcaggcagagatgggcactaaggtgcagatgagcacggcttatcatccacagacagatgggcaatctgagaggactattcagacgctggaggatatgttgcggatgtgtgtcttggattggggaggtcattgggcggatcacttgagtctggtagagtttgcttataacaatagctatcaggcgagtattgggatggctccttttgaggcgttgtacgggaggccacgcaggacaccgttatgctggacccaagtgggggagaggagcatatatggtgcaaactatgttcaggagaccatggagaggatccgggttcttaagctgaacatgaaggaagctcaggatcgacagcggagttatgctgacaagaggaggagagagcttgagtttgaggttggggacagagtgtatcttaagatggccatgttgcgaggtccgaacaggtctatctcagagactaagttgagtccgaggtacatgggtccgttcaggattgttgagagggtgggaccagtggcatacaagttagagttgcatgatgttatgcgtgcatttcacaaggtctttcatgtgtcgatgctgaggaagtgtcttcacaaggatgatgaggtgttgactaagattccagaggatcttcagcccaacatgactttggaggcgagaccagtgagggttctcgagaggaggatcaaggaacttcggcggaagaagattcctttgatcaaagttttgtgggactgcgatggtgtgacagaggagacttgggagccagaggcgaggatgaaggcaaggttcaagaagtggttcgagaagcaggttgctgcatgagtttgcctttccttggtttccagtttcagtgttgttgagtttttgagcttttgagttgttgttcttatttatctttcatttgtattttcgtttggagttgtaatgatcatgacaattgatgattaataagatgagtattttttttcttggatttgacttgagttgtcttatttaagaatgtgttgtgcggtttccaaaaatggaaagtttcctagaaaggacttgtctatttttggaaagtttgagtaaacaacctaagagaaaggtgtgtttacgagatggtcgggatttggtcataaggatgttctcgaggggatatgatggatggtgaggcatagaggtgtcttacgcgaatccatgagagagtctggagatatgcttagaagcgtttagtattgttgctcgagggacatgagggtcccaacgactcgtgaggagcggggtatgctcctgaggtaccggtaactcgagggacatggtgtctttatagtacgaggggtacggtggcttcgggtgacgatcagagagcacgctttagggtgacgacccgagagcgagttttgtggtattattttctccaagtgtcgtaactcgatgactttgtggctgagagtgagacgacacaactcagggtttgactttgagtggggaagataatatgtgtgatacccgagataccgtaggccgaggcctgagagtgacggtttatgctcgaagattgcggtctgagagtggagagtgagttgtgagcaacaatgactagtaaatcgtgagtatatcgactggatagagagacctagaggggatctggttggagggagtgcggactgtagtgatggttgcacggagttcctcggagtggaagggtgaagctagattcgaggacgaatctatgttagtgggggagaattgtaacgcccgtgaaccggaaaatcggttagggtttgtttttaaatcatccggtttaattggttgggttaattggaaatcctagagtgtgcctataaaagaaggaaactcaaaattagggttttagttagccacttttcgttttataaaggagaaaaagagagaaaaggagaaggagcagaatcgttagggtttgggagaaatcagtttcgtcatatcaaatcgtggtaaaaggtaacgcaatttggtagcgttatgcccaagtctttatcgttattctccagtttacagaattggatttggattaaaattggttgagttattcacagtttcgtgagacacgttttcgcagacgcgaattaggaccagcggagattgaaactgagatcgtggtctcgtctgttttccgatcggcacgatattttgtgggcagctttgtgacgtctgcagctagaatttcaccggagcgattgaatagttaacggttattttgtattttagggtttcgtctttgagactgcttgtttttggtttttcctgtccagtttgcttcaaggttgcttttggttgtggacttgttgtaggacgtttctggactgtttcagacgcaaggagagtctctccttggtttaattgctattagaatcaatttgttaaggtgagtgcgtgaccatgagcttatctaagtgattgggttgtgtgatttgttttgtgtgatgatatgtaggtgtggtgaatgtgttttgggtgaattgttcaatgactggtttgtttgtattgtattcgtgattatacccttttatttgcttgtgtgtatagctcgtagatcggaggatcgcctcactaagtatttatgataatacttacgcatctcattgtgttgttgatgcaggtaaagataaagtgtgatcgtggaatcatggcaaggaagagaggatgatctaggaactcgtttgttttatttttggtgtttttggttattggaacccggttaggattgtcagttattcttggttttgttggtcgaattatttatttattcataaaatagtatttttgacttgcggtttaattattatgttattggttggtttaattagatatttatgggaatatttaattatatttataaaaaaaaatgggtcgggttgtttcaatttctaacataagacttgaaaagcccaaagattctacatagaaaatatagtatcattacaaatttgttaaagatcctatatagaaaatatattatctaagttacctgtcaattggatacatccatcgaaattgaattgacctcctagtttcacttcttctgttagatggatggtcaaatgtaccattatggtgaaaaatgatggaggaaaaatcatttctaaatgacccaatgtaagtgcaatatgctcctgtaacttatccacatcctaaagatccaatacttttgaacgtatttcccgaaaaaggcgacataaatctgttacaacaaatgagacctgtcaatgtaaaacaatacgtatagcatggacaacaactgacccatcaagatgtgacaatcatggctctttaatcccaccatttttgttgattcagatcagcacaagcagagatatttgaagaatatccatatggaagctttacactctttaagatagtaagaaatagatttttttgtgtagtcaaaataaaacatactggaagatattttctattttcatcagaccacaactcctgacgaatatcaaactcttgcaaatcttttctagcgctaagattgtcttttgactttcctttgttatctaataatgtaaagatgagattatcaattacattttttttctatgtgcatcaaattgagattgtgacgtaacggaagatagtactaataaggcagtttattaaatatactactcttcctccattaactttttctagcttctactcccgctcttctttc

SEQ ID NO: 1326 - DNA, 83912 bp, Arabidopsis thaliana
caatactatctcagaatgtttctctaaacagtcactgcatatgttgtgattctgaccgagtgtccattttccaactgtcacagctacacaactcagcaacatcacaacatactaacattctcctccttgatggctgagttgatgttccaactatcatagctacgtaactcagtaacatcacaatatactaacattctcccccttgatggctgagttgtagctcatatgatctagcatcgtcattctccccctttttagcttagtttgaaactcaagcaattaagctcacatgaaataccaagacaatatattgatgctccccatgtgaccaagctgctagcatcaatctcataaatgtgacatatcgctcaggcttcatctcgcctgcatgagtgcacaactaagataacattgcataggcatttttccttatgcctggatgctagagcatgttcaaacatctgctaaactttggctgcagacacccacaattgcttttgtctcaatgaaattttgcaaccaaattctgcatgctacacataaattctgcagacttctaaaccctgcaggctgcacacaaattctgaagaacattctaacagagggcttgatgcatcacttgtgtaaacaaaaacactgaagaacattcttaatgacgttgggctccatctttacaacagacctgtaaaacagagcttccacactgattaaaaactagcttgtgactgcaacataaaacagaagaacaaacattagagagatctgcttcaccatcaacaaggaactgctgtcgccaataagaacaggatttgagcctgccgtacgcacagaacagtcacttccgatgtgatagcagttctaagaacagattgtagaaccaacttccaacagcttacgaccaaacttgcagaacaaccattaacatcaactcttgtattgatccgctcttctttgtaaccatagcaacatctagcatatgaatatatatattcgatctcttcgttccatctcagattaatactccaaacaccttgagacaaccacataaaccaccagaacaccatgtttctgcttaagagcaacattgaagtcaagtccagacgaataccttgagacaacctttacctagcatcttatgtgcctaaaagtgagccagagtagataaagcaggagaatgcaacttctgtaatagttgttgtagtatgtggtacgtccaatttcaacacaagaatctcatataaaacccatagattttaagaactagagcaacaacgattcatcgaaattcaatagtgatgtcccaactttcacctacaagacacttcagcttcctgggttaaaacttaaccggagttactcaactctgagtattttacctcagattgatctcgaccaacatctccttgtagatgtcacttaagctaaccttgcagaacagaactggagttacacaactctttgtatttctacctcagattgatcccgaccatcttataataatagtgaaagtgaatccttctcttgaacttcaacaaatgagtccccttactcttctttcttctttcaacgaacacaaatgcagaacaaaggcttaaaaacacacactgcacaatcacacccattaattcacatcttggatgcactaagctgaaacaccctttattgaatcatttgcaagccaccattgcaaaatccagccttagaagtctttgaaataactgctctaaagcgtcgtcactatactatgtttctggtcaccgaatccaatgccctcttacaagaatatagctccacactcttgaagtgtctctgccaaatttaatctcatttcaaactcgtttggttgcccgtttgttgtttccaccgtaacagctcacatctgaaaatttagatgaaccaccaagactgtccaccaaatttcagctcgatctggttacttttagatctcaaattgttgccttgagcaagtcatatctgaactgatttctgcatatttctgaagatccaaaaagtacaatgctctcctttgattttgcaattcagatctccttcaccttcactctagtctgaacaataatctttaagcacatagattcaattcgtctctacgaacttaaaacaataagacgaaacgtggtttccttttccaaaccaaggaaatatgaattgtatagaagattcttcgtctgtcttgatacagagcataaacggactggcaaatcaacccagaaagatacgaaagttggtagaaacatcaaccacaaccatacggagccacaggagaaaacagatcaggatttgggtctacgggtcaaaagttatggccaaaatcgcaacacagacccagaataaaacattgtgcgaacaaccaactttgagagcaaattcctatcaaatcacaatgaatcaaaggaagatatttatatccttcgagagatctcatttccaagattccagaaaatctttcaatgctcaaatcagagttctatagccaagtcaaacgaaggtgactgttaagacagaacttgagatagacagattaaagaggaaagaagagatcagaaatagaagctaaccaaaatggccgcttagagagtgatattactgttgaaatgttataagataaggaaccctaatgagagattcccaacttaaatacatccagactttaggataacataaacttaaacgacgtcgcattaatagataaagagagagagactctgtttgtctcagagtctctagtgaccatagcttcctttcttcactttagccacttcttgtgtctttcttcttcaactcctttcttgccttacgaccacctgtccttgccttcctcttcatgaatgccaaaggaacccgtagcttatcattaccccggaaagagaagcaaccttgtccacaaggttgaaatcagggaattgctccatcatcacagtaacaggttcccaagtcgcctcaaactccggaagctctttccacatcaccaacccttctgtctcttgtcccttaaccggtagcctgacatctaacaccctttctggttcaaccacccactcaaaagtcggtgtgagcaaggctggtatttcctgcaccgtgtagtcagctggtacaactttcttcagctgagaaatgtcaaacaccgggtgaatccggctctgagcaggcagctgtaacttgttagcgactctcccaatacgctctatgataacataaggcctgaagtagcgctgtgctagcttctcatttcttctgcccacaactgttttctgcctatacggtctgagctttagatagacctaatccccaactgtgaactaaacaccaataatgtcgttgtagtattttaggttgtcaatccaaatgggtgtgatgctaacaatcaagatgtgatcagaagtcactaagtcaagccaagcaataacaggttttggtgtgttctagcagttctaagtgaacatgcagaaaacagaaattcaagcagaaacaataaaacactcgaccaacacagctctttgcagagcactgggtgaggtcgagtgacaggtcgggtaacagacagaaagtataacagggatactcgagtgcacagtctgttgccagacaactgggtggtcgagtatcaggtcgagtaacagtaaagaattgcagaaactaagcaacagatgacaagatgcagtaaacaacagtagagtaaacaaagaattcaattagacaaagaattcccgaggatggggtaattgagtagtttcgtttcctcagtttaaacgtggttgacatgctcaataaattaaccctagacaacaagttcattaaccaaatctaagtgccaccgcaacagagactctcaagttaacctagtcctagactcaatcaccattgacgagagttaacctaacaaacattacgaatcaacaagttaaagccaaaacgctccctgcaaccaataccttggtacagggtcacgaatctctggaattagtggttcagacatttcatcgaacaccttttgggcgcggaaatgtctgggctcaaattccagttgatcagaaagcaataggcattaagaacaactaatccagaagggatctatcaatcaatactcaatcacctagcatactgagaatcctacactactctaacccatcctcagaaacctattcactactcagacatcataacagaaagcataaacgttgaacaagttgaaaacatgataaaaacagtgtaacagcaagatgataacagaatgaacaacagtaaacgaaatcaagaacaaaagctgaatactgaatactgaatagataaagagaaatccggattacaaaaggtctagaacacaaggtttgcggaataaaactagataaaaacttgtctgcgaaaatgtgaagtacatgctacttatagccaaatattctgaaaccctaattctttaaacgacgaagtattggggcggattaagaactgtactcgacccatgtggtcgagtgggaggtcgagtgaatagctggagtcttcttttcttccttgtgctcgagtgtatggttgagtgcggaatgaagaaggctctgaagcttttcatcgagtatgcagtcgagtggtggtgatggtgatactcgacttccaggtagagtgaagaggtcgagtagtggtctggcaatgaaggtgaagacactcggcctcgtggtcgagtgatgagaccgagtgatggtcaggtgatgggatgaagacactcgacctcggggtagagtgatgtggtgaagtagtgatgtcctctactcaaccagggggtcgagtgatctgttgagatcttgaagctcctactcgacctcggggtcgagtggtttgacatgatcaggcccgcttcttccagacagctcgtcaacagctccaaatcacctgaaatcaacgcaaatatgcaacatgcatgcaaatctatcctaaacatgcaaagtgatgacaaatgatgagaaatggtataaaacagtgatgatatgatgctaaactgatgacaaatggatgctcaaaacatgcaaaatacacacttatcattggctgacttctgcattcttctctgagctaactccatattttccctcagttcttgcagcaagctatcacggtctctgatgagttcctcgacttgaccattaaccgttgaaatatctccatacctcagtatttttggtggttctctcccataaactgcaaggaagggtgtagttcccgtagtggtgtgataagaagtgttataccagtactcagcccaatgaagccactgcagccaagatttcggtttcctgccagcaaaacaacgcagataagtctctaaacagcggttcacgacttctgtctgcccatcggtttgagggtgataggcagtgctcctgtgaagaatggttccttgtgacttgaacaattcagtccagaagttactcaagaagactttgtccctgtctgacacgatgttctcgggaaatccgtgcaaccttactatctccttgatgaaaacttcagcaactgtcttagagctgaatgggtgcttcaatggtataaagtgtccatacttgctgagacggtctatcaccaccagtatcaccgagtaaccattcgagaggggaagtccttctatgaaatccttcttaattgtgtccatatctgctgaggaatgggtaaggaacatagtaaacccgctagagatagtgttgaatacttattctcctgacaaatctggcacgaatgatgtacttgatcacatccttcctcattccttgccaatacacctccttagacatcctctgaaaagtttttaaaaccccttcatgccctcctatctcactgtcatgaaattgccttatcagcttctgaaccattggtgaccctcttggtatgaccagccgaccatccttgaacagaaccccttctttagtggtgtatcccgtggttttctctccttccatttcacaccttttaatcagcttaagtaactctggatcctccttagtccatatagccacttcttctcggtctatagtttgtggagcacagagaaccaactaattgacttctggtacccgtggttgtcttgacaaggcgtcaacaactctattttccacccctggtttatactctatcttgtatgttaacccaatcagctttgcagcccacctctgttgcactggtgtcaaagacttctgatccaacaaatgtttcaaactgctttcgtcggtcttaatgacaaactccctcccagctaaataatgtttccatttggtgaccgccttgacgatagccagcagttctcgctcatacacagacttaactcgacccgttgatgagaaggcttggcttaaaaacgctatgggtctccttccttgagatagaactgccccaattcctgtcccagatgcgtcagtttccactatgaattcttgttcaaagtcaggtaaggctaacacgggtaagctggtgaccgattccttcaacgactcaaacgcttgtcctgcttgttcagaccattcaaacccttccttctttagcaaatcagttaggggttttgctatttggccataattcctcacgaacttccgatagtaccctgtcagccccaggaaacctcttaattctgtcacattcttgggttgaggccacttcaccattgccttaatcttttctggatctgaagccacaccatttccagagataatatgccccagataagatatctcactgttgccaaaagaacatttctttacattggcataaaactgatgcttcttcattatatccaggactttcttgagatgctcgaggtgggtttccatgtctttactatatatcagaatatcgttgaagaaaacaaggacaaaccgcctcaagtagggtctgaaggcatcgttcatgacagactgaaaggtggatggcatgttggtaaggccaaaaggcataaccaggaactcgtaatgcccttgatgtgttttaaaagccgtcttctccacatctgtagcccttacacggatttggtgatagcctgatcttaagtccagcttggagaacacagttgctcccttcaattcgtccaacagctcatccaccaatggaattggataccggtctggaatagttacattattcatcgctctgtagtccacgccgaatctccaacccccatctttctttcttaccaacaaaacaggactagagaagggactaatactcggccttattatccgagcatccaacatttcctgaaccatcttctctatctcatttttctgcaaataagagtacctgtaaggcctgcaattgactggtggtgtgccttgctgaagggtgatggcatgttccctgtttcgagcaggcggaagtcctgttggagttgagaagacttcctggaattgtgagagaatgccctgaatctcagctgactcctccttcttctcttgcggttctgctgcctcaaagagagtagttagctccaatagatacacttcttgtttcttcttgaccactctactcatcgcattcagtgatataggtacttggcacagactaggatctcccataatggtgacccacgagtttctgatcttccaactcaaggtaagcagcccccagttagtccttgtatccccgagtttagctagccacggaaaccccaaaacaacatcagttccacccagctcaaacagtaagaaatcctccatcatctccactccttgtacttccaacatcacacctgaacacttttccttgccatggaatatatgaccattagccacccttactgcaaaactctgagtattggtgctagttaaacccaactccggtgctagcttgtgagataagaagtttgaggtggctccggagtcaatgagtatcaccacttctctacccccaattctacccttcatcatcatagatttctctgatgaaattccacccattgaatgcatggtctccacttcagtctcagaggcattctgttgctgaacctcttgtttcatttgttcaggttccagcccttcatcctcctcaacgtcctcctccacgtccatactcctgaccctttgcttacatttatgtccaggaaaccacttgtcaccacaatatctacagggattaacagatccattgtcattaccagcctttttgaactcatttcccttggaagtgctctggtaaccttgtcttggtggtggagtgtatgacgaagttgctatagctctgggtggtgctcgaatctggtagcttggagtgtcattctcttgagcctcgataagcttagcaaagtcaaccatgtcatctaggttgactggcctgcatcgcacaacctgattcctgaggcttttcttcagccctctcagaaatgcagactctaaaatatcagtaggacaatgcggcagctccactgagacagcctcgaacctctctctgtaatcctccacactacccttctgctcgatacacattaaatggtctgcagaagtacttcccatacttggtttaaatcgactcttacacttagccttaaacagaggccagttggtcacgccttctcttccctcacggtatctccaccaacccactgcgactcctccgagacgtgacaaggcttgggtcaacttctcatgttccggtgtctggttcactgcgaaacacttctcaaccctatacaggtggagagtttgtcattgcacctgctctcaacgaaagcaccaaattgttaagaaagaacttgagatagacaaattaaagaggaaagaagagatcagaaatagaagctaaccaaaacggccgcttagagagtgatattactgttgaaatgttataagataaggaaccctaatgagagattcccaacttaaatacatccagactttagggtaacataaacttaaacgacatcgcattaatagataaagagagagagactctgtttgtctcagagtctctagtgaccatagcttcctttcttcactttagccacttcttgtgtctttcttcttcaactcctttcttgccttacgaccacctgtccttgccttcctcctcatgaatgccaaaggaacccgtagcttatcagtgacaaagacagagaaacaccacttcaccaaacagcaggttatttaagtctcttttgctacagggcacaaacgaaacagcaaaccaaccctgaaaattctaaacattggttgcaggaccaactttagacataagaagctacaagggaccaacatcattaagaaccatactccaataggcttcatcaactttgaagcatactcatagcaagagtcatttttggccgcataatcaagaactaaattccctttctcgaacatctcttagtttcaacagtcttctcccccttgttgattgtgtgtttcaataaagcaataagccaagtataaacacacacaccaacacaaaaacacagatgcttatcaatttcctttttttttgaagagaagaaaaagaattagcttctcaccattaaaaccaaaatgtagctccagaacttcaaccgattctataagaccacatcaaacatcaagaccacaaacacaagaagtagtttgtatctttaaatttcctgcaaatacatgtagcatcaaacatgagcgagatgacaagattcaaagaaaattttcaccagcgtctgcttctccaatccttttctctccaaaacagaaaaacacgaatcaccattgacttcttcttacactgtcgtcgaaatcagattttggaccataatttaacactcgacccatgtccacaatttaactctctttatctgtgattcctcaataagattccaaaccccgtccactgactcctttaaatccctgcaatttcctacagaatctctgtcttggttcctcttagtggtcgcaaaaaatagcaccaagctcatcacgaacccataaatctagaacccaacgctgacacacttaacttcacttgattctcaactgtgaatcttccttccgtcaatggataacgtcaacgacaaacacaaacagccgcttaatctccttcaccaaatgctacatccaattaaagcgactttgctgaaaacctccagagcttaagagaaccaacactgaaagcttcttagacacacaaaatcgagaaactttaaccatgagcactttctttttaaacagaagatgaacaagcagcaacaaagattcgcacacaagcctgcatcttccgacatgctttcttccaattaaaacacttcttagcacagtgagcttagtttgggcctccgattaaaacagaaattggcccaaaatataaaacccaaacctaattctctttcagactcgacgatcttttcccgacggcaagagaatcgcaaatatacttcacatctcatacaacaaaggcacctcttctttctcatctagccacacacccaagagctaacctgttagagatactaatctcagatcggtttcctgctctgataccaattgaagttactaactgtgtgctaggtctatacgtcgttatatgatgagagtgtataaaagacttgtatgtgtgcataaagtaaatgacacagagatttgttaacggggttcggtaacaacctacatccgcgggacctagtccagaaataattccactagaacaagatcggaaatacaattgcatatgatattacagcataactatgcctaccactcttttctagatggactttggaaacagtatcaagcctagcatgtcttgactaccacccggcagcaccggtgcatcaccgtcttctctaacggctgcaaattccaaaggaataccaccaacagatcatcatctgtatttggtggggcgacgccacaaacaagtgtgtgcatctctctccactataccatagacgcgcaacctttttatgtcacggcagccatctatatataatcaagacaaaaccctaggctccaaatattctcgcaatctttttgccttgattcgaaagtatctggaccaccactaaaggaaacatcacgtctccaatagaatcatgccatgtcatcttcattcctcacttgattctttcggcattcagttcgcctactatgttacacagctgctacctgtgaaacacaactctgatactttcttttgatactccggcttcacaatcacatagatctttacaatatctgatgctcaatacctctgttgctcaacacctttgttgatgtctgcataactcttgttgcattctgtgtcaactcctttgttgtagcagtgtctgtatcatccatgtttcacacacacgttcttgttgtagtgcagtctgtatcatctcatatcttgagctgtgtgtcatcatcttgagtctaacaaccagttacaaatatactctcattctccccctttattactgtgttttagaactcaaactcaccttagtagattgtactttgatgatcttcaagcttcaatactatctcagaatgtttctttaaactgtcactgcatatgttgtgattctgaccgagtgtccattttccaactgtcacagctacacaactcagcaacatcacaacatactaacactttgtgctgatgggttcagcttcaagatccatggaaagttcaggcaatgatcacgaactcagatcaaattggtcctccctatcgaatcaaagaaaacgtttttcttcaatgaaacttgataatgactagaggttttaaagaataaaatttgactaaacgactaggtggattcttttaacaactaaacgtggagagcaaggtgcttggttagtcaatattagcaaaaataaagaattagtcgttgaatcttagtggtaggcgataagatttctctattcatgaattatgattatccaactaatacattcttttaaattttatttattgataaatgtatttatcttattggtttacattattagaagaccaaaactatatattattcaactaatacattcttttattcttttattgataagattaattaattctttgtaaaaaggaaaaaaatcttagtgatttcattcttaaagatctactcaaaagaggttgattattttaaaactttaaaacgaccatttaataaaacaaagacaaaatagtatttgttacttgtcatacagtgatacagatgttaagcctttggcccttgctttgaggacgaactctatcgcgccacaccggtacaagtatagattacttgtcattcaaagtgaagcaatatcacataaagaggagtaaaaagagatgtgtacaacaacagaaaaaatctattatcatttctatacattcaatgtacaacaacaaaaaccaacaaaccatgaccaaagatatcacatagagcacttaatagccaactgagctacataatctaatcaatatttgttactagctaatttataaaaaatgtgtatgggacacttgctccacctgtttataccattaatccgcctttgagtctatggatagatactctctctgaatattaaaatggaccgtaaatatatatttatatctatgtagatgcatagaacatgtgttagaatttgagacaacagataaattatacttggaatatgtagagttccaaactcgtttccttaggtcctgttcggcagtaatcgcagcgacatcgactgataatcaaaatattgcctttacatctccttcatccgttcttcaccttttcttcatctcccctattttctatcgttgcaactgaaatctaaagaatttggagtcgctggataaatcagcaacacaacccaagctttaattttgaagtaacgatagtcgctagattttttaaatcaaattgccattttcaaatatttacaaacctggactactgtttatcttcttctccaatttacaaatttatacaacatatcccaattttataaaaaaaagaggaaaaaaaaacaaaactcagtcgtttttaaagccagtcgctggttatagtcgcacgacacttaaacgaacatgccttaatactaggcccctgagaaacctaaatcgatcaacattttaactcaataataaattttaaatatttcttaaaacatgtattttcccggtggaatgcgttagaatttaaaacatgtattttgctttattgatgtgttagaaaattcgacatattaatgttagacaccgacattcatttttccacatggttttcaagtatacaattataaaataactaaaattactatgagaaaaataactaagaaaactatatatttctttttgtcgtcaagtacattattcattagagatatatttgatctatttattatgattaattaagaaaatagttatgggtcaactagtaaagcgaataatttggcacaaaagttttataccgaatcgcatcatatcacgtttataaacaacatttattagttttcattgatcgataataatttgaaatgaaaaaaaaaagctatgggcctaaaataagtatttaaacttggtaatgggctaatggcccatcattcgtatatccaaaagttccaaacccaatcgcaaactctcggaaggctggttcaatctaaaccggttaattatattctgattcggtttggattaaatctctattaaatcctttattcgtctcccctttataaagattcttaaaaaaaaaaacaatctgtcattgatgctcaagagttacattctttgaattgaagatcatttctctgtttctcaggtaagcaaacaaatttcgaatcatgcaaatactttactctcaattcaatttgttcccgatcagattataaagtctcttcctttttcgttttctagattacccatttgatcaaagaaaaaaaatggaacaagatcatgtaaaagtcaaaaagagagtagcttttgttctaatcgatggtttaggagatgtaacaataccaaaactaggttacaaaactccattacaagcagcaaacatacctaatctcgacgcaattgcatcagctggtatcaacggtttaatggatccagtagaagttggtttaggttgtggtagtgacactgctcatctttctctcatgggttatgatccaagagtatattaccgtggacgtggtgcttttgagtctatgggtgcaggtttagctatgtcacctggtgatatagctttcaaggtttgtgcgttttattattttgtattccattcttttgtttgtttataggttttgtttaacattctgttaccatgtagtctaattttgcaactttggatgagaaatctggagttgttgttagtcgaagagctgatcgacatttcgaagaagaaggtcctatactttgtgcagctcttgatgggttaaagcttcaatctttccctgagtatgaagtgagagtcaggttgcaaaatgtttgtcttagtgtttatggctttgtgtggtttattgtttggctaaagtttgtttctttttcgatagatatgcgacggaacatcggtgtggtgttgttgttaaagggccaagacttagtgggaatatatctggcactgatccgttgaaagataatcgtttgcttcttgaagctaaacctttagatgaatcagaagaagctactcacactgctaaagttgttaacgaattatcaagagagatatcgcgtattcttgtttctcacccggttaacgcagagagagctgcacaaggcaagaatattgcaaatctcgttcttttacgtggttgtggtattcgaatcgaggtgtgtgtttgactattttacttgcgttcgtagaaatgatgttaattaatgtaattgcttcatgtacgggttttgtgtatttaggtacctccttttcatgagaagcatggcttgtggccatgtatggtagcaccaacaaagattatagctggacttggtatgtcgctcggtattgacattttagaagctccgggagctactggagattaccggacgcttctgacatcgaaagcaactgctatagctaatgctctctcagctcctttgaatccctgccctaatgtctttgtaccgggagaggacgggcataaaccaggaaggtcagatggttatgatttcgggttccttcacataaaggtgaaaacttttttcagtcttttaacacaaaatttaaaaatttccactctgattttcgatcatatttctatattgttgcaggctatagatgatgcaggtcatgataaggcgacaatgttcaaagttcgaggtttagaagctgttgataaggcgatacgtcagcttgctaagcttttatggcaagctgagtcttctacacattaccagtatttcttgtgtgtgaccggtgatcattcaactcctgttgagtatggagaccacagctttgagcctgtcccattcacaatgtgccggttaagggactttgtgagcgcggtgggaggagaatcagccgtactagagacgtctttggacccttttccacttccaacggttgtggaatcaggtgaagatgttaccaaacaagaggaagagagtgggaggagggaagctcctctggcaattggtggagatttagttgcagagttgaatgaggttgcagctgcaagaggatgtcttggccgtttccatggcggtgaaatgatgggagtcatcactaactttcttaatctagaggtatgagttacttaaaagttttgcatttttctttgagaatttggatattgaaaagtgtaataaaaataccaaaagctgaaagtgtaacacaaacctagttttcgtaacaaattgaataattgattatcaaacaaagtagataatgagttattggtgttcgcaatttaaccgaatcgaacacaaccaataacccaatgtgtttatttaattaattaattaataatattattgtatattactaaatatgtaattgtttgcatttttatttttttctttggtttatttgaattactaaacttaaatatacaacttgttgcttcagttaactattatcaagttcaaaattcaaacaaatgaacaaaataattttgtttggttacattgattagtttttaaaaccgaatttaaaccaaaccgaactaaagccaaataaatatagattgacccaaaccaaaccatactaacttcggttgagtttgattaaagttttacaaaaccctaataaaccgaaccgaaccgaaccgaacccaaagttaaaccgaaatgcccacccctaaattttctcacctcttttggaaattcagaatcttaacagagaaagcatagataaatacaaaaaacatagagaaagcaatgagggtaagtgagacaacccacaagaagttgtattcataaccataataattcttcatgaactcaacaaccgtctcacccgtatcgagccttgtctccacatctccgtattgagctatcgtcagtccgtacaacccccaccacccgggacacacgtaggtgaaccatctcaaccatacatgcattctctgcaaagttaatatccatttaaattatgagcattcatagccaagctgaaactactataattgattaattgtgaacattttggttacaaaatttagaaagagaatctacagaatttgttacttacgggacgaggaatagtgaatcctgaaaagacgttccacgatgtggatatgacaccattgagtatcgaagcgatttcttgattagggcttacggaaatgaccataataccagtgtatatagagtagaggatgctgatgaaggtaaagaatatgttcaaaaaaaacttggaagctgtccattcgtatcctatcatcccatagacaataactccatagatgcaagcttgagccattgtatatgggatctcgattatcacctacaaaatgtataatgttcaagtttataaaccaaaacgtattataaaacttgaaccaaaacgtatgatagggtttaattggtacatagaaaatgaaatacctgtgaaaatgcatagggtagagcggagtacattccagcaccggcttctcgataaaaaacagtacgttcagcgattacaactggacgtacagtagccgcactttgtgaacttaagaagccaacaacggttgacatcgcgcctacactattgaagatatcttgccttgttccttttcgttttccgaggctccaaaagatgattccatacatgattccaacagcagccccgaaactgaaacgcaccgcgttataaggaacatttctccaatatgatttgtgttgcttccacaagcaagcttggaattgagagaggtaggattgtgaatattttgttgagaaatgaatgtcttgtgcatgaggaggaatattgttcagttccttaatcagatctttgtttctcctgcatccatacaacaaatattttgtgagattgttcaattaatatttatatgaatgctaacttgtaactcacgttacctatagaggtttgacttcttgtatacttgcgcaaatgtgacaccaagaacatcttcttgtgcccttgttgttacttcaagggcccatgttgctggattataaccttcctttatttttcctactcctcttattccctaaaaagtatattgttcggttattgcgaagaatgagatggtgttgaacgaataactttacttattcttcttacctcaaagtattcgattagttgagaggaatggtggcctattggaccaacatagatctcttcgcctcctcttgtcaacaagaaaagctaaaaaaagaaagttaggtgcatagctaaaggtaaaagtaataaaaggtaaaaggtaaaagtaagacatagttacctcatcaaaggattcaaaaatatcaatacttggctggtgaatggtgcatacaacagttcttccagtgtcaacagtgtttcgaactgtcctcatgacaatcgcggcagctctagcatccaagccggatgtaggctcatccatgaaaagaatagaaggattggctacaagctctactgcgattgtcattctttttctttgctcggtcgaaagcccactaattcccacatatcctaccaacatctccctcaatgcttttaactctatcaattccatcacctcttcaataaagagctgcacatttctattagttaaatgatttcttggatcttataatggttactcattatcatacattaagaaacacaaacctctcgagtatgtgtgtcgatatcaggaggcaacctcaaccatgcagaataaagaagagactcataaacagttaaaagaggggaatggatgtcagattgttcgcaataacccgaaacacgagcaaagctatcctgttttttaggaaatccagagacatatatttccccttggatgtatcctgtgttcttacgtccggctaagacatccatcaaagtagttttgcccgcaccactcacgcccataagtgctgtaagaaccccgggcctaaaagcaccgcttaatccattcaatagtactagtttattctctcttatgcctttttctttcatttcctacaaagttatattttcttttaacttcttgcccaaatacactactcttattaaatatgtcattcacatacctttggggtgtctacagaatatgtgatgttctcgaacgtcatatatagaggtttgaaaggtatacgcagttttttgtcgttgcaagttcttgttgttacaactcctatataatttaagctatttttgggatcatgagactttaaaggagatgaaaagagagagatattctaggtcttactatcaaagaatcgttccatcgtagttcctgtatagtctctgccggtcgtattgttgctatcagcttcttctcgttcatccggtaacaccgcagtcttagatattccatattctacaagagagaaaaaatgacgtttaaatgatgtagttagtatttatctaattcatagatgtaggaagactatgtgaggacactcacgtttaagaaaagccaggcacaaagatgtaatgatgttggacaagattgtggataggatcaatgctaaaagtccaatccaataccaataagtttctacaaaaaaacctcgcgatttcaagaccgctactcctagaccctggaaatcgtacactacacggttaagtttgatatctttaaaatgtgacgttgaaaacttaaagaaaggtttcttagaaattacatctttccaagactcgctgcggaattcgttaaccgaaacagctgtttggatatacatcattggtgatgtccagtacgcccatgtcaaccatttatgcacttgatctgcgaaacaaaattgatcactaattaggttatgtatcataaactacttagaatgaatatgaacaacaacaacctctttaaaacttacttcgggacaacacatatccgctgaatgtcatcagccacatcacagcaagacatcccattgtgtttgaaaccacatgatttcgagtcactgcagcgatacatcgaaaaagcccatacgacatttgtccgcacaatgctagaactaagtaatgtttcaggaacctatagtaacaaaaaaaacatacacacatatattaatagtaagtatagaccaaagtttttttttggtttgttaagataaacttacgatgggacggttagatcatatccaatggtgaaataagttattaagaccacaatgaagacttcaacgaaggataaagggaaggtgatgattgacgttggtaacgagaatgcccatgacgggtaaaagctaaaatgacgttgcttgtagaacactggaagcttatcgatagtcattggaagttcgaaaaaccccgagaacacaatcatttgcacttccaagtagatagctcccatgtagatgattccatcctcgaccgtgctgggatagttcttttgttgccaaaacacaactccgattagaatggcattgataattagctgaagtgacttcaagacgaaagtgcgtaagttcctcttcattagaatgctttctcgttctaagcatgcctttagtagttccaacttgctagctccatatgttgtccttgtcagggctgctctgtgattctttagtcgatcaaatggcgttgcaagctgagaccgcattgctctcccgaaatgatgaattttgaagccttcctcgaatttttttgcggttacataacgatatggcagctctggattagcccaatattgttcttgatcttttttggataaaatctaaatgaatagtgtagtcttgattagtacaatgaaagttaataaataagtttcatgaaaaaaaacaagaatgttgttggaaaactcacttcttgcaagtaatcagcaatcccttttctttcaggacacttaaaccccataaattcaaaaaactcgaggacgtcttctcgagggccttggtaaacaatgtggccttctccaagaatgatgacatcatcgaagagctcaaatgtctctggaggaggctggagaagagaaataagagcggttttatcgaaaacatggatcatttgcttgatgctcttgacaatctgaaacgtcgtcgagctatctaaaccatctgatatgttgtccatgaagaaagctccaactggaccgaccaacatttcgcctacacataaaaatcaatatcacatcaagaatatgcacatttcaatacctaagagcgaaatactactaagaattccacattagtaccagtcgttacgcgtttcttttgcccaccagagatgcctctcttcatatgattcccaactatcgtatcagcacatatctcaagtcctaagacttttaaaacgtaatctgtaaccacatactccttgtgtccttttataaccgatgcctataaacaatatcaaaacactataaaagatcaaattctttttttaacttctctacctaatgacccctctttttgtaccttcattaacgcatcgaggtaaggatccggcttgatattcaagtctttctctcgtctcagtaactcagcaagcatatctgttctcaaccatccatgtcaataaatagtttggagtgatacttattgaataaatgggatagtgtttcataccgtagcctgtgccaactccttggcattttgcggaaaactttaatgtttctcgaactgttaggtccggcaagtgaacatcatattggtcgatgtatcccgcagttctttcaggcacaaactcatgcagttcatgaccattgtatgtcactttccctgtagactaaccattcaacaacacaattttatcaattagttcgaataatatattctatataacgaatcaaagcattttttgatgtctttcaaagattgaagtgtatttactcttagtccagtttctgtctttccagacaatgcttttagtagtgtcgattttccagagcccggtggtcccaatagtagagtcaatctgtaataagaagaagcaaactgagaattttttcattgttgtaaatcttttttttttctttttctggtcaactacattgttcttaatctggtagctttaatttggtgcaaaatactactctctgttccttaataatcgattttctagaaaaatacatatattgaaaaacacattaaaaattgattataaatatattattttttgtgatttacatttttttataactctcaagcaatgatatttaattatttatcttgaaagtttgatattcatcaataattgccaattaattttacatataaaacctaaaaaatcaatcttttagaaacaattttttttctagaatgtcaaataataaagaacaaagggagtattatttttcagagacacacaaaatctccaatggactaatatcaaaatatcataaaatttatcagctacatacaattaattttattcccctacctagtttttgcagtgctacaatttggagtcgaaaacaaaaatgaaaaacagatagctagggatagttaatgaacctgccaggcttgatgattccactaacatcgttaagaatggagattctctttttccgatccggaagaactctgattttagttccaatacccttttttaaatagaaaaatagacgattaggtgagattggaaaaaagtgactctgaaaatagatttcttccacgggaagaaacataatgaagacacaaaaattgattccttgtggtacaagaaatcgaatgagaaacgagacgttacttttaaaaggttgacgtatgagttcaggactgtgggaacggttttgcttcccgcataagcttcggcagtcacgtttaaatcttcaaatcggacttctatcgtcggcagatgcagagagactctgaagttttttgtgaccgaagataagtttaaagtctaacagatttacacttaagtactttaaatatttaacgcatttttacctatcaaaacgactctttagcctccttagatactctccatgccaatcttcatcatccatcgtcataactctatcgaataactctcttctctccgcgaggccaaggtctttcatgtcaatctccttgaaacctcctgtgatcccttttaacacggcctttctcgcccggtcatacgttggaagacgctgcaacttctccatagccgctaatttcaaagcttcctcttcgtcttcttcttcgttttttcggtgactcctgtctctgttcattatgttctctacctctgagcttactctgtaatgtgccatcgcttcttctctctcaatctttgtttattttccctctcttaactattgttttagatgttatagaagccaacaataacactgaatctcatagacacatgattatattatgatacattgaatacaacaattttttcttgggaagaaattgaacaggtgtggattctgatgacaagtgtaatatagttctattgaccatatctatagatcatcaattcctatatttggacaatatctaagaaattaattaattgttcaaatcttaaacagattctacatcatcaaagtcatacacttgtctacattagtacatacatgcatgcatatagagaaagaaaaacaaaagtaagcataaatgcttatgtggtaaggcgcttgcaataagcaagcttcctttttttttcttagtctttaccttccatttaatacgtaaagatttacttgtcaagtatatctaatcatcgtataggtggatgtttgatccggtcaaaagctttttgacagaaattgataaaaaaactataacttcgctatgaagtaattttttattagtaatcacgaatatcgaatacagtaatgctaaatgcgaagaatttttttttcttcttttaaagagaacttgtcaatatatagctctaatttctgtttttaaaaataatcatccatgatcatgactttatgtatcttcatagatggttttgttacatatatttcacctagaaattagtgttggaattaaatataaattatttataactatttcatctcaaagttagtaacttatagaataatgatgtgcgttacatttatcgataaatttgacatgtgtgctataaatttgacacgtgtaaatcaaaattttctgttttttaatttttaaaaaatatttgtaagaaaacttatgtaatataaaacaacttgaaaaattttcaaaagataatttataagcaaacaatatgcatcttactaaataaaaatagaaatttgaggaagaaatataagaaaatcctattatataaagtatgtttctcaaagttagtaactcatagaatcatgacatgtgtcaaatttatcgatctcagatattgacacatgtaatcaaaattttatatttattgattttaaagaaatatttataaggaaacgacatgtaatataaaacaattttttaaatttttaaaaagataattataaggaaacaatatgtatcttactaaataaaaataaaaatttgagaaaaaaattataacgaaactatacacatgtgtcatgtttatctattagatgtttaccagtgtcaagtcaatttttttaatatacaagatattaatccgttgtaaaccgtgaacctatagttttattaaataaaaaaattgaactgttttttaggatagtctatatattattttgtttgatttaaatgtatggtataccgcgagatgatattttataaccaaaaatttgaaactttatgttgtatttgttttgttaatattatttattctatttagtatttaaaattatataattatattttgattgttaattctacgatttcacctatagtatatcattccgcattattatctacccaaacctgtcaattctagggtttcacccgtagtataaagtttaaattatgatgtttagaatttttataaaagaatctatatgcattttttaaaaaaattaaaatttatgttatacttgttttaatattgtttgttttatttagtgtttaaaattgtataattatattgtgattattgattctaagattttacacataatttatcaatcccatattattgtgctgtttgtggaaatttctctattagtatctatccaaagccatcaattctatgatttcagtcgtagtataaagtttaaatgtttctaatttttaaacttcttataaaataatggagattcaattttaaaaaatttgaattttaagctgtatttgtttagttaatattgtttgttttatttatggtttaagattgtataattatattttgatttttatttttaggattttatttgtaatatactgtctcgtattattatcaatccaagacattaattctaggatttcacctgtaatataaaatttcaatatttataatttataaatttcttattaattatttttaagttcttcataaaagtctaatagttgaaaaaatgataatatttcactttttaaaagttataggtattagaaatatttaaattttttagttccttataataaaaaatagaattaacgagatagcagctttaattttggacgtctcttaaactaagtttctttctcattagtattcaaagtattttggtcaataaataaaataacacaaaagtgtacacccgttttaaaaagacacagatctttagaccatgattaggctaacttgggataaaatatttgtttttgtttgatatatctttatctgttataaaagattaaagtaagaaggaagaataaagactagagagaataaaactcaaaaccagagttttcttattgctttctatttctcttctcttttctctctattttctctataacttacaaatgaatgaaatgagctatatatagtagggtttacttagctaggaagtaaattacttagcgaataaataatagataaacagcatccatatcttaaagaagacgtaatggataaacatcatccatatcttagggatgaagtaatggataaacatcatccatatcttatggatagagatgagtgatagataatcacattcatatttatccggtttataacactcccccttgagtattcatcacttttgatgagttacgtactgcctcgttaaaaaccttatcatggaaaaacccattgggataaaaaccatgacaaggaaaaagagtacagtgacgtgaactccccctcgaagagacttcacaggtctcgtaaatgacgcattccaatgctttgaacatgctttctaaatgtagaagttggaagcgcctttgtgaatagttccgctgtattgtcacttgaacgaatgtattgcacttctacttccttgttcttctcgagctcttgagtgtaggagaagaatcgtggagggatatgtttcgttctgtcgctcttgatataaccttctttgatttgatcaacacatgcagcattatcttcatatattcttgttggctctcttttgatgactaatccacttgcttcttgaatatgattagtcatcgatctaagccaaacacattctctagatgcctcatgaagagtaattatttctgcgtagtttgatgaagtggcgactatagtctgcttttgaaaacgccacgaggttgcagttcctccaatggtaaaaacatatctggtttgtgatctagacttatgagggtctgatagataccctgcatctgcaaaaccaactagaccaaactcggggtttctaggataatgtaatccaaaatcaatagtaccttgaagataacggaagatgtgttttatcccattccaatgccttcgtgtaggggatgaattgtaccttgcaagcaagttagtagtaaaagcaatatctggcctagtacaattagcaagatacataagtccaccgatagcactcatataaggtacttcgggacctagaaaatctccgttatcctcacaaggtctaaatggatcatttttaacatttaaagatctattgaccattggagtacttaaaggatttgctttatccatattaaagcgctttaaaatcttttttgtataattggattgatgcacaaatataccatcttgaaaatgctcaatttggagaccgagacaaaattttgtcttttccaagatctttcatttcaaactcttctttcatatgagttcgtgcatcatcaatctcctttggagttccaattatatttaggtcatcaacataaacaacaatgatcacaaatcccgaaggggatttcataatgaagacgcaaaggcagatttcattattcacataccctttcttaagtagataatcgcttaaacgattataccacatgcgtccggattgtttcaatccgtaaagtgatcgttgtaatttgaccatatatatatctttagactttgatgagtctaatgcctcgggaacttttaatccttccgagattttcatatatatatcattatcaagagatccatataaataagctgtcactacatctataaggtacatatctaaattattagatgccgaaaggctcattaagtacctgaatgtaattgcatccatgaccggagaatatgtttcttcataatcaactcctggtttttgagagaaactttgtgcaacaagtcgggctttatatcgtgtgatctcatatttttcatttctttttcgcacgaatactcacttgtatccaacaggttttacactcttagatgcagtgacaataggtccaaagacatttcttttattaagggagtgcaactcaacttgcatggcatttttccatttctcccaatccggccttttttagcactcggataatgtctttggatctggatcatcattctcttgatcgatctctttaaataaagaaaaggagaatattccattatcatcatcaatatcatctctatcccatatgataccatcatgggcatagttaatggaaatctcatacttttctctatcgtcccgaggacttggttcttcttgaagaaccttttcattttcttctcccaatttctttttctttcgcggatttttatcttttgagccaataggcctcccacgctttaattgaaccttaggttcattaattttgctcccatctaatttcagctcactaggaatttcaattcttgatggggtatttgcagcggggatatatgactttgtcaccttttttgtatcggtgaacgaatctggtaattgatttgccatgttttgtaaatgtacaatcttttgtacttccagctcaggatgcttcgtggggggatcaagatattttaaagatggtgcgcaccattctatatctttatgcatatgcatttgatgaattcttccccctaaagctgggaattcatcttcactaaaatggtaatcggcaaaacgtgccgtaaacaaatcaccagtttgtggttcaagataccttattatactcggtgatacataaccaacgtatattcccaatctcctttggggccccatttttgttctttgtggcggtgttataggcacgtataccgcacatccaaaaatgcggagatgggataaatttggtacttgaccataagtcatttgtaaaggggaatattcattatctgcgcttggtctaatctgaaccaaggctgcaacatgcaatatagcatgaccccatatagaaattgggagttttgttctcaatattaacggtcttgcaatgagttacaaccgtttaattaatgattcggtcatgccattttgtgtatgaacatgagggaccggatgctctacatcgattcccatcgatacacaatagtcattaaaggtttgtgaagtaaattccccagcattatcaagcctgactttctttatggcataatcaggaaattgtgcctttaacctgattatttgggaaatgaatcttgcgaaagccgtgtttcgtgtagtcaaaagacatacatgtgaccatctacttgatgcgtcaattaataccaccaaatatcgaaacggcccgcacggtgggtgaattggcccacatatatcaccatgaattctcgacaagaattcaggtcttccattcccaattttgtttggcgatggccttattatgatttttccttgaaaacatgctttacaagaaaactcaccagatttatatattttctggtttttcaatggatggccattagaattttgcacaatttttcgcatcatgactgaaccaggatgtccaagtctttcatgccatatcttaaatgtactagtaaactcacttgagtgtactgtgacactcgagtttactgtaacatttgatgcgattatatttatttttgtgcaatataatccggaggataacattggcaattcttctaatatatattgcctctcggattttatgcaaagatattcaatgccatctttattcatagtctctatatgatatccattacttcgaatatctttgaaacttatcaagtttctatgagacttaggggaatataatgcatcatttactttaaaatgagttccccttggcattgtaaaattggcttcgccaaagcctaatattatctttgcatggccatttatagcactcacgcttctagcggagtcttttatttcgagagaggagaagtactttttatctttaaagatagtgtgcgtataagcactgtccgccagacatatatcttcatcctcaatcttgtattttgacataggctatccatatgtcataacatattttctggaataaaatatttattcatgaaactttgacataggctatccatatgtcataacgaatatttattcatgaaatttgacataggttatccatatgtcataactaatatttattcatgaaatttgacataggctatccatatgtcataactaatatttattcatgaaatttgacataggctatccatatgtcataactaatatttattcatgaaatttgacataggctatccatatgtcataactaatatttattcatgaaatttgacataggctatccatatgtcataatatataacattattccagaattacaaaagcatctataatgcttgtcatgcatagcatgattatacatatggctataatatattatattgatttctcgttgtcatgatcaatcgagaaaatctgcgatatcaagatgattatcatcatcttggcctttaaaggaaggtcccggctcatcacagatgagattagtttcaacatccctttcttttgcttttgtgaggctttatacagatcggctaaatgttttggtatacgacacgtctggtaccagtgtcctttcatgccgcatctgtggcaagtgctttcaacatgccttttcttaacacgaccaacattatttttgttggttctttccgtgttaaaatcattgggatggaaacttcttctttttccttggccacgatcacgacctctcccacgaccacgaccacggcctcgacaaggtccgggtcctcgccaattatcatcaccggatgtagcaacattcacttctaaaagtggagctgatccaggtgggcgagataaatgattcatcatcacgagttcattattttgttcagcaaccaaaaggacttgcatcaactcggaataacgagtgtatcctttggcccggtattgctgttgaaggattacatttccaggatgaaaagtggagagcgttttttcaatcatatcataatcgctcactttttcaccacataatatcatcctggaggtgattccgaacatggcggaattataatcaccaacacttttgtaatccaaaaaccggagatttagccattcatgtctggcttttggcaaaatcacatatttttgatgatcgaaacgatctttaagtgattgccatagatccacaggatcttctctcgtgatgtattcatttttcaaattgtcgtggagatggtggcgtagaaataccatggctttagctttgctctcatctgatgtcgtttcagatgcatctatggtgctgagaagcccatttgatctaagatgcatcttaatatctgatgcccatgacatataatttttaccagatacatcaagggcaacgacatcgagcttagctagatttgacatgattatctatataaataaataatcattcaattaatgagccatttatggcatttcgaatagcatagcctaccattcgattaaggaggaggtataacctcatactccgaaaatatcaagcatataatttcttataaatgaattaaaatgaatttaacataatttaaatgttacctcaaaagatgcttgatcaaatagacgatcggttggttagacaactcccagagagacgatcgtgctgataacgtgttataaaagattaaagtaagaaggaagaataaagactagagagaataaaactcaaaaccagagttttcttattgctttctatttctcttctcttttctctctattttctctataacttacaaatgaatgaaatgagttatatatagtagggtttacttagctaggaagtaaattacttagcgaataagtaatggataaacatcatccatatcttaaagaagaagtaatggataaacatcatccatatcttagggatgaagtattggataaacatcatccatatcttgtggatagagatgagtgatggataatcacattcatacttatccggtttatatctttatctaataattcataagtcattttacaattaactgcaactctctcagtctggcatttgtcataagtcctaattctttcacttttagatgtttcctatcaaatctcgagagaaaaaaaaatttattaaaaaaaaaaacaattacttcgccaactgttctactctttcccacgatctcaaatcctccactttcccttctaatttcaacgatgaaactttacccataatttcttacaaagagactacacatctcttccttttcctgattccgttttctgcaagttcaattggaaaaaaaactgattcttttgttgatattcatcgtgtcaaagtattttacgaaattggctttgtgatttttttttatggccaagttccattagatcctggtttgttcgtgattttattattgcttcgactttgattcttgagttacaactttttgttggtttttaatatctatattgctcattttattttctcatattcaatgcatggacgattacaaatacatcaatggattttgcattttataatcattgaactttcaaatttccccaaatctagattacaacaggggttttttatatgtcaaaatcacttctcatgattttaatcaacttctaaatctagatctcttattagattcttgattctatttgttaattcatcttcagagaatccattctcttgaagaggcaataggagatgagacaccttctcggaagatatatcgtaaataatttatttattttctttctaatatttcaagttctacactttactattttactcatctaatcgatgtaacttttttcactgtttttattcttcatctatatcaatgattcccaacaaatccacgaagatttactgacattttactttcaaagttcaaacaatacattttggtaatttatatgtccttcttttattaacagtttaattattatttttagttttgtttataataaaaatgataattttaggaaaaattacaacatataccatattttttcaaatccttatgcaatctgccataatttgctgggccttacaactcatgccacatttcatactgaaatgtcgattttgtccctttccatatccttctctattttatctctccttcctcgaaatctgtgcgctttaaccatacattattatcttcccgaagacgaaacgcttttgtctctctctcacttttcctgacaacctgcacatattctttacatgtaactttcaattaaatttgtctcccaattttattcatcataatatttctgttgtatctagatcttgtcccgatccaattctattactcattcgatattattaaaatatgttaaattgtaggtgaagacaataacgctcaactaatctgtggaccaaaatagatggcgaaaatctaaataaaattcaaaattcttaaataagaacaattgcatataagatgtaggattcataataatagagcaagatgatgaaatcgaggacaaaacgtagatgcaacagacaatttctattcagagacaagatctggagactaaaacaaaagtcttgctccaattgttctccgttaacaggtaatcatgtcccctaatgcattatatattacattgtcccccgctatcaggtaatcatgtctcctaatgtattatatattacgttgccccccctagaattttggataaccaatatgtttaaacaagtcatttttaaatacccaataacaacagtagaagccagctgttctccactattctttcccctaatcctttatgcttccaccatgatttttcgtcctgtatcatcacatcagccaaaagctgatatgtcgccatcttcgtcagagcgctgtcccactttaagggtaatttcgtccattatgattatttttttactcttgaccctgtgcagagcacatgattaaactagtgaactaataaattgttttggtttggaatttaatcaatttaaattagttgttataaaagtaaagagatgttactatatataatactttgtagcctaaaataaatggtaggactatttttaagttgattaattccaaactataatttaaaatatataatttatgaaaatttttaataattttaaagtgtgtgtcgacaatttttgcttaagaatgttaccaaatctagtattaatgttaatagtcataggacatacaaaaaaaaaaagatctgaaccaaaaagaaaatgcatacaaaaaaatgagattcataaccaccaaagagaaaaaattggattgcggcttttgctttgatacgttctctatttttcatctcacatctgctttactctcttttgatctttcatcttcaaatctgggtttttgattttcggattcaattgtttctccgattggtttagatacttttgctttcttcttattctctaatgtgatctgatttccagagagctcagtttctccataattttgatctcaatttcagggtatgatccttaatccatctgacacactaagcatgtttcgatctaattttctgaactctgctttatcaactctaatcttgtcttttcgcaatggttgtaaggtatgtgtaatgttgtaaaatgactgatagctttttatgtttggtgatgaaaaacggggtttaggtgtttagtatttataggataactaattaggcttcgctaattcatagcaagcgacaaaaaaatattcactgccgcaagatattagggaataaatgtttgattatgccaggtttatagagatatcaaaaaactatggaaagatcaaatgttaatggcgaataacaaggttaggagataactgctaggtttatcgagagatcatcaagatatggaaggtttgaattaaagttgttatgattgcatataagttagcaaatgagttgaatttaaccgactattatggaaaggatttaaggtaataaagatgtgtattgttcatttgtgataaaacaggatccaaacaaattaataaaaaaacccatcaaatatttatccatggttcgaatacgataaaaccgggtgaatccagacccgaatgaattaaaaccgggtttaaggaaattaacttgaggtatttgccgtttgtcagtctaatccagattttccataaagtatagaaaaatgtgacaaacataaagaaattggtacgtatacatttactgatttatgtagttatttttttctcttttgtataattctagatattgactcgtgatacaccgctagttgatatttccgttcaaaaattaaagattttattttagtaatattatttatatataaataatattttaagagttataacacggacttatataatttttgtttttatgatgatttatagatatatgttattgtttttcatctagataaatttcctcaaatgacactaaatgaagtttttcgtcccaaaaatggcactaaatgaattttttgtgacaaaaatagcattcctaagtttattggacaaatatagcactcatttaccttatttttgatttttaaaaaattaataaacaccaagagacgataatgggaatacgtgagttctctctcaggccctaatatcgagaagctctcgctagccatgctttttgatgtcggttaagcttcggctcgccgacgtcgggattttgtctcttctttcttcctctttcgcaatctatgttctgttttaatcttacttcaactattttctcaaccttttaaaaactttcatcaacctttttgaaccctttttcaatcaacaagctcaaatgatccctcaattcatagtggcaacaaatggaggagttgtcaggtgcagctcttccagattcatgctctgcccacactccctaaggtgaagctattatccccaatacctccccaaatttttagatctgaatcaaatcaaaggttagatttgtccaccaccaaccttttttgcaccatgaagactatgtgtagcatgtgtactccacttctttcccctctgacaaagagtgtctcaactccgatcatatgctcgtctctacgtagccgccacaccatcaccattcccagcccagccgaggagaatttagggttctatttgttgggcctatggtcaaatttaggcccattatccaagtctcgactcaatacaataagcagaggcgtgaatcctctaaaagattggcctaggtctcttacctttttttttttgtcaaagcctttacttatgctgcattgtttctctgatatatgtttccaagaagcatcgtttcacctgagatgtgaatcgatttcgttgaggttctggttttgtcaccttaagatcatgttgccacaatcatcaatggctacgctttgtgaaagcttaaacttattgactcttgatcgacggtgtgcttggtcatagatcttcttttgccaggtccggttatgaaaaatctctatcaaacccaatctatttagtaccttttgaaacaacccgacccattttaaaaaaaaaaaaatataattaaatattcccataaatatctaattaaaccaaccaataacataataattaaaccgcaagtcaaaaatactattttatgaataaataaataattcgaccaacaaaaccaagaataactgacaatcctaaccgggttccaataaccaaaaacatcaaaaataaaaccaacgagttcctagatcatcctctcttccttgccatgattccacgatcacactttatctttacctgcatcaacaacacaatgagatgcgtaagtattatcataaatacttagtgaggcgatcctcccatctacgagctatacacacaagcaaatacaaaggtataatcacgaatacaatacaaacaaaccagtcattgaacaattcacccaaaacacattcaccacacctacatatcaacacacaaaataaatcacacaacccaatcgctcagataagctcatggtcacgcactcaccttaacaaattgattctaatagcaatttaacccaggagagactctccttgcgtctgaaacagtccagaaacgtcgttaactattcaatcgctccggtgaaatcctagctgcagacgtcacaaagctgcccacaaaatctcgtgccgatcggaaaacagacgagaccacgatctcagtttcaatctccgctggtcctaattcgcgtctgagaaaacgtgtctcacgaaactgcgaataactcaaccaattttaatccaaatccaattctgtaaactggagaataacgacaaaggacttcggaataactctaccaaatttcgttaccttttaccacgatttgatatgacgaaactgatttctcccaaaccctaacgattctgctcattctccttttctctctttttctcctttataaaacgaaaagtggctaactaaagccctaatttctagtttccttcttttataggcacacgctagggtttccaattaacccaaccaattaaaccggatgattttaaaacaaaccctaaccgattttcccagttcacgggcgttacaattctcccccactaacatagattcgtcctcgaatctagcttcacccttccactccgaggaacttcgtgcaaccatcaatacagtccgcactccctccaaccagaccccctctaggtctctctatccagtcgatatactcacgatttactagtcattgttgctcacaactcactctccactctcagaccgcaatcttcgagcataaaccgtcactctcaggcctcggcctacggtatctcgggtatcacacatattatcttccccactcaaagtcaaaccctgagttgtgtcggctcactctcagccacaaagtcatcgagttacgacacttggagaaaataataccacaaaactcgctctcgggtcgtcaccctaaagcgtgctctcggatcgtcacccgaagccaccgtacccctcgtactctaaagacaccatgtccctcgagttaccggtacctcaggagcataccccgctcctcacgagtcgttgggaccctcatgtccctcgagcaacaatactaaacgcttccgagcatatctccagactctctcatggattcgcgtaagacacctctatgcctcaccatccatcatatcccctcgagaacatccttatgaccaactcccggccatctcgtaaacatacctttctcttaggttgtttactcaaactttccaaaaatagacaagtcctttctaggaaactttccatttttggaaaccgcacaacacattcttaaataagacaactcaagtcaaatccaagaaaaaaaatactcatcttattaatcatcaactgtcatgatcgttacaactccaaacgaaaatacaaatgaaagcgaaataagaacaacaactcaaaagctcaaaaactcaacaacactgaaactggaaaccaaggaaaggcaaactcatgcagcaacctgcttctcgaaccacttcttgaaccttgccttcatcctcgcctctggctcccaagtctcctctgtcacaccatcgcagtcccacaggactttgatcaaaggaatcttcttccgccgaagttccttgatcctcctctcgagaaccctcactggtctcgcctccaaagtcatgttgggctgaagatcctctggaatcttagccaacacctcatcatccttgtgaagacacttccccagcatcgacacatgaaagaccttgtgaaacgcacgcataacatcaggcaactctaacctgtatgccactggttccaccctctcaacaatcctgaacggacccatgtacctcggactcaacttagtctctaagatagacctgttcggacctcgcaacatggccatcttaagatacactctgtccccaacctcaaactcaagctctctcctcctcttgtcagcataactccgctgtcgatcctgagattccttcatgttcagcttaaggacccggatcctctccgtggtctcctgaacataatctgcaccatatatgctcctctcccccacttggttccagtataacggtgtcctgcatggcctcccgtacaacgcttcaaaaggagccatcccaatactcgcctgatagctattgttataagcaaactctaccagactcaagtgatccgcccaatgacctccccaatccaagacacacatccgcaacatatcctcaagcgtctgaatagtcctctcagattgcccatctgtctgtggatgataagccgtgctcatctgcactttagtgcccatctctgcctgaaaggctctccaaaatgcagaagtaaacttggaatccctgtctgacacaatactcacaggtactccatgcaacttcacgatctcgctcacatatttcttagccaacaccgccgctccatcggtttttctgatggccagaaaatgtgttgacttagtcagacggtccacgatcacccaaatagcatctttggttcgcgacacaggcaacccaacacaaaatccatcgtgataaaatcccacttccactcaggaatgggtaaactctgcaacatgccacctggcacctgatgctcagccttaactaactggcaaacatcgcactctgcaacccaattagcaacatccctcttcatcccgacccactgatagtaccgcttgaggtctcggtacaacttagtcgctcctggatgaatggaaaacatgctcgcatgagcctcactcaagatctcccgtcgcaactcctcatccttaggcacacaaactcgcccatgcacaaggatagtcccattagctgcaaactgatacacagagccctctgccttagaagccgcaatcaacccctcatccttctcctgagccaaccgaactctagtcagaagatctgctcgatccacagcttccaatcccaatggctctcgtgccacagcacacaaccgcaaagcaccaatctcactcaccaaggcctcaacactctgccctggagccgcgcccacgcacttacggctcaacgcgtctgcaaccacattagccttaccgggatggtaagctatctccagatcataatcacccaccaactccatccatcgcctctgcctcaggttcagctctggctgagtgaagatatacttcaaactcttatgatccgtgaacacctgcactttcccgccataaagataagacctccaaattttcaaggcaaagattactgcagccatctccaaatcgtgagtaggatagttgccctcatgcttcctcaactgccgtgatgcataggcaataaccttcccacgctgcattagaacacaacccaaactaactcccgaggcatcagtatacaccatgtaaggctctccatgctctggcaatgctaacactggtgtactcgtcaacatctccttcaggctcacaaaaccctcctcgcactccggtgaccaaacaaaaggaacatccttccctgtcagcttagtcatcggttgtgccatactcgcaaaccccttgacgaacctcctgtaataccctgccaacccaagaaaactcctgatctcagtggcattcgtcggtctaggccaatctcttatagcctcaatcttctctggatccactgaaactccctctacagaaacaatgtgaccaagaaaacccatctctctctgccagaaattgcacttactcaacttagcgaacaacttctgctcccgtagcttctccatcactctcctcagatgtacctcatgctcctcaggactcttagaatacaccagaatgtcatcaataaagatgatcacaaactcatccaaaaactcctggaacacgctgttcatcaacctcatgaacgctgcaggtgcattagccaacccgaaaggcatcaccacgaactcaaaatgtccatatctcgtcctgaaagcagtcttgcgaacatctgcctccgctatcgggatctggtgataacccgacgtcaaatcgattttggagaaacaagtagcaaccctcaactgatccaacaactcatcgatccttggcaaagggtacttgttcttcacagtgacccggttcaactcccggtagtcaatacataagcggaaactcctgtctttcttcttcacaaataacatcggcgctccccaaggtgaagtactaggacgaatgaatcccttacccaataaatcctctagctgcttctttagctctgccatctctgctggagccatcctgtagggtgccttagacaacggcgctgtctctggttccaactcaatcgtgaaaggatcagaccgtgatggtggtaatccctgcaacgattgaaacacatcctcgaactcctgaacaacccgaatgtcgctcactgctacctgccccatagactccggcatagatatcgtcaccaggtaagcctcgcagcccttctcgatcattttctctgcccgcacggctgagatgacgagactccctgaggtaggtctcactccctgataaaccaaccttccctctggccgctcaaaagaaactctcccacggtggcagtcaagatttactctgtaatgatccaaccaatccattttaagaataacatcatacaactctacagggctgataatcaaatctgctggcattgactcccctgcaatctgaatatctacatccttcgctctccccagaaccgctagaaactgccctccagcaaccttgacgtggagatgtcccctctccctgcagtggtagcactccctcgtctcagctcgctgcgtgcaatccgtcaccttgtggtcaaggctcccacaagaaaaacatcctgcacgaccaccctgtccagctctggaaggatgatcccacttcctcttctgcccctgtgcaggcttgccgcccttgctaggtgtcacctgctgctgagtcttcttcggttgtaccgctggactcactcccaccacctgcctctgaaggtcctcctctacctcagcagccgtctccaccagtgccgccttcgtggcgtactgcgacactctacaccgcactctcaaatccggtcgaagtcccctcaagaacctcctcatctgggcctggtcatcctccatgccccgacccgcatacaccaagagtcggttacactcccggtcatactcccgaaccgaccgctcaccctgtgtcagctcaagaaaacgcgccttcatacggtcgagcgcctccttcagaaagtacttggcattaaactcagccacgaaatctgcccaagacatatccgcctgcctcctcctggcagtcacactccgccatcactgctagatccacccgatactccgtcgggcatctgctcgaaccgaagttccgctcaacccgcgacttccaactgtcggcctcctcaggactagtaccaccagaaaaatacccggtgccaatcctctgcaactgctccatcatcctcaaataagatggaacctcctcaacaaccgcagcccgctgctgcacctccgccactcgtggcgcaactggagcctccactggtaccacacctggtaaccgctccaacaactgcctcaacaggcccgccaaaccaacctctggaacctgggctcctccggctgcggcacccatcactcctgggccctcagcaccaacggcatgcacaccggtaccgacaccagctccaccagcccccactccgactgcaccagctatatcggcaccaagaccgttcctaaccccgggctccacaaactcaggctgcgaacccacactctgctcaactgtggcactgtggccatcactctcgccggtaccctcgaagactcgtcccctaccgcgacaattaaggctcatttatatcacaagaacaaatggctaagaaactaaaacaaacgaatatatcacaaacaacttactgtggaatctcatttaaggctcggagaagatgatgctaggactccaacaacacacaattgactaaacactccataatcaatcctcaatatgctaacaccctagctcatcccacatcaatcatcaggaaaataattcatcaattaatttttctacacatcctagaaccgtaatcgctctgataccaaattgaaacaacccgacccatttttttttaaaatataattaaatattcccataaatatctaattaaaccaaccaataacataataattaaaccgcaagtcaaaaatactattttatgaataaataaataattcgaccaacaaaaccaagaataactgacaatcctaaccgggttccaataaccaaaaacatcaaaaataaaaccaacgagttcctagatcatcctctcttccttgccatgattccacgatcacactttatctttacctgcatcaacaacacaatgagatgcgtaagtattatcataaatacttagtgaggcgatcctcccatctacgagctatacacacaagcaaatacaaaggtataatcacgaatacaatacaaacaaaccagtcattgaacaattcacccaaaacacattcaccacacctacatatcaacacacaaaataaatcacacaacccaatcgctcagataagctcatggtcacgcactcaccttaacaaattgattctaatagcaatttaacccaggagagactctccttgcgtctgaaacagtccagaaacgtcgttaactattcaatcgctccggtgaaatcctagctgcagacgtcacaaagctgcccacaaaatctcgtgccgatcggaaaacagacgagaccacgatctcagtttcaatctccgctggtcctaattcgcgtctgagaaaacgtgtctcacgaaactgcgaataactcaaccaattttaatccaaatccaattctgtaaactggagaataacgacaaaggacttcggaataactctaccaaatttcgttaccttttaccacgatttgatatgacgaaactgatttctcccaaaccctaacgattctgctcattctccttttctctctttttctcctttataaaacgaaaagtggctaactaaagccctaatttcgagtttccttcttttataggcacacgctagggtttccaattaacccaaccaattaaatcggatgattttaaaacaaaccctaaccgattttccagttcacgggcgttacaccttttaactctcttttggcttgtcatggactccatgctagaagagaaacgacatctttaggctggtttgatagctaccattgttgaagtcatatgggaagtatttttcagactccctccgaggaatctagtctcaaccaactttacatcgattacaagctttccctagaagaatcctctcaccgagcttcgttaatggcagtagataatcttggagcgttacttgcgccttgtctggtgagtttctcgagggcgcatgtcatatttttcttctggaccgttttctctcttattgagatattatcaaagttggattttcaaatcctgcactaagcggttcaaatttaatgtgttttctctacggcttgatcgggaaaggactcctttacccttgagttggctttgcaagaatccactccaaattcagcgaatagcttctttcgatgagaaccttatgtccctaactctttctcttgtatcggcaagaatcgagtttatggaaccttcttcaacgtcccaatgtctattgataagaacagttccccatggtcccgaattggtcgcgaatgtggcttcggcttcccttggactcgcatgtgacttggtgctatattgcccatgtctccaattccttttggatacgttgctgaactatctatcctttatattgccttttagctatgatagtaatcttcctttatcattggctaaaactctaagctttgtacactcctattccggttgattgaatgaaacaggtctttgcacacaaaaaaaatagtaaacaaataaacaaaactcaaaacttttgggaagagatctaacgacgaagagagatgacgacggcagagagaattgccggcgacgtagagagctgctggcgatgtagagagctaccaatgatggagacagttaccggcggagagagctggcgacaaagcttctattgaggaattaggcaaattgtggaattaggagaattgcagtacaattgcagagagctgccggcggagagtgttgacgacgaagcttctattctcagactctgcgattattgttgaattatggctttctattgtggaattaggcgaattgtagatgcgttcattgattcaccacaaagaattccgatgtgtcattgttcatcttttacctttttcattgttcggcttgattgcattagaaatcttatgtttatctatttgtgaggttattttcttccgaatgatatgaatattttgtatatttttttgtgtttttatactatatgtaggttgtatacttttgttggtgtttgaaatgtaattgtgtgttgcctgtaggatcaaacgaaacatatactttcatcgttagtgattgtagatgagaccatagactatagccaagtatacaaaatacatagtaattgataagtagatgagacttgtaactggaactgtggataagtagatgatttacgaattctgaaggatcttgtagtttgttcattgtatttggttgttgctttctttaggtatgatgtaggtatggtggagatatactctctttttggagagtggaaacaaaatgaaaaacttcagtgagttttagaaatgatacatttactttggatatatctacatgtacaaaaaagcaatataaacctaataaatctcagtacaaatcatcacaccatataccaagtacggaaaaaacatacctgcagctaaaatatttttctatctcgtcatgaataatattacccttttcatcctctttttgatgtagttcaaaagatacttaatagaacttgattggttacaccattcgacgttaataagtgcacgataacgtaacaacaacgctctattgtaagaaacaacgtacttgttgtcgcactcgaaaccctttttcacgattaatctcttatcgtcacgtctcctatagaggggctaaccatcatcgttgagcgtcgtcgaagagcttcttggtgttagaaatttttttgaacatttcccattattcatgcaaacattattgggaaattctggtccacacggtccatgtatcatacaaccagagactatgtcatataaatgcggctctagatctttatctcagcaccgatgaatttatcaatatgatcaccagttggaatctttgagtcttttcctaaaaatagaaccatatgtgcatgaggaagacccctcttctgatcactaaacatagattttaatgtgtaacaatactgttaatacattattttatgttaatattcgcattgattaatgaggatatgttttatttcatcctaaatctatagaaaatattttcataacgattttaaaaatacttaagtatacgatattataacttagtaggttgtctaataatggtaaataataaagtatagtaatataaattaaatttagatatgaaaccaatcaaggaaatatgttgtattttctgattattaatatgtccattttcatgaattagatatatagatagaattcatatttatattggtataaggtctgtattattataaaccgggggaattattattgtcaaactttaacaataataattaatttagatcatataaatagcggtataaaataaaagtgtttgtctaacaatcaaaatttggatattatagaatattatatatcaaagtacatcagaatataattaatatgtttattaaaaccaaagaaattataataattaatctaagtcataaaaacataagagctggagaaaaataagatcattagttctaggattcatgatcaaaacgtgtaaattgatatgtaataaatttataagtaatgaagaaagaaaaagatgataaaacaaaacaaagatcatcacgaagactttttacgtggtaatttagaacatcatgagatagtttgaaaagcacaccttatcaaccacaaattaatgtgatgtgttaagagataaatatataacatatgaacactcacaatgattaaaaatcttcaacttcttgaatataagcgttcagcgtatattcagtgaaatttgtgttacatatagaagtttctcatgagaaacagtccagttttaagatataagaaagtatcaatctaaaggtacatacaaatacatatttaataaaagaatgaaaaatacttttgtaaccatcaacaacacccatcaaataatacaaacaacaacttctctttctaatcatctccacatattataaaatctcacagcatctgtgtcggttaactcacatttcaatatattattcctatacagtagacacattaattttttttttaaaaacacatgaggttagaattagctcataaaaatacaggccttataatttagacaatcacgattgacgtacatataaaatccaagttacctggtatcacgaagttcgatcgaaatcttatagtacatgcaatatttcgccccatctgaatctccatcatgacgtaaatgatcctctcctgatatttgtgacctcacgtcatttacttcaaataagtcgtcttcagcgtcatcatgttcatgttcattatcgtctccttcatcgtcttcttcatcttcttcgtagtcatcatcatagtttcggattcatcgtcttctagatcttctaattcatcgacttctgatagtgttacttcctcatcatcaccatcactttcttcaccacaaatatagtcacttttgatttcactcggaacattaacgtaccacccatcgtctaaatgacagtcgttattaccgctttcttcacagcatatcccgtcaatctcatcatcactgcaatttggagttagtaaaaccatcaatctatcaagttcgtatggtgtatcacaagagtatgtaccaagacacatatttagtaagctacgtagataatattcatttgagtcgactttttctgttgtaccaccagttgctacatccaaagtagtaaaatcaccaacatgtacagcgtgaccaatcacgtctgtatctaaaaagaatattatcaaattatatgtgataaatgtaaacaacgtaaaaatatccaattaacagaattccgataatatttatgttgatatccatttatttgccatttaatgaagaataaggaaagtcataaaatggatggttgaaatccaccgcgtcttattaatgaagatctgacggccaggactaactttaactaataatcggacggctgatatatatacaacccttccttttgatattgatctgatggtcactattatattgcttctattaattaattgtaaatttaaaaggtaggggcaaaggccaaagtattaaggccgacggctacgaataaaaatccttattttcatatctaatctaacggttacgacttaatctctaagattaatttacttaaaactcaggggcaaaactataattactcaagctgaggatagcttagatgatgagataaatagcaaagaggcttgtcgtttataatatatataaattaatagatacgagagtgaagatgacaaagttgcaatttgataatggtgacgtttttgttttttggagaaaactgaatcgattcagcatgagaggatagagacgatgaggaggaaggatgcctctcgttttttttttgtgaactgattttaggttttagatggaccaattgatattagggaacaacaaaattattacgtttttatgttacgtattgagtatggggacttcataaagttgggcattttactattctgggtaaaagtttttatttaaaattttttttttgccgatgttgatgtgacgtatgaagagagtgttgtaaaaatagttgatgtgaacaccttgagaggtctcaagtagtttcttttattagtaatagattcttggtttgtttaccattaggttaaagtctaatgctactcattgtttgctctatgtgatcaatgctttgacaacacatataaccacaacttgaacaatttaaaaaccgtaacccattcctttaaaattatttgaaactttttaaaacacatcaaaattatttgaaacgtttcttatcattttaaacttcacccaaaacattgttattgattcctcaaattcatattcccatcaactaagttttttaaactttttaacctctcaaaaagagaaccaagtgcttccaccaaatcaatatgcttgtttttcaccaagcatagatgatggatcatcagaagttcaatggactgatgatccaagcaaagtggaacagccaattgcaaacaagaaatcaagatgcaaatggggaccaactgaagatgtggtcctcatcagtgcgtggctcaacacctccatagattttgttgtatccaatgagcaaaaagtaacatcattctagcaccgcatcgctgcctactttgctacaagtccctagctacaagggatggaaaagagatcaccaaaatgttgtatacagagatggtctaagataaatgagggttgttgcaagttcgtaggaagctatgtggcttcaaccaaagagaaaactagtgggcagaatgataattatgtggtgaacttggctcaccaaattttctacactgattacaagactaagttcagtcttgagcatgcttggagggaggttaggtttgatcaaaagttgtgttcttgcaatgatttaaatgtacctgccaagcgaagaaaacaaaatgaatctgcaggagatcatgtgacaattgaccttgaaggggatcaaactagtcccattggtgtaaggcagccaaagccaaagccaaaggtaaagccaaagcgtagcctactatggaaggtgatgcaaacaacactatgacggagatgcaatatatttgggggattaaggataagctacttaatggtaaagagaagcttctgtttcaaaaaaaagaagctaagtaaggacagattactagagagtgtcctaacaaaaaatgagtctttctacgagttggctcttaagcacaagttcattactgacatgttgtccttagtatatgcttttgagtttatgttcttgtttaagttctgttatataatttatgtgtttcagttgtgttctaagctttaagttgtgttctatgctttaagcattgtgttatgttcatgtgtttaagttgtgtttggttgtatttaagttctgatcatgaatgaaatgagtttattacgttgtgtattatgtactttaagtgttcagttgtgttatatgctttaagtattatgttctattcttgtgtttaagttctcttacttgtgtttggtcttatgaaatgagttttgagttgtaggatctagaggatttgaatagtggtgacatctcttgtacatgaagatactacaagttttgcaaacaccgtaagttttgcaaacaccacaagttttgtttggtgcaaagacaccacaagttttgtttgtatttttgtgatgacaccacaagtttcaaagagacaactagtaatttgttttcaattatcgtacaccacacatacttgtattttttgttcgatcaaacaacacttgtatttcagttgtgtttctatataaataaacaatctttttctacataaaaaacacatttctcctaaataaacaaacaatcttcttcattactaagaagacatttctatcgacatctacacaatcttatttatctcctaaacaattctatcttttttaccaagctactttaccaaatcatatcttcttgaaatcattcctcttttcaccaaatcattcctctttatgtccttcaaataaagatacaacacaatcttatatctttcttattttcttcaaatcattcctcttttcacgaaaaaggtcttgtactacttccaaaaaaaaagaatcttcctcatcttacaatcttgacgaaatacttgatgataagtttgatcaattttttgatgaaacattacagagatatgttgatcgtaaaccaaccaagtcaacaacgaaacgagcatatattaaaagagatcgtgaactaggacacatccagttatgaaacgattatttcaaagaaaatgcggcagtacctcctcatatatttcaacgccgttttagaatgaacaagccattgttcatgcgtattgttaaccgaattttaatgaaattccattctttgaacaaaaaagatatgctaccggcagattaggtttcttggcactacataaatgtacaacaacaattcttatgcttgcatatggttatgcagcggatgcagttgactaatacctccggattggtgaaagcattttgatgtcttgtatgatacatttttgttgacgcaatcatatatttgttgggagaagagtatctaagaagacctacgcgacaagatcttaaacgtctactacgtattggagagggattttctgggattataggaagcatcgattgtatgcattgggagtgacagagttgtccgactgcttggaaaagacaatatacacgttgatctggaaaaccaacaattgttctagaggctgttgttttgcttgccaagatctttggatatggcacgcgttttttggacctgtaggtaccttaaatgatatcaatatacttgatcgctcactagtttttgatgatataatacaaggccgagctccaaaagtgaaatatattgtcaacggaccgactatcatttagcttactatatcataaatgggctacatttatccaatctagttcacttccacaaggtgacaaagattatttatttgctacaaatcaagaaggttgccgtaaatatgttgagcgttcttttggagtttgcaagctcaatttgccattttaaaaagttctgctcttatttgggataaagaaaagatgggaatgatcatgcgagcatatataatacttcacaatatgatagtggaggatgaacgagatgggtataatcaaccacctcttcacaagtgaatttcaactattctacatatatgcattcaaatctagataatactatggagtctcgagcccgatttcgtgatcgggctatgcatcaacaattgaaagatgatttagttgagcatatatggcacaaatttggcgcgaatcaagttaacaactaatcgttattccgattttcaatttttatgtcatggatgttaaacatttaagtgggtgtttggaagatgcttttaaggatttaaaatcatatatatgaaagaagagtaactctctcccacaacttggcacttcagcatctaacagcttgccacatagacttcataaaataagttatacattattagtaattacttgaaaataacaactatgaatattataagtcagaacttgaaccgtctctcttcctgcatttttaaaaacaaaactccacacacaaaaacaaacaaaccgtctcctcttttatgttgtactcccacccagtaatgtatatttatcactcaatcatttcctccacttcaatttaaacgtaggcttgtccatattctagtccatatttttaatgctctaccatgtaaatatttatttactctaaaaacaacgtaggctacattgattataatgatgtttactacaataaagtgggttttcaaatctcccaagaaaaactaaaacatctatatatacattattatcttctctgtaaatactaatactaacaaatactcaaacaaacattttgctctatatcacttaaaatcacaatgtctctcatgaatgcctctaatctaaatctagctacctatgttgcatttgatgatttgcaacttggaactcacgcccaacgttattggctgtattgttaggatgtagaaaatttatactgaaatacgtaccgccaacgatcgtcctgtattccttggaaactcactcctcctgcttgatgagaaagtatcaatgtccaatgcctagcatgtcaatttatttttctaacataaatctcacatccatactcataatatatcactattttccttaatttgttgcatcatacctgcatcactttctgaaaaatacaatggtattttccaagaaggaagcttacaaattcaagggtttgaagtaaggccatgtaccaaacacaccaaaatcacggaccatcctttcgtcatcaagttcaacattgatatcaaaatcattgtgaaatataaatcatggctaaagatagaaaatgagaaattcagagtttacaattacgctcacttggttggttttgccaacacaaatcttcactacttggtaaatatttactaaacatatgattttctatttaataatattaaaatactaacattagtcttagcttcaaattctaaatataatagtaacattattgttttatatgaatcttacatatttactattcttggttaataacaaattccaaactcaatacaaatgtagttgggaaaattctttcaattgaaggttcaaaccttagtgaccttacttcaataaaccaaatcattgtcaaattatggttccaaccttaagtttctattttgattgtctaagacttttttccctacatttcaattatctttactcataactaaacaaattactttaaacattctacaccaatatgttgtctcctcatctctttgggttcaaactgcttctcgccttccagccatccatccagtgtctctgttaatccaacaattctagaatgtaagattattttataattataaacagaatgttttagatttcctaattaagctttgcacgcatgcacatattttttgatggaaccatatacacgaggtttttttccaaccaccatattggtcgaatctctaagtttatgaatcagtaagtttattttataatttttcacttcaaaaaaaacaaaagataaacaaaaacctctcttttagttctggtatttcagaaaacgattcatttaccatcacggacataacggcaaacactcccaaaatggaaccaacgtgtattgcaaattgtgtgaatacacttctacaagaatacaacaggtttgtttggctgtatttttaaaagatttattacttttttttaaaacaaacaatcacaagggatggtgatttaaaaaaaaaaaaaaaactaaaaagagtatgatatccaaaatttctttatgtagacaaagaagaccttcaatgacattcctaattacctaatgatcatcatcaacgaagatgaggtgggtcatcttttcccattccatatgttggagttagtgtgaacaaacacagtcattttttaagtgttaaagttgtagtttgtctttcatttagcatcgttcaatcaatcattgtttttttatcatatttaatcattgttaaacacttcttatttcccccatttattaagagcttttacccaaaatatagaattatattgtatctctttatttaagccgaacgataaacccttcttctgatatatttttaaaacataaccttcagcaatatctaataccatatttagatatttattattctaaataaattaaaaaatcaacaacaaccaaacaagtacataacgtataatagaaacatctagatcgtacgcaatactttaacaccagtttaatatcctttaatatatgttaagttggatgtaattacgaaatacaatttcaatgctataaaacttgtatttcaaacaatatatccatacttctaacacatattattaccacatagtttttccaaatttatataaataaaaaaaaattaaaaaaaattaaacgtatatccacaagtaaatgataatatactcactaatagtataaaccccttaatttcaaaagtttatgataaattacgccgtacactcaataagcaatcttcaatacgcaatttttaaatagtactaattggttttcaaccatgacaccaaaacattatctctcaaaaaaaaaaaaactaatactaaacttatacttttaaacagcaataaaaaaaataaataatttatacgttaagaagacgaaagatccacactaatctatttaaacaaatacaaataaacaaagttatcacacaattgcaactaccaaagctgatattagtcgcctagaggcacttcctcaagatatacttgaagaaatatttgctaaagttggagcaacatcagccaaagattttcacaattgcatttttgtatgcaaaaaactaggtgcatcagcaactgacaaacaagtgctcaaaactcttaatcttgttccgttggtgaagtaaccgttatcggcatgcaaaccttcttactatgaagaaatgttttgacaacaacaacccaaatgctcactacataaaacgtataatacgctactttgtctttgattattctgagtttggtctccaccatattggtaaaacagctaatttaggccagaaagaagttacctacatgtatgccatgctattattatgtcgaggcacaactgaagaggggaaggcctatctaagccgtcttgaatgggctaaagacaccaccatggctgaagcatgttggaagaaaatcaaaacatcattacatgagattagagtggcgagaaagaattgctatattatatcacttcacaacatgaaaccttcaagtttgtgtcatccaagagatttgaatatcacatgtgaaacatgttttatctacaaacaaatgtttaactttatctttatggtataacttaaccacatcatctagagagttggaaccggttttaaaaataccaccaaaaatgtttgaggcagtgaactatcacaaagcttcaaaacaaatatatttatgtattcttttgctatcatgttgacctctcttgctgttgcaagaaatttttaatttaaataaaattcaactcttacattacctatctttgcatatattagtttcaatgtattgttaattttgttaatcatccaccaatcaaacaatatatatggggcaagaaagcaaaatatgaacaaattaagtagcaaacatttgcaaaacaataattatttgaaatacaattttccaaaataacaaaagaggaaaataaaaacgaaagttaaaaacaaaattaaatttataaaaatatgcatgagtaagctaaaatagtgctcttatatagttctttacaattctatataaaaaaagaaaaagctactagaaaaacatattttactacatttcttatattttaaataaaaagaaaagctttattcgacaatacaaaaaaatacagatcaaaaaattaacaaaacaaattggaaacttgatatataactaatcacagattcgttaaagttatacaattaggattctaacagaagtaaaacaaaattgatacaaaaatgaaatgatttattcaacaatattaagccatatgacagacataagatataaatgaaaaaaaaaagctaaaataaaaaaaaaacaatcacaaaaataaatatgaaatatatatatatatatagatacactttctaataccaaacaaaatgtaaatataatacacctacaaattaggcttggaatgaagacaaacagttaaactacggattaagtgcggtgcggttcaaatactaactgaaatatatacatacaaaattatatgtaaatattttggttaatattcaataaccattacatgttagtgttatttaaacaatactaatcaataaccattacatgttatacatcattacaatttaatatttagtatatcaaggatgggaacccaacattcaccacactcaaagctcaacagaccaataaaaattaacaaacaatatatagttcttaataaataatataaagttctcatccttcataatacaatctgacttatcaaaacagtttaaattcgagggtcacatgtatagtttgatgatgaatgatatagctcaaattaatcctaagacaactctctcaaataagagatcaattgtagtactttagaccatgtacataggtgatacatttagagtatcaatagccataaataactttttaatagatcaaacaatacatttagctttgatccagtatcagtgcagtgattcttttgatacccagtatcaggtgatgtggaggatcatgattcgtcgaattttcatgattcttttcaactgttttagctaactaactatatttttcgcgagtgagtaattttgcaagctcttcctgattatgcgacataatttagcagtaactttgtaatcttatgtttttatatatatattttttgattttgcaaataacttttttttaatgatacaaaaatatcgctctcaccactggaaacagatttattaccaatatcataagaaatctcaaacaataaataaacattaaaattaatactaaaaaattgataatgatactcatagagtatcaactatgtgcatgctcttagggtcgaattccacaaagctctcggatcacacaatagactaaggtatcaaattttttttttgtgcaaccgtttttaataatagtaaacaaggctcaaactcccgtgaaggaggagacgttacaggataatagagcagctttagctagtgagtctgcttgagcgttctctgaacgcggaacaaagtgaaaggaaactgaaaaaaaactactaacaagctccgcgacatcggctaagataccgtctaactcatttgcatgaccaccagaattgatgagaaggacaagttctttacaatgcgagaaacaggccagccttggaacacccgatgctaaagctgcagaaattccagcgtttaaagcaagtgcttccgccactagagctgaagacacaaagggtcttgaagaattgctttaaagaagcacaacattatggaggtccttaatgatccatcccatgccgccaacctttgaagtcgcctgccacgctgcgtccgagaaacaggggaacgcctccgagtgagcctctgaagagtcccctctttccaccgccagactcagggttggcgatgtaggggtttgttggagctttgcattgtgccaccttttggcttctaaaattgatttttgcaccgtgtcttctgcgaagagaatccggtcttcgaaaataacaaagttgcgggccttccacaggaaccacaaaatccaagggtacagaggggtgcttcctaaacctaaaggaggtaaactgagacaagtgcgccccttttccaggatcttcttgacgtagactactgaacctgctcttggtttgggaagaagtgtcgccaagtcccagaccttgactgcaatgggacatctaaaaaagatatgcagagcatcctcgatctccccacatcgtttacaccctgtttccaccactatacctcttgctgaaagtgctgtcccaattgggagcgccttttttgtagctttcgagaggaacattctgatcataggtgacgtatacaccttccagttgttagttttccaattaaatccctcctccaagcaggggacaagattagactttgccattgcatagccagactttgtagaataaactcccgcttttgcagggagccaccaaagtcggtctggtctttttgtagaactcaatatcaagctgagtatatcttcctcatgatgaagtaattccctacgaatatcttcacagtcccattggtgagaaacagagaagatcaagtctttgaccaataaagtagcagagtctttatttggcggatcaaaggggattttgggcttgaggtagagagccagagggagtaccacacacatatgtcttctccggatcccaccgtccatcccaacccttttcttaagatttctctgcccgctagaatccctctccatccatggaatgcattagacaagggggtgagctccataaaaggtgaagagtggcagtatttgccaagtagaacttgagccaagagggattctagattcttcaaaagtttccagccaatttttgccaatagagaatcgttgaaagtagccacctccctaaaacctaatcctccctctgattttaacgcagtgagcttctccaatgctacccaactcatttttcgtttatccggtgtatcatcctaccaaaaacgggtcaacgccgattacatccttttacatagagagagggggagcttgaagcatgtcatagcatacgagggcatagctaaaactgctttgagcaggacttgtttgccagctcttgacaggaaccttgtagaccaagacagagttcgttgtcggattctatccaccagacccgtgaagatgtcaaattaagctaaacaaataggttataaaataagaaacaaagaaaagcaataaaagtcaagatatatatcagatggagaaaagcgtcagagggacattcttaggaaataaatgactaacagatcaagctatgattaggattattagcaaaccgttctagaactcaaatcactaatataaagtaaccggtgatgtgtcgtgctactcattatgcctaaagctaaagatccccaatgatgtgtcggtgaatccctaattctatacatgcgttatttatgaagtttgattagttcaccaaagtatctaaaccagaacccttctatgagcgtacatgttctttcttaaatacttaggcccatctatgatagttctggtaacaagtacctatggtgggtatacttattatctaagatcaagttctaggtgatcaatctaaaactagcataaagaacaatcaagatgaagaactctaaagatatcctaacaggttggcgatttactatatcatctaaatccctaatgggaaaccctaaactaacaagaaaactactcaagaatgacgattgaagcaaacaacatgattgaataagaaatcaatgtaagaaacaagaagataatagagtttaggaagatcttctctaaagggagtctccacaaggttttgctcccaagtacaaaagagaaaaggagattagcctctccaagcttaggtctaaacaatgacctttaaactatatctataagttctaaaaacgtattgggctttctttaaaaataagggaaagttcttggcggaatctgcaaatcttcataactttattaatgtgtcttagaattgatgtcaggtattgatgtcgctcgacactagaggtcgtgtcgatcgacacatacgcgatttatggtctcaagatttcttctacagcataaattcttttgctctagaatactccataatcttcaaacgcatccctaacatataaagacctgaaaaaggactagaaaagactataaaaataacaaatagactctaaaacctgtacctaaaccatacttaaaaccggtaaaaatagggatatatcaactcccccagacttaacttttgctttccttcaagcaaaacacaaaagtcgaggaacaagggactcaacaacaacttgaggcaatagtggaagatcacgagactcaagaagatggatcacacgatgaaaccgttgatgagtctatggataattttgatacgggggaacaatatttgagccaccgcctactatagaacctggtcagtttaaaaaaggatgggaagacggaattggtttgaccttacgtcaagaatttttaaacaaggcgacattgcacgaggtggtggatagagctgcatttgttaatagttttggttatgtgattaagaagtcggataagaagcgttatgtcctaaagcgtgccaaagaaagctgttcttggttatctgaaattcgtaatacatatatcttctcgattagaaggtacaatagatgcatacttcaactcggctatgtagaagtagtagtaggatcaggaaaaggaaaggtaacccacaattagtggatgagaatgtaaaattttagtacctattcatagctttgggagctagcattgaaggctttaaagtgatgaggaaagttataattgtggatgcaacacatttgaagaacagatatggtggtgtgctagtatttgcctcgactcaagattctaattgttaccattatatcatagcggttggcgtactcgacggtgagaacgatgctagttgggattgttttttcgagaagctaaaaacagttgtacacgatacttctgaattggtattcatgagcgacagaaatgcacgcctcataaagggcatacggagcgtgtataccgcggctcatcacgagtattgtatttggcatttgtcccaaaatgtgaaacggccaaatgctgctaacgtcaacagagacgtactcacatggaggtttatcgagttaagtcgcatatacaatgtgagtgagttcaacaaggagtataatgtgtttaagttgagatatctttttgcgccaagtatttggaggatacaagagtgaatgaaaaatgggcaagatgttgtttctccggagaaagatacaacttagaaacaagcaattgtgtggaatctttgaatagtgtgtttctcaacgcaaggaagtactcgttattaccaatgcttgatgcgatcatcaaaaaaaaatccatttggtttaatgaacatcagatatagtgatgttaacttgggcattgaatacccatttattaaatgggtatgtgcaaaaaaaattaacccatttaaacccatttagagaaaaatattaaatggggttaaatgggttaccccaattaaacccatttaataaattaaacccatttaataaatgggtttacccacaaacaaatgggtacccattaaacccatttatgttttattttatattacttatttttattaaaatgtagataacttaattataactaaaataaagagcaaaatactaaatatatttaaaacaaaacgtaaaatcacgttttcccgctaaaacccatcaaattacgttttcccatcaaaatcacgttttttaccaaaatcaaaaatcacattttcccaccaaaatcgtaaaccgacgtttttccgcccaaatcgtaaaatcacgttttcccgccaaaactgtaaaatgacgttttcccaccaaatttgaaaatcacgtattttcgccaaacccgtaaaatcacgcttttccgccaaaatcgtaaaatcacgttttcccgccagaatcgtaaaatcacgttttcccgccaaaaccgtaaaatcacgttttctcgccaaaatcacaaaaagtgttttccgccaaaaccgtaaaatcacgtattctcgccaaaaccgtaaacgacattttctcgtaaaaccgtaaaatcaagttttcccgccaaaatcacaaaaaattatttttggccaaatttgaaaatattattattattatatgttattgaaatctatgttttagtaaattataaatatttcagatttagctaatgtttatggactgttgttatttatctattaagtttatgaattaattaataaaaggcaatatctcacttaattggtttaaatgggttcacatggatttactaaatttaaatgggcagggttaaatgggtttcaaaaataaatgggtttatatgggtttaaagttaaatggagtgggtttaaatgggatgggtttaattggggtgggttagcccatattaacatcactaatcagatagaagccgcgtctggatccatagaaaataagatggtgccccttggtggagaattatttgcatgatttgtgggttgaagctaaatacagtaaaacctctttaaattaatactcgataaattaataacctctataaattaataaattcttccggttccgagttgggaccagtgtaaaaagtgatacaaatcgataaattaataagataataatttttttgaaatttctatgtaaacatatggtcccattaatatcataaaataataattgtataaaaatatcaactatatatatatattatacttatatataagaaatttcaatgaaatataattttagtattgtgtctatttacttaaatttgcttaagttttttatttcattttaatattttactttatcaaaaaaatttcttattgttttataaacatgataattatttctatttgtaattggttctaaaaatatattttagataatgaaatgaatcttacattttcatagaaattaacaacaattgccatatttggaaaatctctctataaattaataaatattaatttatcgagaaattaatacctctataaattaatagaattttgcggtgccaacattattaatttatagaggttttactgtagctgaaagtggtggagctgaacgcattcgagcgtgaatatgtcgtcacatatagtgaaggaaaagattatacgatgagcttgctcttgaaaacttgcagttgcaaggtattcgatatccaaaagtatccttgtattcacgcattaacttagggtccgaatggtgacaacaaatagagcggaacggacaaagcggacaatgcggataaagtgcagaaaaagcggttatagtggacatagcggatgaaatggacacaacggattatgttgatgaaacatagcgattttatgagttgaatggttaaaagcggacaaaacggtctaatgttttaaaaaaaaaaaaatttgtaacaaaacttttctgaacaactattaattttgttttagtaccacaacatattgaaaaatgtatcaaaaatacaaattcaaatgtaaaatcaaatattttgattttccgataacatatttgcaatcgtttctcgaatgtttgccatatgttgtccatatgcattttctgcttcatcaagctcaaatgatgcattgttctgatcttcagtttaagtctcggtaaaatattcaacaaaatatgcatttgtaaaattagaaactcttataaaattatggaaacccattgttgcgataattagtctccttggaacatccaaatcatatcttggaaaatcagttaaaattctccatttcttcttccatactccgaaagtgcgttcaattatagaccaaagagatgcatgagatcagttaaacaattcttccttgtttttcggaggaggaccggtatagaactgtgacatgtggtatctcagaagtctattttgtgttgacctataaggcgctaaaaacccttgcttattaggatatcgagagtcaactacataattgtctcccggggtaaaggaaactcagaatcaccattttacgtgagtgaaaggacagctgtatcatggcatgcactcggtgctccattccatacatatgtgaataacatatttatatcacatattgccattacattgatacttgcgtagttgtgtcggttccaataaatggcttgtaactcaggctttactttgacacacacatgagttccatccataactccaacaaaaccacttaaatatggccaatatcgtcgatcaacttgtagacgttgaggaatccgaagtaattgttgtgttattggtgtcttgatgtaatctgaggcaagaagttatgtagcttccaacacttcactaaactttctattcacggtttcttggtttcgtccgaatcgtaaaccaatatctcgttgaatttcattgtgtccacacactcgtagaaacattgcaacactctcttcaacacttgcattcaatgaagattgtaacccataattttcttttaaaatagagcatagtcctgtgaaggtagcaaacgacattctcaataattgtagacatgcagcattgtcattttgaatacgatcccaaagaattagccatcccaatcctctacttgttttggatagtcctttttgaaagtcctgtgaaagtaattcaacgttggatttattaaaaattcttctatttgctcattttccaaaggctataactcaaatatttctacgtcagataagttgtgaatttcttgtgaatgtagttgacaaattcgaaaagcctgaaataacattaaaatacataagtaacaagaaaaaaaaaaactcaatcacaactaattccatattgagaaattttactcaaacataagtacttcatcaaactaatagaaattttacatatataaataaactaacataataaactactcttcctcagtttcgctcatgtcgttatcaactaagttttgtcgaggaagaggttgcgatgtggatggattgttttctcctaaagtgctaaatagtccgaatgatcttagtgtctaaaacatttggccacttggagaattactgagaaaccctagattcggagaccctacttgtggtctctgtgtataacgagtaaatcctagcctcggagatccaaaacccgatcctggagaatgattaccaaacccaatgctcggagatcctacttgtgatcttcgagatgctcgttgctcaacatttatcggtgcaagaaagtgtcgaaaacctgtagtagatgggtcaatacgaatacttggagttctttggcttgtatttgcagacatactacaagcagatgatggaccagatgatggatcagatgatcgaggcgtacaagacccactcggtggacgagtaattcctacattttcaccttggcttgtaaatcctgttagagactccaataatcatatcctatcctcattggtctgaaaccgactttaagacatccaataattacgccaaaatagatcagttttcagaagttggaggcattgaacgtagaaatcattgtatcttcgaatctccaatgattcaagaatatcgaccgccctttcaaactcggtaaaatcttcgcggtcaaaagcaccaggacgtagtcgttcaaaagattccctttgaaagtctcttatggaagacattgtctcttgaatggtcgattcaaaaaattttcttctacgtggtacccatgatccgctagactctcttgatccattctttcgactagccgatggatcaactcttgaatgttgtcgatcgtgtgaattcatatgatggttgtgaatcattataaatgatcacacgatacatcttcttggtttgttgagtttcttgaacttcattaggctcacaatcgtcgtcgttatcaccatcatgtgaattgtcatttctgatttccgcttttctttgccgcacagactattgacgttgagaacccacatctaagactgcaaagcaatgagacgtgatatcccaatcttttggaggttcgcggttcaagcgtgctagtttcgcaaactcctaagattaaaaagttaatgtaagaaaattatctataatttttgtaataattaaattgatgaaattagggacctgtttcacgattatcccaccatgcttcgtcagcctctatccttctcgtaatagtatcaaccaaaattctagtcttactttgtagatgcttccaaagcttgaactctatcttccattgcagcacttagggatcgaattcacaaagttttcggatcacgcaatagactaatggctaatcgaattgagctaagtaaaatagtaaagaaaataaagagacacaaaaagtgagcaatagcaatcgattggatggttgtgaaacaagctaataaaagcgtcaggcttagggtattctcagaaaatagatgatagtagatctagaaatagctaggttgttatcgaaccgttctcaaactcaaactatgattttagagtaaccggtggtgttccgcgaaaataaccggagaagctgagaaatcttatactaaagcatgcattattatcaagtttgattagttcacctagtatctaaaccagagcccttctatgagcctacctgttctttcttaaatgcctaggctcatctatgatagatcaaatagcaagtacctatggtgggcatacctattatctaatatcaagttctagttagctactctagaactagcatgaagaacaataaagatgaagaatcctacatataacctagcaaggggcaatatattaagtcatctaaatccctaatgagaaaccttaaacctaacaagaaaactactcaaacatgatgaatgaagcaaacaacatgattgaataagaaatcactgaataaaacaagaatagattaaggtttagcaggattttctctaaagggagtttccatagggttttgctcccaaagtacaaaagagaaaaggagaatagcctctccaagcttaggtctaaacaatgacctttaaaactatatatatgacctaaaaacgtgatgggccttctttagaaataagagaaacttctgggccatatatggaaatcttcaaaacatcaataaattgcgtcttcgaattgtcgtcaggtattggtgtcgctcgacaccaggggtggtgtcgttcgacacctacggggattttggtctgcgaactgcttctgcaacttaagttgtctgttttgctccagaatgctccataatctccaaatgcatcacaaacatgtaaagatctgaaaaagactagaaaagactctagaaataacaattagactttaaaacctatacctaaaacatagttaaaagcagtaaaaatagggttttatcaacacacatgtgccattattacctagttagtatttcccaatgttaccattactatccacaattcacaattgtagtattagccacatccgccaacactacctagatatcaacttagtatttcccaatgttactagtactatccacaattcacaattgtattattactcacatccgacaatataacctagaaatcaacttagtaattcccaatgttactagtactatccacaaatcaaaattgtactattactcaattcaagcggtattactcgtcatatccatgacatttgccattgagatgtcctcgtgtctcctcccctcctcctccacgggtttttccattgagacgtcctcgtctctctcctcttccattgagactttctcgtgtctctcctcctccacgatagtagcgatacaaacgccctcttgtctctcctcgtccacgggataagcatttgagatgtccacgtttgctcctttgatttggaatcagagcccaaggttcgcctactactactccctgattcttcttcagttccttctctttcattctcatcttgctcatgagtttgctcattctcttcttcattgggaatctgtttttaaaatgaataaaacgtagcatcatcaaccacccccgttgttggagccgtcgcgtccgcctccgtcattcaggccggtggagcttccaacaacagtaccgctggtggagcttccgtttccggtactttctcttttagagccggcacttctctctctttctttttctttgacccaaacctttcgttgtcttaggtattatctttctccgacttctcttcgatcgattgaacaatttaaagacaatgacaaagaaagaagaacacagatcgatcaattgaacaattaaagaggcaatgcggttacgaattctgcggttattcgaattaaaggagaagggagagatatcgaaaagcttaacggttacaagaagaagaattcgaattggaaatatctcgaaatatcagggatttgattatttttttcttcaaaaaaagaataaaagattgttcagatgaagaggctcagatacgaaccattgttttgggtgtagttgttaggtttggatggggatatgatagtaattaatatctaaattttttgattaaaaattaaatatttattcacttctatctgagagaaagagttattgggttcggctaaaagaaaaacggattttccacaggaaactaaaaatatgggctttctcattttttggtaacataaataaatgaaaacagattaatatgaagaggagcgatttcttgaaagagtatgccttgagagaggcgataacgtggcaagttatgattagctattgaattttaacaaaaaaaaaagacacaatgttctgtctctctctctgcctcgccaaaatcttctcgactaagccgattgcgattcactgcagatttccttgaatccgttgattgctctcctcattttaataacttaaaggctgtagatcaaaatacaatctaccaatcccttttttgatcatcatctcacctaaatacaaaccaatctggatagtagattcgcaactctatttagcatcgattgtggaggttttcttaaacaaggaaacattcatgttggctttggtgtcaattcgagtttgaaaaagccataaacttgtacgttcgtcagtttgtcagttcatcagtccgtcagttctttctatttttctttatgttcagttctttctatttctctttatgttgagagtttgaacccaaaactttctcccctttcgttcaaattttaattgaaatattttgattgcgggatatctgtaattgtcatagattaagggatgtaagacataatttaggatgaccattcttattctttgtacctaatcactgcgtctccgtggccccaaattttacagaattgcttgtgacaatcttttttttttttggttagtttgttataatcctagttatgtcatcctagaagatagatttctaaaagacaagtatgagactatcatgagcttcttaattgattgaattagtgtcaacgtttgaagtctctgtttttgagaaggtaatggaacatatcacaatatatatatacctaagaaatttgtatcctccttttattactcatgtctttagtattagtcggttgatgggttactgatttgagacagtatgttttttctcacattttcgcttgactatgaagacaaaacttcccatagatctgttttatgcacacacaacaagaataatgtggaggtaaagatgattactacgatcttcagatccactttggttttattctctgtttttgcttacatgtaatgtgagcgagagtcaaaagtgattaaggtcctatgaagactaatgtttatagtgtatttgaaatatggttttgatgtgccgagagaaactaggtaatttggtccttattaaagatgcgacgacgaccaggaatcggaggattacaaaaggccgcaactgctagggtttaatcctaaacccaatttcatagttttctctcaaatcttatttaattgaattcgcgcttttatctctctatgcatcaaaaacaggatcaataccggttgctaggagaaaatgtagccaagttacggactgatatgatgaaagaatagctctccacgttccgttcccagcttgaagagttcgctcgtaaacacaaggtcgttatatgttgaatcttatatatatattttgttgtggttgttgttgttttgtcatcgtcttgatttcgtaataagaacatgtagtttaataacatgttcctgaatttgaaacaattgtggtgaaaagaagcataattttttctttggttggagaatgacattcgtaagaatcctgccttcagggctcaattccttgaaatgtgtgctaacattggtgtggatcctcttgcttctaacaagggtttctaggctgagctcctcggtattggtgacttctactatgaacttggtatgtttagcgccactgaagaagatgcttctgatttttggttagctataaaatatattgtgtacttttttctcttttttagaattttcgtgaattcattatataggagttcagattattgaagtttgcatgattacaagatcacataatggaggtttgatcagcttgcaagagctctgcaaccatcttcgtcagagaaggaagaaagatcgtgaagctgtgactgaagatgattgtttacgagctattagcaagctaaaggtttctatctcacttgtgtttttcttttttctttcagattttttgaactgatcttgctggtatcttgggattttctccttaggtattgggtagcggatttgaggttatcactattggcaagaaaaagcttgttcgtacggttcccacggagctgaacaaagaccataaccagatgttggagttggctctggttataatcagaccatacattcttcctaaaaagaaaacaattttttacatgtttcttagaagtttaaattgaagtgacttgaggattttgttacttttgacacagagccaaggctttgtgattgtggaagaggtacaaagacgcctctcgtggacatctggtcgcgttatagatgctctcgaaactttgttagaagtatgcatttgcaatctattactataattggattatgtgcttcaatacctctattatactggtagatgcaatgcaacctatgcgactccttaaaccttgcaattttataattcattttcaggagggccttgcaatgatcgacaatggccataaagacggaaagtgtcggtactggtttccctgtgtttcttcagtttactcatccaccggatctgatacttaacctgatacatgctctgtcttttttgcttgctttatatgaaatactgtcacactttcttacacataaattacgaagaaatctcttcggtatattacttaaattctcgtgtacatgtatcaagaattgtttgattcatagaccaccttgttaaaaaaaatattatgctttgttgttggagatctctgtttcttctatccagtcagagtttggttcaccccataatcgaggtctcatcccaagctggaaataaaaaacaccatctccaattcttcaaagacattgctctcatccaaaacattgttccatgtcccactcacgatgcagtaattgttgttatatggtgctcgatgatgttccgcgtgctgtctccttgaaacaagcaatcccatgttctgcaacgctaccacgagaggtggacgcttgctcttggttccatgtgcccaagcatggaattgctggctaagcattatgcaaaatgcaaatgtgcacacaaagccatgaaacacatcgtcgttaaatgcaaggtctagtgggagaattgtaaaggttatgacttgagccagagcgtgtagattgttagcaaattaccgtatggtgattgtccaagaccacttgtggtgaccctgaaatgcttcgatttgggttcctactacaggtgttgactcatcaccatagttatcaatggccaagtggtagacaccggaacctagatcagctaagatgtaccctgcataaccggctaaagctggatcgagccagagatgagaatcaaaccctccaatgacagatttagctcaagagacaaacaaagtggtgcagcccgctgcaacccttaaccgatgggtccatgtcgatttcagagttgggtcgttggtcagaggaggactcacaagacgttgctcaaccacaagcttctcatgattaggctgaaacttggtcaattgtagggttgtgtcgtttgacagaggagatttcacaatgcgttgctctaccacaagcttctcacgatttagctgaggcttggtagtagtaaaatattacaaaaaaatatatttattttgcatccgcttaggcgggccttatctagttatcatataaattagttttgatgttatcatttggatctttttgcaccgttttcattatcatattatcaacatctttttattttatatatattgactaaagttttatgcaaaatcttatatatataaaatatgaaacggctctttaaatattttgtaatattttccactaactcattttggaaagcttttggaaaagaatccaacaacaagatttattatgatgccctataaaaacaaatttctcccaaaatatctgattacaaaaattatatatcttagtatttttgatactatatacatatactattttcttcgataatgtgacacatttaaaggtatctaattttcattttaaaaataaacattacctaattttgaagaaaattcttcaagatttaagatcatgagcatgtgcaagcctagagaactggcctccaatatttttcaagtggtcgtaactccctgtctctattacagttccatctacgatcaatgcaatacaatccaaatttttcaaggtgttcagacggtgagccactactacagtagtcatatttcggctagccatgatcctagctagagcgtcctgaacctcctgctctgagttagagtctaaggaactcgtaacctcatcaagtagaaggattatagggcttctcagaaaggctctagcgatagctatcctctgtttttgaccacctgaaagttgtactcctctttctccacattctgttttatatcctttttccattgccctttatagatgaaaaacaaaacataaagagaattgaacatagcaaaaaaaaaaggaagaaaaaataacaaaaagcatacgaaaatattattttgttagctcattcaaaatttacgataagaagtttgaactctaaagtctataaatatcaaacaaaacaaaaatatgttttgaactctagaaactactagccaaaacatacaaggaggatgcaaatactacttgtgtattatatgtaaaaatagaatcacacttacgagatgaaatcatgagcattcgcggctttagcagcctccactacctcatcctccgttgcttcgggtcgtccgagtataatattatcttggatacttcctgagtaaacaactggctcttggctcactagagcagtatgttttctataccatttgatatttatatctcgcaaattttcactatctattttcacacaacctatttccacatcatagaagcgttggatcaaagctatcactgttgatttaccacatcctgatgtaccaaccaatccaatgcttgtcccaggcttgatatccaaggaaaaatctcgaagcaccagaatactaggccggttagggtatgaaaaatcgatattcttcagttctattcggccttgtattgtccccatcttttctccatggtttgtattttcctacatgtaacactaactattaataatatacgacgattagttcaaagaaaattttcaacgtcctatagaagatgataaaatgttaatggatgtttgtaacttacatgcgatgaaggacgatcaaggatattgaaaacagaagaaatggcggcagtgcctttggcaaggtcagaagtcatgcttcctgcttccgcaataaccttgccagtgcttaccaaaacaaagaatgtcttgaatacatccccggccgatatttcccctttttgaaccaacactcctccataccaaaagtctaatgcccatgtcaagaatgttaggcattgtgcagaccccatcccaaagcctgcgagccaagctgccttcctaccctttctttttgcctcatattgagcattgtcaaatatttctatgatcttcttcgtagaccctaaggatgtaacaattttgtggttgtaaatagcttctgatgcaatctgtgagctacggttttgtgcataggcgtaattgttggaaattttggagagcaaaacctttttggtatagaagcaaaggatagagagtggctgtaccgcgatcattaccaacgcgagtttccaagaaattagtagacctatgatcattgcgattgtgacacctgaaatggtctggacaagtaaggagattctgtcggctactaaggacttcacaatggacacttcattattaagccttgaacaaatctcactggtaaagttctcttccacatcaaaccatgcaggttcaaaggtaaagattttttcaagcattttcaaccgaagtcgttgcattagcctttcacccatttttgcaaaactataatgctgaaggagattaagggtgatggagagaaaggtaagggaaatgaagattaaagagtagatgtgtatcttatcttgcatttcttgagagctttttgcgaaaaatgctgatatcataccgccaatacttaaggcataaaccggttggattgcaccaaatgtagttgctgatatgcaaccgacgagagaagacttccactcaggagaaacaaatggaagaagtcgagtgaatgaagtagaagggatattttcattgatcttggttgtgtgattgctctccaatgtgataggagaaacaatgagatcaggagatgacctattgcttagcctaatgacactgttcatagtcgaccaacgttgttgtatctcaggactgttgaccctatcttgaagatcttgttgatgttcatgaccgaattgtctttgaagttttacgagttttgcataatggttgttctttgtcatcaaatcttcatgagaacccaattctctaacggaaccattttctaacatggcaatgatatttgctcctctaactgttgaaagcttatgtgccaccacctatttcacaatatatgcatattgttataaggaaaaaaaaactcatgagtttgagaaaagtttaaagtaccaatgtagttcgtcctgcggctacttgatcaagtgcattttgaatcaatgtttcggattctccatctagtgcacttgttgcttcatctagaagtaaaataacgggatttctaataattgcccgtgcaattgcaatccgctgcttctgacctcctgataaaagggcgccgcgattgcctatctgttttcatgtcaatggtataacaaaatataacaaattataattatgtaaataaatttactttcaaatacatacgtgtgtatcataaccatttggtagttgtgttataaagccatgtgcatttgcagcctttgcagctgaaataacttcatccattgacgccttatttttcccaaacattagattttccattatggacgttccaaataaagcatgatcttgactcactacaccaatgtgttgtctcatccattttaactgaagagtctttatgtcaaacccatcaatcctcacaaacccctcacatggatcataaaacctttgtagtaatgcaattactgttgatttgccacttccactagctcccattaaagctacactttgcccaacatcaacagtgagagtgaagtctttgagaattatggtttctggacgagaaagatatactaaggttacacgttcaaactctactcttcccttcattttctctccgggtatgaatcctttctttgtatcctcaccatctatctctgaaattctatcaattcttgaacatattcgagctgccgcaactgaagcctcggaaaagtatcttatttcagtcagtgccgtccctagagagctgcaccattttattcattcaacaaatattacttattatctcatgcaatctgaaagtatgtaaggatttacttacttacattccacccaagacgaaggagataccagctgcataaatgcgtccaccggtttcttgtttgtgcatcaccaatctgcttccgtaccaagcaagaaaagcccaaatggtgaatgaaatccctgagcttcccacggctaaacctttggcaagaccttgctttaacccaagctttttgtgtctttccaagacttccgagtatttcttgattatttgagtttcggctgtgaatgaaagaattgtcttgatggagcttagagcctgttccacgatggagtttgctttggtgtattctttaaaagatttctttgataagtgaacaaggtatttgccatagatcaaccctgggattagaagaagaacaagtgttgggatggccaccacggttaatctccatgaaaagtatgccgaaaacacaaggccagtgatgaaaactgatatgtgcatcaaaaatatgggcacctgagataattagcagattggtaaatttctttattatgacaaaacatgtttaaaacaattttttattcttttatttaaaaagtatgcccttacaattacaataatagtaaactaatcctgttgtacaatcttacgcataagaaaactataagtttatttcttcttaattaaaatcgcattatcaaacatgttctataaataagagtatcttactaattaatttattttattgctgttaaatcaaatattttatattgttacagctatgttcttaaactatgaattgatcgataggcggagattactagaaaactcaataatgactaaactcttaggccaactccattgatgtttcttaaaagtttcttaaatccaatccttaaaaataaaactcaaaaactaaatcaaaatttatattaatgtgaaggatcaagcctaaataaagattttaagaattgttaagaaactgtgacatgtcgcttttatgattggctcgattttttattttctttgactcgtaattattaacaaaagaaagaaaaaaaactcttttatgaaatctcaaatctctccctttctctcacaacaccacataactctctgattcttcaacctcttttcgttttaaatatcaaattagttgagcatatatgacaaaaatattaccaaatcaagcttaaatctaatcgttattccggttttgatttgtcttttttttttttaaaaggtttttttgtcatctatgtttactatttaagaatttctagtagttattatgtttgaccaaataaaattatttataattttatattttaaaaataagtttcttcaaagaaactcatttaaggactccaccattggagaataaaaattataaggactcaacaaaaactctaaacttcaaaattatcaaagtttattattacaaattttaaaggattctttctaaggactccaccattagatttgctcttagagccctttatacatgtatttcaccaaaaaaataatcctttatcaatgtaaaattggtagtgttttggacctttttctacaaaagttataaatttagaacaacaaggtacatactgtatgtttttttttaggtagtttttgtatatctcaaattataccgtacgtcaaccacaatattaaacttaataagctttcacaaatgacagctcaatatataccttttcactaagaagttgttggatgagagaagtatccgtagaaatggtgtggatgatttcagaagtggaaatatctgaatcgaaaaacgaaacttcttgtcggagaacagcttcaagatatgttcgacgtatcttcataacttgtctttcgcttgttttgctccaacaatatccctctgcaccaaaaaatccattccatatatttttaaatcattttattgcatacatatttacaattaagaaaatacttaaatgatgatataaaaactattgacattacccataaatgccactcccaagattgccaatcccaggtatacaaagtataaactgcactgtataaaataaataatgcaatgtttaggtcgaatgtttattaagaaatctaatcactcaagaatatttttcttatcaacatatattatgaaaataaaataacttgttggttaacgaaactaaaagaaaagaatttacataaataaaatcatggaaacgaattgttctattatgagctaaataactagctttgaattcatagaatttggaatataatatatataaaaaacacctaaaacttaaaaggatcacacatgaatacaataatcagtatctttctttaacacatggatcattgtgacatcaagaattgaactgcatatcacttgagcgatacatgtgtataaaaaactcccacgaacaaattttattcaaatacgtacatcgatacatatatcattccataaatagataaaactaattaaacccttcaacaaaaaacaaagattgataacaattattttgttttcactattttacttcttaatatttttaattttaacaattgtttctggaataaatataacaactatcaacctaactgaattaagagatgactaaccttttgaatctcttctttgaaatttgtggaactaggattgtgttgactgtagcccaaagtattcatgatcctgcttacgaacactagcgacacattcgtggacattccatctccaatggctcccacactaccaagtaccataagaactatatctatccaatctgcaaaccgaaatattacgtgtgtgttcctactcgatttagatgataccgtctcggttttcgcttgagatctcatcttatttcttgttttgtctttgctcttcttgaaaattttcttaaacctcgatgagaagagttacattaactataagaagagtgagacaagtgatggttgaagtgttatgcaccaaaaatggaaggtgggaggaacttttgcttttgtatgttttaacaatataatattaattgcttttatatgtgattttcaataatgtaggtgttctttattatgcttttatcttatggttgttgataattctatttcatcacaagtggatttcatttggtcaccgactgaccgcataatcctgcttttgtttaatttttgtttttattttatgaccaatcattaaccatctataaaagagagaccgatattttatgctagtaataccacttactcttcgactgcgttgtctacttcaacaatcctcttatatattgtttgaaaaacaaatctcaagtctcaagtctcaagtctcaacaagtgttatattcaataatgtttttttatttaataaaatttgatttgtaagatgttacaaaaattcagatactataacaaaattttcaaaattttaaaaacttatattaaattgaaaagtcaagtctcatataatattttgcagaagtttattactataaaaaaccatatcgacttctcgtaaatcagaatataccctatattttttaataccttatttccagaaatatgttaggcataatcttttttttttccagatttttgtaagctcagataatcgaatctctgaatctattttgttccaaacgttttctgaaacccaatattattttatttctataattattcactttttaatctatttatttggttgcttgtttaattatgtgtaaatacttaataagttagattttagaagtttttatgagattttgtattatgttattataacattattagatatggttttcaaaaatgactttttgagctcaaattaaaaattgttgacaaaaagaaaaaaacattgttagataaggaaattggtgtttggattttatcgtctattgttagtttattgtttattctagtttgatcacctaaatcatgatctaaggttaatatgtgtatcaaaaatgtttgttgaatttccgaaagaactaactatcagataatcatgtgtttttatctcaacgagagacggaggtgaaacattcaatgaataatcgaagagatatttgccttctctggcactttttaaaaacattttacgtgttacaacacttcaaaaaaacaaggcactttgtgttgccaaatttagtattatacccttaaaccgatttttcatttgtaaatcaaaccaaaccccttttttctaaaccaaatgcggttccttttcaccaatttttctgtatctctcccacgactttacagtttcacttcacaaatccagtaaaaaaacctaatttacatttgctcgatcaatgttcatgtctccggcgaacaaatctagaaaaaaccctaaaacgaaactcttacacaacttgagtttcctctgttcctcatcgtcttgttagaatctaacttttgattcatcaaaaaatgtgaaagtttagatacatctttgtgttcaatcatgttttgattaggatgaagaattcagaaatttgattatatcttatataggagagagacgtgtttcgctgatttgctaatttgctgattttattgttttaatcttacttctgagagaaccaatagtaatttctggtttcttcgtattcttgcaggttttaaaagctctacatgctccaatgactgtgactttggttcagtttgctgttggtagtgtgctcattagtatcatgtgggttcagtttgttttggagatgtgtcactcactctgatatgtttccttgatatctagttgccatcttgccgcttgttgttgtgtgcacacttggtaatctatttacgaatatgagcctcgggaaagtttatgtttcctttactcataccattaaacccatggagccttttttctctgttttattatctgctttgtttcatggggaggtgagctctttttctgatttgtgtttttctttgacatgttggacaacatcactctcttctcaattataacattgatgtctctcgttctgatggctcatgtgactttctttacggaaggcatcaagttcactccttcatgcattcaatcagctgtgagtttattatatattacaattctatttttttatatccttctcaaatgtttgcagttcctaacaaccaatctcagttttgcagggtgtgaatgttcaacaaatatatacaaagtcttttatcgatgcactctgcttccacgcataccagtaagttaagacttttttctcttaatgactttgttcaatatttgttgacattatcgataattgtaaaaatatgaatataacaatgtagacaaaagaattttaatatactcacaaggcaatgccaatctaagatatagataccatgaggcatgtcgatatatagtcatattcatgcggcctcgatatcttaaaggtggagatgaaagaaaaatcaacaaataatttttcaatgtccataataatgagtccatttaaaaagtccatatggaaactgttttactgagccatacccatttttcggaatcaatatcttgaaggtggagatgaaagaaaaatcaacaaataatttttcagtgtccataataacgaatccatttaaatgagtccataaggaaaaatgtttactgagccatatccattttttcgaatcaatatcttgaaggtggagatgaaagaaaaatcaataaataattttcagtgtccataataacgagtccatacgaaaacgtttttactaagccatatccattttttgggaatcaatatcttgaaggtggagatgaaagaaaaatcaaaaaataaattttcagtgtctataataacaagtccatttaaattagttcatacggaaacctttttactgagcaatatccattttttcagaatcaatatcttgaaggtggagatgaaagaaaaatcaacaaataattttttagtgtctataatcatgagtctaattaaattagtccttacaaacaccttttcactgagccatatccattttacaggtataagtctactattttttcttatataaataaaatgtaaatggaacaatgttaattacaacagcttcttaataaagctaacttgcgatcagcttcgcccttctaaaagaaaagttctgggagaaggcagcattctgtcccaaaacatgcctttaccttttggattgcaaacattgacagactacctgtcaaaatggggcttactagttggggaatgcaactcagttcggactgtgttttttgtaactctgcggaagaaaacagagaccatctcttgctccactatactttctccgaggagagagatagagagataaatttcttttattttgcataaggatcagaatcgaggaagaagaagaaaaagaaatcgagaaagtggagaattggaaagaaatggaaattgtgaattgaagaggtgggctgagattgtctttagagatctcaaacgtctgtttttatcttattggccacatgttttattagataccacatcaaacaaaaccaatcgaaccggttaaacaattgatggtttaattagggaaggatagaattgtctttatttcctccaaaaacaagaaaaagtgcctcaactttggaaagtgcctaaaacgtaaatacactagatattaacccgcggtataccgcgggcctatatttttattaaataaaaaataattgaatattttttaagatgatttaataaatttatgctattgtttgatttaaatgtataattcaccgcgagacgaaattttataactcaaattcaaagttttaagttgtatttgtttattttgttaaatgtttaatattgtataattgtattttgattgttgtttctcggatttcacccgtagtataccatcccatattaatatcgaatcaaactcgtcaattctaggatttcacccgtggtagtatttaattgtataattatattttaattgtcattctaggatttcactcctaattctatcacaaattattatcaacccaaaccagtcaattctaaaatatcacccgtagtacaccatcccatattaatatcgaatcaagcccgtcaattctaggatttcacccgtggtagtatttaattgtataattatattttaattatcattctaggattttactcctaattctatcgcaaattattatcaacccaaaccagtcaattctaaaatatcacccgtagtacaccatcccatattaatatcgattcaaactcgtcaattctaggatttcactcgtggtagtatttaattgtataattatattttgattgtcattctaggatttaactcctagttctatcgtaaattcttatcaacccaaacagtcaattataaaatttcacccgtagtataaagtttaaatatttataatgtttaaatttcttataaaaaaatcaaaatgtgttttaaaaaaattaaagttttaagtgcttttttttaatattgttaattttgtttagtgtttaagattatataattatattatgattgttattatatattttttccatagcatactatcccatgttattatccactcaaacctgtcacaccatataaccccgtcccgtgaaattaaacacaaatttgtcattttattataaatttcaaatatttataaaattagaaacttcaaaaaagattaatattgacccaaacttcatcattgaattttgagtgttatatctaagatttctctcgcagtatatcgtcccgtattaatatcttttatattgtttaaatttcttgtaaaatttaatttataattttttaaactttttaaagtttcaattttttaaaataaataaccctagtaaacaaaccattttaattttggacacctcataaatcaagtttcatgctcattcgtaatcgaaatcattttggtcctttttatagtatgggtcttgaccattgtccaatttttttaatcgatgtgggacattctaaaatcgtaattattatccacccaaacccgtcctaccatataacccagtcccgtgaagttaaacataattttgtcattttcttataaatttcaatattataaaatttgaaacttaaaaaaatacaatatcgacccaaaattcatcattgaattttgattgttatatttaagatttttcctgtaatatatcgtctcgtgttaatatattttttatatatttataatgtttaaatttcttgtaaaattcaatttataatttttaaaactttataagttttaaaattataaatatttaaagcattttttaaagataaactttataaaaagtttttaaaattataatatttaaattttgataaagttataatatttataatttcttgaaacattttaaagtttcaattctttaaaataaaaaatccgagtaaaatcggataactattttaattttggacgcctaataaatcaagcttcctgctcattcgtaatcagaatcattttggtccttttataatatgggtctgaaccattgtccaatttttctaagcgatgtgggacattgtacacatattatttcttcataggttgaataatatatgtccgttttaaaaaatttgaattgcatcatattcagaaaaaaatataatattttattaactatatatattttatataaattcaaaataaataaagtataagatc

SEQ ID NO: 1327 - DNA, 10607 bp, Arabidopsis thaliana
aaataaaattgaaaaaagaattatatatttatgtttaaattaggtagaaatattttaggaaattagttaaggtaaataaaaaatatggttagtttagagatattgtttatattagatttggtaattaaatcattaattttcgtttttaattattagtttttaggtaacttttccaaaaattaatgttatccaagatcagaacagaattaaacatgttatccaggatccgaacagagttaaaccgggtaaaacccacccatttgaattaattgttgaattatggctcaaatcttcaacattatcttcaaaaatcccattcaaaaatgtatatatagattccctaaaagtgcctaatagtgcaacattctcataatcgaaatgcatgtatttttttaaaatgaatgtaacatttattcataaaaaattaatattatattcctactcgtttgttcatttggaatatgcattaataaatattataatgtcaaataatccatccaaatgatccatctaactaatccatctgaatgatgttcgttttcatttttggtgattaagctagatgattcatctaactgtttttctttaaaattttgtttgtttgttcagttgaatggtccatctaaatactcctagtaaaaaatgattaaaatgcccatattttcatcaaattatattttaattcttatctaaccatatgaattttaattttactgatcaaatatatattttacgatcaaataaatttcaaattattataccgaagaatgtcgaatatattttaatcatacaaaatcaaattttgaagaacaaaaaaaatgaccaaaatcattagtttcattcagaaacaatttgaaagtggctagaccgaatttgactaatttccttgattctaacttcgtgaccaaagcttaattctgtttcagtctatgtcttcatatcttcttcagcttttgacctctcaagccattccaaaaagcagctgcattgatggctttcttaccagcaagctggacttctagtacctgaatcagcaacaccaaatatgagctatataaatagtagattagtgtctgattaccacatcacaaacatctgcttttcgtattaatagtgtgagtgggtctgtaacttggttgatttagagaatagtggcagtgtttcgtctatcggtttacctctaaagctgtacctcctctgcagggaaatattagtgaacctttcttgaatgttacatagtcttgtttaccatcctggatttccaaatctttgcatactcagtggacataattttaagctctagcacattttgctggccgcttttgtcatcaaggactacaactttggctcgtgttcccggccatcctgcaaatggacgaacctagagaacagttttattttttacgtttatgattattgaaataagtcgtaaagtgttggtttattcattcacacatgggttctacatcgagagaataagggttttcaacaagtaataaagcccatctgatgaacttcccattgtcttgcagccgcaacagcaagaagaaagcgtactgttgtcatcttagcaactggtgcaaaagtttctgtaaaatcggagccttcgacttgtcgatttccgagagcaaccaaacgagccttgtgacgttctagtgtgccgtcggaattgtatttgagtttatagacccacttgctgccaatagctttcttccctggaggtaaggtagtgatatcccaagtatggttttcttcaagagcagtaatttctaaacccatagcagcacaccattctttgatctgagaagcttggtgatagctcgttggttccgtgtcggaagtaatagctaccataaaaactcgatgcaatcccgaaaatttttcgtcagaaatcgatatgggaatagagtcaagtatcttaccgcagaccgttttagagaggctaggatcagtgaaagtggcagaagaagcagtagagggtgtattattagtaagtgatggagctgtagcatgatgagcaacaaaatcttttaaaagaacagatggtaatttttgacgatgaccttttccaagaagttccggtaaaccaggcgaagcttccggtgaggaaagaggtgataacgagggagatgagcttggaggaagaggcgaactaggtgacgatggcgaaccaggattagagttcgatgatggtgtcaataccataggatgcgagagtgataacggagacgtgggtgttgtcacgatcacaggaggtgacgtggtagtcaaagtaggtattgtagtaggtgatgaaagatcaaccgttggtgagatagaaatatcagcttgcggttggagccaatcatcatcgtgaaaaatcgtagagggaggaaacatagacggtgagaagggaattgagcttgattctatagtaccatacgggaagacagtttcttgaaacacaacatcacgactcacaaagaatttgttcttctctaagtcataaaggcgccaacctttcttaccataggggtagccaacaaagacgcatcgtctacttctttcactgaatttatccttgtcacgagctctataatgagcgtagcacagacaaccaaacgttcgcaaagctgaataagaaggtcgagacccaaacaatacttcatatggagattttccatggagaattttggtgggtgtgcgatttatgagatgaatagcggtaaggatactttctccccgaaatttgcgaggaagatgactttgaaaaagacacgtgcgggcgacatttaaaatgtgtcgatgcttacgctcgacgcgtccgttttgttgccgtgtatctacacatgaagtttgatgaataataccttgttcttgaaaaaatgatttgagacacatgaattcggttccattatcgctgtggaccgtcttgatagatttgcaaaattgacgttcactcatggcacaaaaatttcgaattaatcgagatacttctgatttttcagccatgagaaatgtccagacagatcgcgagaagtcgtcaactatagtgagaaagtaaacagatccacacgaagccggtgtgcggtaaggtccccaaacatcgcaatgaattagttcaaaacaaactgtagttttattaagacttggagaaaaaacttcacgtgcttgtttagcacgataacaaatgtcacaacttttgatgatctctaaatcactactagaagaagcaaactctggaaatgaaagcaaaacaccggtagatggatgtcctaatctgtgatgccacaatgtcgccgatgaggattccttgaaacctttgttaacacgagcagcaagaacacccgtaaaataatacaccccctctcgctcttcacccgcaccaatcaaagttctcgtaaaacggtcctgcaagaaacaaagagtatcagtaaagattgcaacacatccagtatgctttagtaatttagcaacagatattaatgtgcaattaaaatctggcacaaatagcacatctggaagaacatatgcattatgtaaggcaagcgttccacgttttgtggcacgagaggcagtcccgtcaggcttagtgacaggcgaaggaatgatatcttccacatttgtgagtaatgtgatatcaccggtcatatggtgtgaagcacctgtgtcaatgataacgtaagtagtaaatgttttaccagacaacttttgtgaagatgtggctggattttgagcttgaagtagagagatcaattgattaatctggtccgcatttgaaggagttgatgtaggaggtggatgtgtactagcagcgttagcacgtcctttaccacgagaaccagaagatgaagaacgtccgccacgattgttgttaccacgaccattgttcccacgaccggaagtgcctcgtccagcagagccattagaaccattctgttctaaccaccagtctggataaccatgaaccaaaaaacactctgtaatgtcatgtccttgacgatggtagtgagtacaagtcaaagaggagcgatcacgaaatcgaggtgcagagactgccgcaacttgaggtgtaggcggaagcggtgtggcttgaactgtaaacccaacagcctctgttttgatgtcatcttttatgcgagaagcattgagattctgttcttcatgaatcacacgcgagtacacttgattaagagccggtagaggatcttgaactgtaattgtagagcgaataggcctgaagcgttcatccaaattgagcaggaattgatgaaccttgtcgtcttcacgttctttggcgatgtcgggagcagcttcacacgtgcaagtccgactggtcttgtaattttgcagttcttcccaaagcttggttagtctcccgtaataaacaagaacagattgaccatcttgcttacacgccaaaatttcatctttcaacaattgtttacgaacaccgtttccattggagaatcgttgtttgagactatcccaaagatcttttgcatcagacacgaaggcaaccgttgaacggatggttggatcaattgatgttctaatccaacctataatcatagaatttgcagctttccatgatgacaaggcaggttctgttgttggctttggtatcgtaccatcaaggaacccgagtttttgttttgcctgaagagaattcatgagttcttcagcccattcagagtaattgtcttcttttaatataacagaggaaatcaaagcaccgggattgtcagatgcagtgataccataaggagatggagtagtcacggggacgatagctccggacatagtgatgacaaagtagaagagagaaacgatgcagtcaaaatatttgatttaaagcaaaacttgctctgataccatgaaataagtcgtaaagtgttggtttattcattcacacatgggttctatttatacatcgagagaataagggtttacaacaagtaataaagcccattacggtccattaattataagtgcaacaaaatgaagaatttttctaccttgttatgtagaacagaagcttcctggtcaaaaaagagccaagcctcatctggagctatctgtgcatcaattgaatcattcagtcccataacaaccaaatttcaaaccagatttttatatatcatacaagaagcaatatagccatgcagcaaacaattacctttggagataaggtagctttagaatcatcttggggagttgcttttgattttgcatgtggagggaagttcacagataagaagttcagaacctgcaaagtttgtgaaaagacccaaatccgatacacggagctggtcaacatgttgacttgtgggtccggcccaaaacatatttaatttcaaaaccgccaactaacaatgcaaaacaaactcttggcttgacaaacctgcaaaagagagagagggatgagcaatctaagattactcagtgaaggtaagctttagggctcacgaattctccatacacaaacatatctagaatcacaaatgggactacttcccataaccgcattatggcgggtctgatacaacgtggcaacacacgcttatcttcgtgctacggatcacatgtacctcttgcacatgttcctgacactattcactcgtgctacggatcacatcatgcctcttgcacttgttcctagcacttcacactcgtcggctcgtcggctcgtcagccatcctgatctatctgcaaacccgcatcaatagaccaccacataactacaaggattccttcttataggattctctgcggctcaccgcatctttgtgccattgacacattctctcatcacataacaattattttatcacaaaatagcatgtatttctcaatatcacatcatccacaaacacatttattttctattccatttaatactagtttgtttcctataataatatatttataaaatatatatatacataaccacgcaaatacggttactcatatgtatataacgctcaggtatactcggcttatctctagactaagtaattaactaaacatattcatatacgaaagaagatacgatctcgtcctcacccaagccaaatagatttttcccggttaaaaactagcaacaacggaaaccggttgacacatttctccaactgcaacggttgcattatccgacaaagattaatccagtaattaatacccatcagtaatattcatgaattatcctaataaacccaaccatctcatatctcagtataatgactaaacgctgacttgatatttttctaatcaaactaatcagctccggttcaagaattaaaccaatccaaactaattattcaataacatcccaatcccacttcacgaccacacaaagtcattctttaccacataactgagtttggcccaaaacaccaaaatcccatatcacaataacgtatacaccttaataaccggtcatgatgttcggttcaataaacaattcaaagcaaccatgacaccacgatttctctccacatgaccagttattacgttacggtttatggactaagttacatgtaggatctctaaggtttaggctggtttactctcttggtttaataaacaacaaaacaacaacaacacgagtgttgagacgaggcaataccttttccgcgatgactctcaatggatttccttggcaaaatggatatgtggtcgccacgttcaagtttacagtggctaggtactcatggttctccaaggaaaacaaatcagcgattagatctagaatccccatggcttgcagcacaagcaatacatcttaaaccaaagctagagacattctagacaagctatagaataataaaactagggtttccttacccttaagagcctcgccgatggacaacgactgctccggtgacagtgtcttacatctccggtgacacatggtagctgtggtggttctccggtgaagttacggtggccttctctctcttctcccatttctctccattttctgatgccgcgatcaccgcctcctctatcacttcccccacgtgagatcacttctcctccacaagattcacggcaacaaaaatactaggacaacggcttagataaattatcggcggcgttaggcttcatgaagaggaagttatacacacatatatgttcacgactacatcatactcaagtctcaacaaaaccctttttctcgcttgctttcgtcacatcatatgggccattaatgggctaaatttgtcttcttctaacaaaccaaaatggcccaattacccatttaagaaagagaatatgacacgtttaggcacttttagactatcttattccttttgagacatttatgagggagatgacactttctccattatttaacttcttttaagacatttttacccctaatttatttaataatttttattttgaaatttaacacaaattaaacactttttctctcttccataattcttacgcacactaaaaaatatatttttctctctctctctctctctctctctctctccttccatgatttgtagtgcctttctctctctacgtctccctaacttctaagcttgatttctcttatcgattatggcggcggctcacgaaaaatcggtggtaccgattctgcaaataaattagagaagtttcttaaacaatttgatctcaattatctcaggaatttgtataatttctatgtccataaggtctcggaggtggaagtctctacaaactgtaaaaaaaaataacaaacaattttttggtgtctataataacaagtctatttaaatatatccattcagacacttttttactgatctatatccaatctatataccacgtccgtaataacaggagattcgattaaccgtgggttgtaaagaaaccagagttccatgtccataaggtcttgaaggtggaggtctctgcaagctgaaagaaaatcatcaaacaattttttggtatccataataacaagtccatttaaatatatccattcagaaacatttctactgatccgtatccattctatatactatgtcaataataacaggagattcgattaaccgtgttttgtaaagaaaccaaagttccatatccataaggttttgaaggtggaggtctctgcaaactgaaaaaaaaaaaaacaaaaatttgttggtgtccataataacgaatccatttaaatatatccattcagaaacctttttagtgatctatatccattctatatagcatatccatgataacaagagattcaattaactggaatctcgatgctacgtacatgaaacgagttgacacatgagagagagcaaaaatcaaatcaagccgccattgttgaagaagaagaagtttcttagaaaactgaatctcaaatttatgtcaaaactaagatttaaattgcaaaataaatcacaatctacaatcaataaaaatgaataaaatattgaactctccaatcaatccataatctcacaacaatccgagaaattctataatatagaaatctcaaattctgcaaaatttgaatacccaatctcctaagtgaaagaaaaacttcataccatcaaaaataccaaaataaagaaacacgtgattgaacccaacaaataattataaggagataactttttttttgagaaccagacgcaactaaagttgcgtacataaagagagatagagagagagagggagagggagggagagagagagagagagagagagagagagagagagagagagagagagagagagagagagagagagagagagagagagagagagagagagagagagagagagagagagagagagagagagagagagagagagagagagagagagagagagagagagagagaacgtgggttaagagagtattttagttaagaggtcattttagtaaaaaatcatagagaaagtgtctactcatttggaagtgcctaaacacggaaatagtttttaaaaagtgtctaagagtgtaatattctcttgaagaaattggggatgttacagtttgttttcacttatagaccatattaatataatcttattatgtccagatgacttttactgaaagaccaggtataagaattaatatatcaccttcagaaaataggaatgagagaagttctggtgcctgcaaatgattcaaacgaaggtcattaagatccagaaaataaaataagatgatgatctacgttgggggttacagtgaatacctttattacattatccacttggaacttcttagaagcaatcgcaggcccgacatctaacatacgcactgtaaatgctaatgatactcctgtttctgggacaccatcctagtataataattgtcatccttcatctctatttgtcctcactagttgtctgctagtgttcaccaaaatcatgaggcataagttatgtgcaaaacttaaggtaaaacacaagcaattgtaaagaatgtcaaagctgttgcattcaagaagtacggtataaaagatatcaaataagttgaatataattcgtaagtcaactaatataatcacagactcactaatgagtaaacatctacacacaatcatagtactttagaacaaaaagacatacggatgtagcgaataaatttaaggggggcaatgttgaaattgttcaaagagttggagggtcaaaactgaaaatagcaaggggcataactgaaattgtttaagatttgcattaaaattcaaaaatttatctgtggcatctgcacccgtattatacaacgtcaatccgccactatatacaactaatttaccaaagttccagccatatttaaaactaaaaagctgttaataaaaagagagacagaggagagtcgtctacaattacttgacacagatttcgttccttccttattgttttttcttgagctataaagatcagtctacagttcctttagatgccaagtcagagaatgttagatcaaaacttgaagatctattagggaagaagtaagaatatgtgaatagacataaagctggtaatatatatatatatatatatatatatatatataagtgcagcttttaaggttccttgaaactagcttatgaatctttaaattccttgaaactagcttatgaatccactacaactcaacaatggaatctacactaaacaaaaccactacaactcaatattggaatctacactaaaaattcaaacttttttacaacttaaaactcaaacataggacacaaaagaatacgttacaaagcagaaagattcagaaactcaaattcatcttatcaatatgttgcagtgatggtgtaatcgaagtctttctgagttttttgttttgaatattctaaaaggaaaacactactttagcttctgggatctgattgtagttcttatattcaatcatacacaagacatctagtcatatttgactccaaaaatgctaaccaagcttctttttgtttctcaaagctttgatggtttagccaaagtccctatgagtttattgttttggatcttctaacaggaaaacactactttagctttcaagatctggttgcggttccagttcttatactcaatcatacacacgacatctagtcatatttgaatccaaaaacactaaccaaacttcttatttcttctca

SEQ ID NO: 1328 - DNA, 112406 bp, Arabidopsis thaliana
aagctttgatggtgtagcagaagtttgtatgagcttttggttttggatcttctaaaaaggaaacactactttagcttccctgatcaggttacggttgtagttcttatactcaattataaaaacgacatcttatcatatttgaatttaaaatactaatcaagcttcttttgcttatcaaaacttagatgatgtatctgaagtccctatgagtatatggttttggatcttttaacacggaaacactactttagcttcaaggatctagttacgcttctagttcttatactcaatcatatataagacatctagtaatatttatctgaaatatgcgaaccaatcttcttcttgcttctcaaagctttaacggtatgcagaagttcctaagaattcttggttttggatcttataactacgaaacagtactttagctttcaggacctggttacggttctagttcttcactcaatcatacacaagacatctattcagatttgaataaaaaaacgctaaccaaaatccttcttacttctcaaagctttgatagtgtagtcgaagtctttatgagtttttggttttggatcttctaacaggaaaacactactttcgcttatgaatcaggttaaggttctagttcttatactcaatcatacacacgacatatagtcatatttgactccaaaaacactaacaaaacttcttcttgcttctcaaagcattaatggtgtagtcgaagtccttatgagttttaggttttgaatcttgtaaaaggaaacattactttagcttctgggattatgttgtagttctagttcttatactaaatcatacacatgacatctactcctatttgactccaaaaacgctaaccaatcttcttctttcttctcaaagctttgatggtgtagccaaattccccatgagtttttcgttttagatcttttaacaaggaaacaatactttaggttacaagatcaggatgtcgttctagttcttatacttaatcatacacatgacatctagtcatatttgactccgaaaacgctaaccaagcttcttcttgcttctcaaagctataatggtgtttctgaagttcctatgagtgtttggttttagatcttcgaatagggaaatacaatttttgcttacgggataaggttatggttctagttcttatactcaatcatacactcgatatctagtcatatttgaatccaaaaactctaaccaagcttcttctttattctccaagcattgatggtataggcaaagtctgtatgactatttggttttgaatcttctaaatgggaaacaccactttagctttcgagttttgattggagttctagttcttacaatcaattatacacaagacatctagtcatatttgctgcaaatactgatgcgtgttttatttccttaaggacgacacgacaactgcaagtgcacaacaaatcggttgtagtactttaggatcgattccacaaagagagaactggttctaagaagtccgttaaaagagagtaaagctaggaccaaataataaaagagggggtttgttgcaagcaactaagcaatcaaattaagaaagcaaagtaaataaacgaaggacaacaagggagaaagtgttaggtctttagtggttctccaaatatcatggttctacaataaagggttagattcaagttcaagtgataacatggttaggtttgtttacttccaaattttcggacatatgaaactcattcaagttcgactaaccctatggtgtataggccgagagccaactaatctccttatacgttgttactcaactaaccctatggtgtatatgccaagagcatgtaacgacgcatagattgacgcattaagttcaagttcgattctattccataaagccctataactcaactatctcaagttataacacaatattcattcgtgagttaggttcaagcaagttacaagagattctgccaagtataaaacgcctaagatcatgtattcatggcttgtcaaaaaaacatgcactaagatcaaattcaactagaaagaacagtgtaaacaatcaaacaaaaccatagaaaccgccaacctaaaccagatccaacatctccatgtgatgtgactattgtcgggcaagaccctaaacttgaaccaatggagcagcttgtacccgaggagcagcttgtagccgaagaagctttgacgcaaccaactggtcctatgactcgttcgaagactagaattctcaaccaagccgttagcggattgcttaacaacttaggcaagcatccaaacaaagtcatccaaaccgtttggaactcaatagcagcccaagaagattggtaatgggttaagtgttacttgggtactctttttccttctaaggttttgtcccattgagttttccttagtagttttttaatgaggcttgattaaaacttccaaaatccccattatcaatctagcccaagcccaatatgaggaacacgaatttggaaggctaatatggttcaaattaccctaaaaactactctctcaaataagagatcaattgcagtatttaaggatcgatttccacaaagttcttttgttcaaacaatgagttgaatgtcgagattaagctagcaggtgatgatcgaaataaaatgagaacaaagtaaatagacagcaaattgatagtattgtaaacgattaaataaagagctaggaacagggaattctcaggatcttattggttagtagatctaatgaaagctaggttgttatcgaaccattcctaaactcaaactctaactatggaataaccagtggtgttcctcgaaactctctatgtttatagctaagaataactggagaagccgagaaatctttaacctaaacatgtattctaaacgagtttaattgttaaccttagtagataagccgattcttattacacacctataaaccaggctcatcaaataatagatccaactacagatacctatggtgggcatatctattgtgtggattcaagatctagttaattactctaaatctagcattaataacaatcaaagatgaagaattctatagataacctaacatgggggcgatctactaaaccatatgaatccctaatgagaaaccctattcctaacaagaaaactactcagacatattgattgaagcaaacaacatatttgatatagaaagcataaacacagctaagaagataagagttagaaaggatctcttcactgtattgaaaattgaatgaatctttgaagaacatgggatgaatagcttatagctctgaaaatgagttctgcaaagaacttgataaaagaaaacttaggtctaaaaacaaaaagactcaaaatcttatacctaaaacatagataaaatcaatgaaaatagggatatatcaaaggcgaagggtgggtttatgttcaaactttcatttatgatttcgtcatttccgagttgtcttggagcttgttccaagactaaatcttccccttctattattctctacttaaactcttgtatttcctctttgtatctcatctatcttctcaataaaaaaacctttttagttagatcaatctcttattcttctctttggtgtgtaatatccaacgacgagtttaagatcggtaaatcaaaggcctttccacaacttttgtgtgaccatttgtgagattcgaaactcacacaatagaatttgaattttgagggttcttccaaagaaaccgtctttgcgagaatctcaaagaaaaacatagtttttggataaccacgaatggtgttcttgatattattaataacaaacgatgatttgatcgtataattgtttagaaaagtaatgagaaaagtgtttagccttcaaaatcagagctttctggttgtccgaagttgagagcgttttttttgtgtcccctttatgcgaagtcgttgaggcgctttatataggattcttaatccgcctttatgacgatattctcagaagatttccatttatctttaagtcgcctgcagaggatagtcatcttaaggatagtttccttattcttcttgggcttgggaaaacttctcgattcgacaatgtcctttaagattctccaatatcatttccacgatttcagaaaatggtccggtttccccggaaatactacttcggttatcatcagatttccacaagtcttttccttgggcaatcttcagggctcggtagacgtttataggagtctttgggtcaaactacttttcggctaggggaatgtcggaagatgccgctgactatctcccaaagcggtacagataattctagaggtgttctcgaacttggctcgagatgtgttacctagactaacaaccgatccaactatgaatgttcaaggcgatctttctgaactcccgaagtgttccttcgtccggcttgggattcgtttccagaattaacactcgagccgactaattgtttgtctcaattgtaacctctagcgcttcattttccaaaacggtcaaacttcctatgcgtgcaaccgcttgttttcttgagaagcggatacgtttttgcttatacacgaggttcacgcggatacgacgcgttttaccgaggtgacgcactcccgatgcgacctacttagccttcacggacccaacgcgccttgaaaattctataaatatcgagccaagccctcgaaagaatcactttcaaagtttatgacgaaaaaactaaagttcgctctcttctctctgatcttgatttctttattttctctctttgcccgtcgaagctccgccgtgttttaggtaggtttgattattccggttagaaaatatttttcttccgatccttatctcgtcacatacttccgagtcagtaatgagcctttaagactcgagtgattcagcacatcccgacgaccttctccctatctgcaaaagaaaaatggtctggagttcacccaatgacgccgagccgaacatttcgaggcatgaaagtgacgcggcgtcatgaggagccaacccctttcgtggctcggggggataccaccacatacatggcttgggaactagatcttcctaaggaaaccgagccatctctcgttcgaaggagtcgcgccccagctacgaatgaagccgggacattaaactggcaggatatgcccgaaccttcgctactctaggtaaaagttgaagagcaccttttctttgggccgaacaaaatggaagccattttctgagcagcaagaagaaggagaaaaaatggacgaaaagggtgatacccgacccacctagttcgaccttctatattgagcaatctctccgagatctggcggctcggttcaacttaagtgaaggcgtcactctttgtcttccaacgccaagcaaaagagccgacaatcctcctgagggcttcttaaccttatacgaggggttcttctatttctgtttcctctggttccctatcccgaggttgattttagagtacgtgacatcgtatcaaatcacactcacctagcttactacgcgtgccctgatgcatctcattgagattttggtgtgaagttacgagagagaaaccgatctcatgctcacgcatcttaggaactgcttggagatccgccgaatccagaagtcaacggtaaacagatattatacctctcctgcgaaagacaggaagattatctggggattcccgaggaagaatgagtcgtacactaactacttcttctttgtggcccttgatgatgctactattcccgaagatctccttctttgtggtccacttcttctttgtgttgcctactcgtgaccgctccaaggcttcaaggaaacgttagaggatctccgaacccaaggcaaagaacaaaaagaagaagaagaagcaggcggatcaagaggcgagtcggaagatggatgagctgatttttacagacaaagccgcttcggcaaatctcatcggcgcttgtgcaagccttcttcttcctcctccagatactttgctggagtttgagctatacgctgatacggcgtcacacttccttagggtatgttcaactttcattactctggagccaaattatatgtatgattcttttgttttcgctattttgtcaggtctttaactcgatgaataggatggtgcaatcccatgattccgccttttaaggcaacatgggggcatcaataagctggtcgaggcccaggagagattagtcgccgccgaacgcgctcgggacgaggcaatttccaaggctgccgaggcgaagcttgtgaaagagaagaccaaggaaaaagccattgttaataaagataactctgtcaaactagctcaaaacaaccgtgtaatgaacaaccgttaaacttcgagattgaccactacaaacgcatgcttgctaaggcgataggactccgagacagtgaggtggctcgggtgactcagactgcgaggtaggaaacttcggcagtcttcaccacaaggcttaaaactgccgaagagaagatgtcactcctcgagaatgcaagcgaccggttcatttatttatcccaggcgagggccaatgacaagctgatcaaggcgctcaatagcggggggtccatagatcgcttgaaagcctttcgtacgaggtttgtgttaccgaactgtccggctcccatctgcgaggcgaagaggcgcatcttgtggaagagcatgattcgtgacccgaggcagaacttctttttcctttggtttaatatatataaagacttgtgcttggatgctttatccgtatatttttgtagacttatgcctggatgactttatccatttctctagttaaatgaattgtcttcgaatcaaaatcgttggtggtttgtttgaaccatttttttgaatttagtgaaaagtatttcaatctgatcggttgcgacatgacctgattcaatcgtctaccagcgtttctggaaacgagttcggacactgggttatgcataaccgggtatcagaagatagaatatgtagcgtgctcaagaaaaatgtccgagaagattcttatattgtatgcttatatagcgcgctgtaattgaggcagtgtaaataaacctttgaatatgaaagagtcgtcgcccgtagtaacatttcaaagtaaaaatcatcaagttttgagcaaaagcaatgaagttcaagtttaaaccgaagcgaaaatttaaaattgaagtaggagtatggatatacggatccactccccccccctttttatcgggaggggggggatagctgaactacgtacccttttcagggatcaagccacctcgtagttcaagtttctgcgtacccttagatctagttatagtatttccttaggtgcatggcattccaagatctttaaattgctttgccgataaagttggcgatctcgacaacaccagttggatgattttagagaccagatctggtccttcccagtttgccccgagctttatgagtcgttgcgttctgatagttctgtatcaattaccgaaccaaagctggatctcttctttcatcaattagatctaatccatcgagcattctctaagtattgtcttgctcatgcttaggagataggcgttggcgcaagctaagcacttccctctcagccgggattatacattacgtgtcgtaaactagtgtgaatagagtttctcctctggcgcaacgaggcgttgttctgtgcgaccagaacactccttcaagttcctcggcccatctgcccttttggagtcgaggcgcttttgagactgtcgagaatcttcttattagggctttggcctggccgtttccttgagggccttgaggcgtggttttgttgagccaaattccccacttatcgcagaatccttggaatcaagctgatatcaattgtgatccattgtcagttacgatttcataggggatcccatggcgacacatgatatttttccagacaaagttttcaacttgcgcgtccttgatgctagcgtaggattccgcctcgatccacttagagaagtagccagttagaacgaggaccaattttttctgcttcgagttatgcatagtaccgatgatatccacggaccagagcatgaagggatattgtgaggcgatggacgataggagctcggccggctggtgaattgttaaggcgagtctttggcattttctcgcagcccttggagaagctttcgcaatctttaatcattgttggccagaagtacctgtggcgttttattttgatggccagggcttttctcctggaatgatttccacgagccgccgtgcacttcttttataaccttgtgagcctctgctttctctacacaggtcatcagtggtccggataagcgctacttgaacagttttccttcgactaagatgaaacgtgcagcttgggctttcaggttctacacttgaatttttggaccatattgttacaaatataatagtgggtataataacaattttgtaacgaaaatagatttgctacggaaaaacatcaaaataaaatatgtaactatgttcttatcgcaaaatattaaggtgtgacaaacggtaagaaatttgccacaacgttgccacaaaaaatcttgttataaagacttaaaaaagaagacaaaactctcatggtaaatttgttacaaatagtgtggacatactctgtcactctttattaccacttaccctaaataattgaagtacaatagtaacatttatcttcagaagtttcaaaactaattgctacaaagtagcaacgagtatatagtaggtattcgttacacttagttacacttagttacaaaaatgtaataacaaaactgatttgaaatgcaacaaaaaaacatgtgataaaatattacaaggacgagacaatatatgttaataacaaacttgttacaaattgttacacgacaccctgtaagtaattcttacaaattctcacaagatcattgaagtaaattgcaacagcttattaccttcagactaactgtaattatgtgcaaatctgtaatgatattcttatcacttataacttacaaactgccacaagctctagtagcaattaacaaaaacttgtgtcgacttttttggtgttattagttacaattatctatactttctatatttgttgccactgacaaatgaccaattccgttttaattcattataattggtgtattaattcattttgcattaaaaaaaaaaatgtaaaaataggaattcagaaaggcataattaatatcataaataaaaatagttaattatatcttacacacaagtcatgattaataggatgaaaaacataattaaacaaggataattcagaaagcaaaaaaatcaaggctaatgtcttgtagccttaattaattggatgaaaagtataattaaacaataatcaaaccataaaaagagtagatcacttaaaaaacagcatcacctgcttcatcctcaccatcaagagcctcatcaacatcctcatccacatggatacgtgggtcaatgtcagctccatcttggtcccgattagcatcttcattcttcatgttgttgttagcacggtctggactggtcactgaagcgtcggttccttgtgttcgccgcgttgagccaaagtttggcgcactatttgttatgtattttcatgtactccacaacagatgtcagctactcttgcagggttatgacttggcgttcaagagtgactctaccgaaagcaccagctgctgagttttcaccttgctcgcgtgtactgaatcctccaacaccaaatatccttccatttaggtgctataagcagtagagaaatcaaagaccaaataaacaacttcagtttctaaacaacttcagtttcttaacaacttcaatttcttaaagtgctaaacaactttagaacatataaacaacttcggtttctaaagtttctaataattttggaccaaacaactttagtttctaaacaacttcagtttctaaagtttcttaaagtgctaaacaacttcagtttctaaagtttcttaaagtgctaaacaacttcagtttctaaagcttctaataagtttggaccaaacaacttcagtttctaaacaacttcaatttctaaaatttctaataagttggaccaataagtttggagcaaacaacttcagtttctaaacaacttcaatttctaaacaacttcagtttctaaacaacttcagtttctaaagtcgctaaacagctttagaccatattaataacttcagtttctaaagtactagcttgtaagaaggacaacttcagtttctaaactaaataagtttggaccatataaacaacttcaatttctaaagcacttaattgtaatactataaaatagcatgaggattgaagaattaaactcgttaccttgtagtatatctcgtctttgtcaagacgagtgaggcctgtggaattggtgctatcatcagcagaaggacctgatgagtttctagagatctcgatctcgtcaagctgtctctgaatttcttcatcaaaggcctttgccttctcatccacatatgtgctatcaactttacgatgagtctccctaaggatgtggagcatcaaaaggctcaacaccttctttttgttgctgtagaaaacatgtacaacacattaaggacacgtttacttattaagaaaataacaaaaatgtaataaatttgaattcacttacaattatatttcagagttgttcataagatctagcacctgttgtgtgtcgatgtggcccaaacccgtcacggtcagagagtcgattggcagaggctgtctttctcttcttcttagcttcatcagtgctccaatactccaacatagactgccatgtgtcctcacttatccaatcaggtttattcctagaagatttagctttagagatcatgtctctaaggcgggcatcaactacatgataccagaggtgatacacatcattcaaatgagttggatttcaatagaaagattgatgcaaaaggagaacaaacaatttaggttacaaattaaaacgataaagtaagttatatgaagtatttggtaaaagatatcaaacttacaatgaagtctccccgccattggagtatagcatgatggggaacaaatgatatgttgaaccatggaccattaaagtgtcttcttattgcagctacaattgcacgcctgatgcgtgttttatttcaccttagacttttacctgaaagaccacgtacacaactactgcatgcacattatatcaaggtagtactttaggatcaaatccacaaggagagaagtagttcagagaaatcctttagaagagagtgaagctaggaccaaataataagagaatgggttgttgtatgcagtaaataggcaaaataaaagacaagttactaaagagataataagcaataagagagcagcgttaagtttttgggagtttctccggatatcatggttcaaaataaaggtatagattctaattcaggtgataacatggttaggtttctttacttccaaattcttggacatacaatactcattcaagaccagctagccctaacggttagtagtcgaaagtcggctaatctcactatacctcgccattcagttgcccacacggctagaaggttctaacatggtaacgaggtacagatcaaagcattaagttcaggttcggttatagtccataagttcctatcactcggtggttagcaacggctatagctccttattcagttgagttagttcaagcaattatacgaaattctgccaaatataaagtacctaagatcatgttctaggtgacgtttcggacatacatgcattaagattaaactcagctagaaagaacagtgtaaacgatcaaacaaaaccatagaaaccgccaacctaaatcagatctaaggtccccatgaattcccctttgaaaccccttcaaacccaactagagatctactcgctcatgacaagggagtgttggtgtcggatcccgcaccatgggctcgggaccggtcaaagattgccacgtaagtaggagaggcccaaaaagggaaaggcctacgggcttccttgagcaaaagtacaagtggagtgatcgatccgcgaggtgaacaagacatcgaggtcaaagctgcccggattggagagtcaaatgggccggaagataaagcctaggaagttcggagtcaattcaaatacgaacctttgaatagttaattcaaagactgacacggatacatttaagatagaataattgtgtgtaaatgagaattaaatgtattctttgagtataaattatgggtaggaccatgcaaagacacacgcatttttgtgcaaacttactatacacattttcttacaaaactcatagttttctctataattattagtccattttctagtacatttgtccttaagaataatccttctcactaaataaataaatacttgagtgtgtaaatccgacatctacagggagcgaaacaaaagttgggttgagtaaacaataataaaaagataaataagacttaaaaagggtttagagattacttctttgaatgtagagcacaagaggcaaagctccaccttaaagaatcttgaacaaaacgaaagagaaaaagagagagatggtgatcttcgagcttaaggggtgcagcggcgagttggcagctctcgaggacggctaggcttcgcttgtgatgaaggcacacctaggattagggcttagaacaagtatttatacttgatggccaagaatttggtctaggggtaagaacgtcaatccgttgggtgagttagtgatcgggccgagtcgtgggcttcagggaaggagccaaatgccggtgcaacaaagagggaaggactttggcgtgacctaatggtcggtggcaagcttctcgtggctgccccggttcaagtctccttggccggatgctttttggatttattatttccaaacgacctcttcttgacatgtcttcattcttcaggtcatatcttctgaacgacttcatggattgcttcgattcgactttgacgttaatcttgaacattctagctttgcatgcatattgaaatgtctcgttgccatgatggggaagacctcgaccggatgctaaacttctgaagtattggaattcatcgccttttgatacctttagctccaaaactcttaagaccttcttggcacctagaatacgtgtttctcctcttcttggctctagaatgccaccaaatgctctctgaaacataagaaatcaatagctaaaacgggttaaaagccgtgttatcaattttgaggaccattgtcgataccaaacctcaaatctagaaaattaacaaattagacacacaattaggttttgtttcacaaatagatgttggaacaatatactaattagaaacaattcagttaaatgtagataattttgtttaaggttaaaaaataatcaagttttaatttactcacgttttctgttttactcaagtaaatgtaaaccttttttttttttttttttttttttttttttttttttttactgcaaactgaattttattcatggaagtagatcattacaaagaagtttttgaagccacattggctgaataccagaatcagactgaaaaacacaagaggaatacaatggagaagccaaatgatgtgcaaggatattacactgtcggcttgtgaaagtaaaaactaatgatgagaatttcgaggcccaaaaatcaatatcatggagcagattagcaatatcactacgagatcttctgccattgattgtgttaataagcacctcacagtcaccttcaaaatgaacgcgcctataacctcaaatccaggtttgttgcattgccacaaggagagcctttgtttccgcctcaaggggtgtgttaacatgctctaaagtcgaagatccccaagctttagcacttccttcatggtctctgatgacccatcctcccgagctggcggtgttgttaatgtgaaagcttgcatcaaaattgattttaacatatgaagaagtcggttttgtccaacgtttcggtgaagggtgtgatggagtgacaacttgagttgatcgggacgatcgcctagttcgagtccattctttcacttcttccgttgattgagaaacaagcttaaggggacattgactatatttttcaaacacaaacttatttctcgccttccaaattctccaaatgatccaaaagggtattagtcgttcttcctcggataggtttttgtttgagaaattgtccacaaggaaggttatgctttcttctgaatcattcgtaaaagaatgattcgcaagtaacagagcatttaacagacgccatattctgtgagcataaggacaggtaaacaaagcatgatttattgattcttcttcattgggcatcgcggacagtttgggtcaatgctcatgcctcgtgtgattaaacgtaaacaagttggtagagcctttgaaatagttctccagagcatatatttgatctttggaataataggaagtttccatattttatttttcagctctatcgatccatatggtgtggccaccttgggtttagtatttgtgggatcatgcatgagaagccaataacctgatcgtacggtataatcactagatggagtgtaattccaaaccaatctatcaggaatcatttggcgagtgaggtaggtttccagaaggtggtttttatcgaggggacttattagacgagtgattgcatcctctttccaatagcgacacataccccttgttgagatgaaatccgctaaggttccatttgtataaggatcattcaagataagtggtctaggcgggtgcaacgcaacaacattgtcttgttgtaagcgaatagatttgccatcaccaactaaaaaccggcttcctttctttatgacgtctcttccagcaagtagagaagaccacccataagattgatatcttcgctctttagcatacaaaacagaacactccttgaagtatcgtgctttcatcacccgtgcaaagagagagttgggatattgaattatcctccatacttgcttcgcaagtaaggcatcattgaatttagccaagtcacagaatcctaatccaccttctgtttttgcatattgtaaccgcttccaagcaatccaggggattcctctttttttgcattcttctcccaccagaaattcattaggagagtttcaatttcaacaatgatacccaatggtaacttaaaacaggacatggcgtaaactggcatggccattgcaactgatttgagcattatctcttttccagctggtgacaaatgtttcgcactccaactcgacgttcgttttttaactctttcaataatgtaattgaacatttcccccttttttcgaccaaactgttccgggagacccaagtattttccccctccaccatgaatttgaatgcctaaaacgtttttaagacggttctgaatgacaccattaatcttcgagccaaaagtgatcatagatttagctaaatttattttttggcctgaataatattcataaacgtcaaagacatcctttagagcctgacaattacggacatttgcttgacaaaagaagagggaatcatccacaaattgtaaatgtgtaacactttgtacaccatttccaatttgaatccctctaatgtctccatcctttactcttgattttatcagatgacctaaaatatcagcgcaaaggataaataagtacgggaacaacgggtctccctgcctaatcccacgttgaggtaagattgtgccaatgggtatcccatttaccagtaccgaataagagacagaacgaactgtacccattatccagctaatccattgcgcattaaacccgaagagtttcattgttgtctccaagaagttccactccacgcgatcatatgctttactgacatcagtcttcacagccatgtaagattgtgaagttctcttccgtgctttcagagcgtgcatcatttcatgggcaaccatcacattgtcattaactagtctcccggaatgaaagcagcttgggaatcaaatacaatggcatcaaggtgtgattttaaacgaccaacaagacatttggaaatgattttatatagtacgttacacaaagtaatcggttgataatctaatagtgtttgaggattggttatcttcggaatcatacatatattggtatggtttagagagtttcgcatggatgatgtccgaaagtagtgtttaacctcttgaatcacatctgaactaacaatatcgcaacatgacttgtagaaacgagcagtaagaccatcaggtccaggagctttatcatcaccaatttgacatatggcatcaaagatttcagaatccgtaaagtcctttgtaagctcactattgatgtgtggagtgaccgttgatttgaaattggcgaagtcgatggtagaaacagatctgccactactagtaaaaacatttgtaaaaaagcgttgagcatggttgtcaatttcctggtttcctttgaacattcgcccttcttcattgtaaatagaagtgattctattcattgtaaaccttgtttttgtgcacgcatggaagaaacccgtgtttctgtctccctctttcatccaactgtttctgcttttctgttgccaatatttctcctcatcattataagcttttgtgagatctctctgtatctgggggataagaagtcgttcagcacgtaggagactagacattgatctgtccaaagctgtttgtaattgattgattctgatatgtgagttcatgttagacctatgtttcagggtggccattgattgtttgcaggttctcactctatcaagaatagtgctcttttgtcctggtttctctttattccatccaactcttacatggttcttgaagtgggggatctcaatcaatcgtttgtcgaagcgaaatggtctcattgcaggggtacgtgttttttctagatccaggagaagagggcgatggtctgaaccagtgaagtccaaaaattataattctgcaaatggaaaggaagccaatcccgcagttaataaaggctctatccagacaactcttaatcgtgtgtgtgtgcctttcaccaacccaagagaaccggtcacctcttgaacttatatcctctaaatcacaagtagccaccattcttctaaaatctctgaaagtccattcctctcgttgaggtcctcctattttttcagagtttgttaaaatctcattgaaatccccaattaaaatccatgattcattgcgtgtaattgatagattttcaaagtgagtccaaagatggtgtctttcactttgacatggatgtccatacacacaagacaaatagaaattggtattattgatagagatgttttcatcaatgtgtcggtcatactgaaaaagcttggttaaatgaacatcattcttccacaacaaggccaagccaccactatgaccttgagggggctgagtaattacatgtggaaatcctaatacatgtgctatactacttataagttcacacttgtttaaagtttcaataaggaataaaacatcaaacttgcataatttacataacttaactatgcgcgattgagtcagcggcgcaccaaggccctgacagttccaggatccgactctcatggaggcattgggggtatccccccccccccccccgcgcctctgtccattagcggttgagactcaccagatgtagcgaaagagactctcctgtccttcttacgcaaatgtcccaacacagcagattcctctgcagcctctgcttggttgtaaagtgcttcgaaactgactctctttctctttacaaaagcaaagccctgagtcacattgtccgagacttcttcaaggagtccagcctcacgttgttgcagcaatgactcacggagtgtcttagcatgaagatagcgcaacctttcagccgttaactctgtgtcttcaaaggcacttgcaaggtcagatggaacagagtcagagggagaaccttgattaaaagcagttgcagattgtctctggagtcccggaatcaaagtagccatgtccacacttggcaatgaatttgcctctgacatctcttgttcatcatggtcctgatccgggttgttgtcatcatgtccattgtctccattggcagcattgtcatcgtcgaaagttaaagtacactccttagcatcatgtttgagagaaccacatttggtacaaaaattccttaaccgttcaaaacgaaacttgatgatggtgttctcatcagcattgaaacggaagttcctttgaaaacgaagcgggttatctagattccaagccaatttaactctcacaaaacccatttggtatgagttctcatcgaaatccacatccaagacataacccaatctgttacccacagccctagccattgcattgcttaagtaaagtaaggggataccttggatttgaacccagaaagggattatcttcatttcgttttcagtgatgtttggaaaccatctgtggatagacagcatccaatcattgaaagacaccggtccgcgtcgcaagaccaaattcattacttcttcagagcgaaacttgaattgaacttttccagggctaatgattcgtccaacacaggaatcaggaaagccccatacccttggcatatgtccaatcaaagcccgaaggttttgcttacgttgattcatagtagtaacgatcaaagagaagcggttgactgaaaccgcctgtgacacaaattccggtaaaaatgcaattgggtgatcatctatgcccaaatcaaggtcctgaacagattttcgcaggaaatcactcatggtttttcgcagtatgaaagtagaaaggggggattgtgaaagaaagaagaagaggcagtgatcgaagggattatatagagacatccaaggctgtttcggttgacggttaactcccgacaacaagggagaaacataactgccaatcagttttggcagaaggaaaccgccaatcagttttggcagaaggaacccgtcattagagtttctagaaacggaaacacgaaattttatggtcagataactgcctcgccgaggaggaaacaaaaggcgacgttcgccaaaaaaatcgctcttccagagtttgaaatgttctcactcaagtaaacgtaaaccaattaacaaatttagaaactaaaataaataacaaacaatcaatttgcttatgtcatcaacttaaaaaccaaaaacacaattattatcatgatccaaatcagtcaaacaatttcacaagttcaaagattattcaatcagtgaaccaaatcatattttatgttaatcctaataagataaataacaaagcacacaagtaatttttattcatgttctataaaaccaaagacacaataatgatattgatcgatatcaatcatacaatttttcacaagttcagttatactcaaataacacaatcaattttccacatctcatctatataaaaaccaatgatgaaatttataatccatcaccaaattcagttatacaatttgacaagttcttatatttatcaatttgtgaagcaaattctgtcatactcaagttaaaaacaccaagcacacaatcactttgctaatctcttatatatatatatataagagagacattcacacataccacaacgttctagctggtctgtttgcatgaagaaccgacatcaatctccttgcttcttgagctagcaaggcttcaatggacatttgaccaaggttaccccttccacggccacattcatgtcccataaatgcagcccaaattcttcctcttcaaaggtaaccaccaccaattccacggccatatccacggccaccaccacggccatctcctccacaaccgttatcacgtccaccattaccacgaccattagcacgtccaccgaatctagaaccatcgttaagattcatcttgcactagatacatcaaaaaaacaagaatagttagtacggcaaaaagaaagaaaaactgtaaagtcaaaaatctttggttaaactaatgaaaaaatattactgacttttttttacatctagggtttctataaaatatcacaaactcgttaaaaagtcgatattaaaaatctgaggtttcaaaaattatacagcttaaaacaaaaccacacacaagatttatcaggaaaaaagaaagaagatcgaactttaaaatcaaaaagaagaaaaccacgggttaccttgaagttgaagaagtagaaggcttagtaaacgtcggagatggagtgatgacgagagagacagatcgttaatattggatcgagaggttacgagtctgttcgagagagagcaatcgagcgtcagagatggagagaatatgatcgaggacacaaagactgtgatgaagctagaaagtagtagatttgagagagaagcgagtaaatcgccggtgtggggagagagatctcgagagatcgagacacatgcaagatcgccataagagagaagtgagaagagagtaaaatctagttagggtttacaaagaaacgggttgaatcgtttccgcttcctcgagacgaataatattaatgaggcattcgagattattttttaaatttttaaaactttgctacaatattttgtatccaaatatgggtaaacgtaagtagaagtttctaacgggccgacccacatctatctgggccggcccgcaatggacattagttttgatggaccaagacgggccggtccgctaggaccgcaagcaaagaaactatgtccaagcatgtcccggtaagtccgacgagtttgcggactgacccgtggactagttttatatttaaaataaaactataaatacattttacatactaatttaaaatactttataaatagttttgtaaatattaaaaattttaaaattgaatgttttcacatttttacatattttatatattataatttcataattaatgaaaaatatttatgtttgcaaattatttatttattttattaaccatttatatattacatttatatagtccgaggaccgacccgcaaatcatttttattaatacatttatagtcttacaaatgatttagaaatgtttcattaattgatctttcataagataaaaaccataatgatgagagtttaaatacacaacctaaagattaaaatgacattgcaattataattaattaatcagatagaagcctctcctacaagtagagtctttcctctttttctcattcgtcaacacttagtgtaaaacatgactccataacttaaatgcactatttaatttgagcttaaaacataaaccaatgatgaggcccaccctggccggataatctcattcctggttggatcttcattccatcactattactacattattatgttgctactgctacaaaaattctgtcgccgcatctattaattccgccgtacacacttaaactgtcgcaaatggtagctacttattactcagttataaactcgaaaaatggtaaccaagggttcttgccggcgattcaccccagaactcgatttgcatcttattcttcttctccgtcgggaacaaaacaatgtcagctagtcagagctccaaatctgatgccaacaacaacaagatgagtttcgagcagggaagttatggacattcgagctggggtctgtgagagtcgaaacttgcacaatcgaaattgtatttagagtttcttcaaagaacagatctttgcaagactctcaaagaacaacagaattatttgattaccgcggacggtgttctagatattattgttgaaaagatgatgatttgatcgtacaagtgttttgagaaatagaaaataagtgttttgccttcaaagctagagcgtattgatagccttaagttgagagcggttttgtgtgtgtccttctctgggtttcttgaggcgctttatataagattttgatagaccgccctcgcgatattctcggaagattttcatttatctgtaagtcggcaacagaggatctttgctaaatggagattttccttattcttggggggcttcgagaaaacttccggatttgatgatatcctccaagattattcattatcatctcttaagaatttcatttgaagttccgaaggaaaaaattcgaggtttgctttctctcctctgatcttgatttcctttatattcttttttttccggcgaagctccgtcgtctcttaggtttgttttgattttcccagttagaaatttatgttttcggctgtcgtctcgtcaaaactcctgcgccgatcatgagtctctctgattctactgactccatgcaccgagatgacctcccttcgatccataaaaggagaatggtttggagctcttctgaagatgccgagccgagttcaagtcaccacggtgatgcggcttcgtcgtctaatgcgcttgaagagccgagccctttcatggcccgggaagacactgttgctgatatagctcgggaactcgatcatctagaggatcacaagccatctcttgttcgaaggcttcatgttccaattgctgacgagtctggaacgtccaattgatgggatgtgcccgaacctttgttccctcaggtgaaggtcgaggatgatcttttcttcaggccgaacgaggccgagggcatctttcaggtggccgagcggattgcgatgtgcaaagctgacaaagggaaaaagaaaaagaaaaagaaaaagaaacaggttatgcccgacccgcctggttcaactctttgcattgagcagtcgcttcgggatctggcttctcggtttgactttggcgaagatgttatcctgcgtcttccgaccccgagcgaaagagtcgataaccctccggagggtttcttcgccctcaacgagaggtttttctaccattgtttcctctggttcccgatcccgaggttgattttggaatacgtgacttcctaccagatcgcgctttcccagatcactactcgttccctaaggcatctcgtcgggattatagtgaggaactacgagacgtggaatgagatcacgctcacacacttgagaaactatttggagatttgccgagttcccaagtccgtggtggatagatactacatttccccggcaaaggatcagaaaatcatctaggggtttcctagcaaggacgagaaggtggctctcgacgatgtcagcgttccttaagatttaatcgggaagattttgacgagatggggcattcttggtagttagacattggcgtctaacttgtttaagtgtttctttttgcagctccttccattcgatttctcgagccgtgtcccgacgacatcgtttctattcacggagagctatctgctcggcggtgcaattggctggatcacttttccagggttagagtcgaacgagccctaaagttaagctgcgttgtatcttgcacttctagttcggagtcttcggatcatcaattttctcacttcgtcgagatgcagtcaaccaaagttactctaagggaggtttccgcgaagaagaaagaagataaggagaggcatttggcagaggagaagcgtctcgccgaggcgggagtgatctcaccgcgggctcccccagacgcgactcaagacagggaagctattcccaaggtgacagtgccaactgcgtggggtctacgggttgatgagttttgtgatggtggtttgcaggcaattgacaagagcatgatcctaaagaaaatgtgagttctcgtgttttcaaacctcatctcctaataaagatttttgttttccttgaggacaagcgaagatctaagtcggggggagttgatatgttgcgattttggtgtcttaggtcccttagttttgagtcgtttgtcgtgtcatagtccgtcttttgtgtctattcggttgtgtcttgagtcatttgcaggttttaggtgtttaagggggacacagatgctttcgagacttatcgagctcatttggaccagaaacgatagcaggagtcgagaaaccggagtcaggaacattggatcgatcaatcctatcactagaacgatcgatccagtgttcatcatcgaagataaatcatctgcgaggatgggatcgatcgatcccaactctcaaacgttgaagaatctcacccgccagctcgggatcgatcgatcccaggtggggatcggtcgctccacctctggatcagtcgatccaccactggatctgtcgatccagcttcctgacgactggtttcggttttccttaacaagactgattttctattttctgtaattgggtataaaaaccccagaatcctaattttatttctacgttttcttttacgcttcttttttgcaagttttggagagctttcctttgtaagcacatttgggattagagattcattccttcttggcaatttggagaagatttctgaacctttatctcatttattcaatttgaattaagttttctttcatatctctttgtgttgttcatttttctatgagtgagtagtctcttaattttgtgttagggttctaagtaggggattcaatgaattgatggtttgattgttgtttggagttcttaatctttaacttctttgattcatatgttcttaatgttagaataggattgatcaccctgttttagaacttaggtttttctatgcatcaaaaatgttcgaaagaatgcttgaaccaatgtgaattgagcaatgtatttctagccagcgagagttgatgttagaatgcattgtgaacctaatgaacctaattctaatgcgaatttgactacaaaattacaaatgaaagtttagtagttaagcagtcaaatttagtgattaatatcttgagagagaattagtctaaacttgtgttcagttcaagaacggttctttatgctgaattacttgtttattatttccattaatcattgaattctaaaataccctattgcccaatgctttttatcatgtaaatcaaatcgtttcttttcttgcattttaatttacaatctgaaaaccaaacaaacaacctcttcgctttagctaagaacgagtcttggaaaattcttagagtatctttggtcctttggttcgacctcaaatattctacttaacggttagttattttgggtaattactcgatcaatcagacaccgtgaatgaagaagatcagagctccttcctgagcatcgcgctttttgtcattcacatagtaaatcctaacagaagccataaactgccgcactagctcaggatacaaatcgtactgcctaaaaccaatggttcccacacctatgtcatctagcaatcctaaaatagatttttctatctgcaaacgttacatcaaactgaaatccgtaacccgagttggcgaaatttccacattccaggcattgtaaaacatagtatcataatcatccaaatctggagaaaaaggtgattgatatagtcaccttttgtgaattctctgttgatatccttatcccaaactctttgggaagcaatcctctcattaggcaattttggtcatggaaatagaaaaataggaggttgaggagctgcagccgactattccggtggtggaagacgagcgccggctgtggtggagattgcgttacctaaggatttaggattagtttctagtctaaagcatttttatttactgttactgatattcatttccgtattttctttggtgttttcaggtgtatgacccgtagcaaaggctcatcacatctagtacactagatatcggaaggtttgaaagagagaacaagaaaaagaaacagttagcggttcagagagaagctgagatggctaatgttgttgatgatgatggactccaatttgaaggagaacatcatggagtgtttcaggatccactacctcctaatggaaatcttcctacagatggtggacacgctgtccgtgcagctgctactaatgatgcccgtgcagctgcgttgaatgctaggcatgtgcctgctcggcaaactctgagagatcatgatgctcccaatattgactttttcagagacaggaaccaacacctccctatcaacaggaatgattttgagatcaagaccgggttgttggctcttgtgaaacagaatcagtttttcgttcattcctctgagaatcatgtctatcacttggataattttgaagatatttgtaggataacgagaatgaatggagtgccagatgacattatcaaatgtagactgtttatattctctttggcagacaacgcccaccgctggttgaagtcactggatcctataaatctgagaagttgggaagactacaaagctgcgtttttgggacagtatttcacgcagtccaggaccgctatcctgaggaataagatcagtagcttccaacagggaggcacagagtcattccctgaagcttgggagaggtttaaggactactacagggagtgtcctcatcatggattttcacgggctacattgatcagcactttctatcagggagttgacaaggcctacaagatggcattagacactgcaagcaatggtgacttcatgaccaaaactgagactgaggctacaaagctgattaagaaccttgcagctagcaacatcaaccacaatgttgactatgacaggtcgaatagaggtggaggaggagaattgaaacagcttgctgagttgtcagttaaggttgagcaacttctgaggagagatcaaaaagttatcaatttttgtgaggattccagcaaaggtatggtgcatcaagagtacagtggagattgttctgaagatctacaggcagagatgaactttgtgaatgggtatggaaactatcagaatagagggttcaaccagaactaaaggaaccgtcacaacctttcttacaggagtactaatgttgaaaatcctcaggatcaggtatatccaactcaggcaggctcacaaggtccaaaatttcagcccaacggatttcagaataaagggaactatcagggataattccaacctccagcaggtaccggtcatgcgtcttcatctggagataatgatgatgtagcagattcttgaaggtctgaagaagaatgctgctgacatcaatgtaaaagtggatagcatgtacaatgatctcaatgtaaagttcgcaacactatcctcacatgtcaagactctggagaatcaggtctctcaggttgtttctgcctctatgcgaccagctggtgctcattctggaaaagtcgaacccaagggaaaagaacaatgttatgctattatgatctaggaagagcctagagagattgatgtcgccaaacaggtggaaactaatgctgttgtggttgagacgcttgtggaggacaagattgtagaagatgatgaacctttatctgaggagccgccaccttatgtccctaagctaccatttccaggccgtgagagacagattcagagcagaaagagtttgcacgttttgatgagatcatgaaactgttgtatgttagactccctttcttacagtttgttcttcatgttctaagctacagaagttacttgaaggatattttgtccaacaagaggagcattgaggtaggggttaaactgatttccaaaggagaagagtacgctcttctagtggagtctcagagacagcagaaggaagctcagctcactgatgtagtagaggttttagcagggaaagagatggtcagcacttgtagtgcaatccctccagctactattcctgaaaaactcggtgatccagggagttttgttttaccttgccggattggaaagtctgcgtttgagagatgtctttgtgatttgggagctggagttaatttgatgcctctttctatgtcaaaacgtctaggcatcaccaatttcaagccgtcaaggatctctttgattctagcagatcgctctgtgcgatttccagtgggtttggcggagaatgtgcatgttagagttggagatttttacattcccactgattttgttgtccttgaacttgataaggaaccacatgatcctctcactcttggtaggccattcctaaacacagttggagctataattgatgtgagaagaagcacaatcaacctgcagattggggactttgctttggagtttgatatgaaaggcacaaggaaaaatcccactattgaaggtcatgcattttctgtagacacaaatgatgagcctggtgctgaatgtgcaaaggattgcattgagttgagtgatgtcgaggaagtcctggatggagacacaaaagatgctcatgtaaccttgataccactacagcgtgtaggagacaccatcgagtataaggtgcagagtaagggtacctcgaaacctttttccaaagccaggagcattctcactttggagtggaaagagaaaggtagaaaagctgtgaaaagagttgttggtaaggttctaaggatgaagttgactgattggcgaccttgtttcggagcaagttcccgcactcgtgcccattgattcacaagaatccggtcaagctaacgaccttaagcaagcgcttcttgggaggcaacccacaaggtattgtacatactttcttttccttctttcattttctttgattttggtttgtttcgctcttatgtggagtttagacttatcgactcaacagtcgatagtctctgtatttgacgatggtgtgagattatttttgagtgcagaaacccgccaggttgggatcggtcgatcccagcattggatcgatccatccagaagcatacgtcggagctcaaaaatgtctgcagaatgggattgatcgatcccagcactggattgatcgatccagaagcatacttcggagctcaaaaatgtctgccataatgggatcggtcgatcccatcactagatcgatcgatccggtcgtgccgtcgaaaaaaaaaaaaaaaaaatcaaactgattcgattttctgctgctgaacctagtggagcttccacctcacagccaccactagagcactctccaggccatcgcttaggcaggagcaggagacagccgggagagaagagctctagcgagatccccacccaccaccgttgagtagcgctgtaactcacactcttcccttgttattcatctttattttgatttttattgtgtctgtgcggaagctttcctttgaactgttttcacaccgagtcggtgtgaagcaagtcggggggaggttgccacttgtctactaatctagtttgttgttttgttttgctttttcttgagtcattttgttttatcgagtcaaaatcgtgtcttttattgagtcaaaatgctgtttgagaactgtgatcttttcttagggaattgcaccatgtttgatttgattgccttgggaccattttaccaccattcgataacttggaatgtcacgaaaatccatcactagatcgcttaataataatccctatctctttgaaatttggatgaaaggagctttctcttatctatttgaacttaatctggacttaatctatctcacttaggggtttgagaatcatgtaaccgatcatacattcagagttttctttgcatcattttaactctgaatggctagactcatttttagtctagtaccacacatgtccccccacccattgtttgaaacctcatgcattcttatgtgttcattatgatatgcatctatgtgcgaaaactacggagtatacggaccgacatagctttccttttgctaggatagtgagttgtagtttgctggttgttcagatgtgataatatttagccattatggttttgaggttgtacatttgttgtattcatgggtatgtgatgttacattggttgagtttttcctgatgcagaattttgtgagacaccggttccactcccccgcttataaaaaaaaaaaagatatgaaaaaataataataataataaaaaaggaaaaatgaaaataaaaagaaagagcaggaaaggagatcaaggaaccggaaatgtcgagttattattggttatattgttaagcatcatagaaactcattgatttgattgggatagtatgtgttggttggtttgatccgaacttaagggaagctatgtaccacctaattggtttgtgtctcaccgtgatttcgtataatgacatgcatccgtttatacagtttgagaacccgaaacactctgagccaccatagattagccctttttgaccaagcccataacgtgtttgataccccctttgtgagagtacacgcctctgctaatgaatgttaaaaggttaagttctttgattttgaaagttcttttagatctcgggatttaattatgtagctacggttatggcgaagtacagtttagtacgggttgatgagttttgtgatggtcgtttgcaggcaattgacaagagcatgatcccaaagaaaatgtgagttctcgtgttttcaaacctcatctcctgataaagatttttgttttccttgaggataagcaaagatctaagtcggggggagttgatatgttgcgtttttggtgtcttaggtcccttagttttgagtcgtttgtcgtgtcatagtccgtcttttgtatctattcggttctgtcttgattcatttgcaggttttaggtgtttaagcgggacacagatgctttcgagacttatcgggctcatttggaccagaaacgatagaaggagtcgagaaaccagagtcagcaacattggatcgatcgatcccatcactagaacgatcgatccagggttcatcatcgaagacaaatcatctgccaggatgggatcgatcgatcccaactctcaaacgttgaagaatctcacccgccagctcgggatcgatcgatcccatgtggggatcggtcgctccacctctggatcagtcgatccacctctggatcggtcgatccagcttcctgatgactggttttggtattctttaaccggactgattttctattttctgtaattgggtctaaaaaccccaaaaacctagttttatttctacgttttcttttacgcttcttttctgcaacttttggagagctttcctttgtaagcacatttgggattagagattcattccttcttgacaatttggagaagatttatgaacctttatctcatttattcaatttgaattatgttttttttcatatctctttgtgttgttcatttttctatgagtgagtagtctcttaattgtgtgttagggttctaagtaggggattcaatgaattgatggtttgattgttgtttggagttcttaatctttaagttctttgattcatatgttcttaatgttagaataggattgatcaccctgttttagaacttaggtttttctatgcatcaaaaatgttcgaaagaatgcttgaacaaatgtgaattgagcaatgtatttctagccagcgagagttgatgttagaatgcattgtgaacctaatgaacctaattctaatgcgaatttgactacaaaattacaaatgaaagtttagtagttaagtagtcaaatttagtgattaatatcttgagagagaattagtctaaacttgtgttcatgttcgagaacggttctttatgctgaattacttgtttattattttccattaatcattgaattctaaaataccctattgcccaatgctttttatcatgtaaatctaatcgtttcttttcttgcattttaatttacaatctgaaaaccaaacaaacaacctcttcgctttagctaagaacgagtcttggaaattcttagagtatctttggtccttgtggttcgaccttgaatattctacttaacggttagttattttgggtaattactcgagcaatcagacaccgtgaatgaagaagatcagagctccttcctgagcatcgcgctttttgtcattcacatagtaaatcctaatagaagccataaactaccgcactagctcaggatacaaatcgtactgcctaaaaccaattgttcccacacctatgtcatctagcaatcctaaaatagatttttctatctgcaaacgttgcatcaaactgaaatccgtaacccgagttggcgaaatttccacattccaggcattgtaaaacatagtatcataatcatccaaatctggagaaaagggtgattgatatagtcaccttttgtgaattctctgtggatatccttatcccaaactctttgggaagcaatcctctcattaggcaattttggtcatggaaataaaataataggaggttgaggagctgcagccgactattccggtggtggaggacgagcaccggctgtggtggagatgctccgacgaggatgagcgcggaggaggaagatgggccgacgctcttccttgcctttttttctatccatccatattgtagatcgaagaaatggagacttggaggaggtagaggatgaaaatctaatagatttagagcctgaaatcataagaaatgatgaagaatcagagattctagagaagatttagtgagttcggcgatttggagataagtgaaatgaagaagatgaagttttaggttaaattgacttacttggaatatgacggtgtcgatcgactccatcgtggttggtagacagcaattttgtttttttgtttttttttgttttttttttgttttttgaataaaatcctaagttaaaaccaaatgaatgaaataataaaaaagaaaaatagttactagtgagttgtcttccactaagtgcttgtttatagtcaatagcttgactctgtagttgcttaatcaacaggtgggttctggagatcaaatggctcttttgttggaatctcggcttcagcccagtagtgtttgactctttgtccattcacagcaaatgattttccattgttgcctataaaaattacgattccatatgccctaatgataagtaggttttttaggcctacttatatgctgaagggtgtgaggttcagttcaattcccctacaaacagtaacatgtcgacgcagctatggggggtgtcaatccagtccactgtttattgctagcaatcgagatgtgtaccgaaacaattaagtcaagccagattatagagatggttggtttctagtaacgatcctaggtcaggattcaaacaagtaaaaataagaactttaagagccctactcgatcattgggtcgagtagaaccaacaggtgacaaaattaaaaattaaaatgcaatcaacatgggatacaaataggggatacaaataacacgtaaagaaaagtgcaatcaacagaggatacaaataactctaatagaagttctaatgatggattcattgataagggcaactctagggttcaccagatggctaataggtgaaaggtagatacccttgacgatagattcaaaaaacgggtcaatccattgtcgtgatagagacccccataactctaccacttcctaatctcaactatcgttgatgaaacatagcagagcagggtttaagaaacaatctaccaaagccaataagcagacaagccaatgtcttggtcgagtctacaaatctctggaattcgtagatcagacatccatttgaacgtcttttggacgctggacgtctatgatcgaatctccacattagccagcgaaaaccgcataggggccaagcaaatccagaagggttctaacctaatcttaaccacctaactaacctagagagtaccctaatctaatccatcctcaagaaccctaatcactactccagcaacattctcaagaacacaaacccagaaaattcttaaatcataccaaaatgtagatctaaacaagctaaacaactttacttaaacaactaaatgcaaaaacaaaatagataagagtaattaagttttgaagattcataaacacaaagaaaaactaaaggataaaagatggatcctttggacaaatcccaaagtgatctatttatagtaaaatgttgaaactctagattcgttagaagacaagagacttgaggcggtttgggcgaatgctcgatcttagggatcgagtaaagagggtgctgcaaagtctgcgcctttgtgtctatgctccgagtgatcaattggtcgagtagatgattcttcctctcatatccgtatgcttagatgtctagtttagtggggaatgaggaggatccaaagacgctttgatagctcaacaagtcttgtaaagttggtcacccttggtcgagtaaatgggtcgagtagaggatctgctgcttcatcttaggctgccttgatcgagtaagagggttgagtgaattgcagcctctttgtagctgcctggatcgagtaaagaggtcgagtgaaatgatgcctcttctatagctgcttggatcgagtgaatggatcgagtagagtactttctatctccttctacacctgaaaacacaccaaaacatgcaatgcctatgcaagatgatcctagatgcctaagtatgcgaaataagctaaaatagtgcaaaatgatatgctacaatgagcaaatgcacagctaaatgatgataaacatacacctaaaatgagtaaaatacagtgttatcaactcctccaaacttatctcttgcttgccctcaagcaaacaaaaaaacttaagtcgaaggagaggtttgaaggtggggattcaaaaaccgaaacatgcatataaaacgggtaagctcaatgtccaggtagctaattctaggttgcaagatgatagacccttacttaaaaacgttagtcatactcgtcacaatgcaacctaacaacttgccttaatatattcaagcattcccatcaatcaattccctttaacattcattaaacacaaacagtggatcaagcaatgcaatggttatgaactcacttggtttcgggcttaggctaagagacaaaaattgtccctctagtggtttggtcgagtaacaggggactctcagagaaaagattgagcttcagtagaatgctaaaggtaaaagcaaatggacacatacaagaacagactcccatctacccaatgatatagtatgatagctcagaagatgatcccagtcccatagatgtcctaactctacccattttctcattctttctctctttttggttcaagttctaaggggttctctttgaaacgatttaagagtctagcgggtttggttttatactttgacaaacttaaggcttttcttctaatcttagcaaatagggcgttttacccttttctttgaatcacaatgtctaacttctttgaattccaaaccctttactatacttaacacttttgtatcccccttaagaactctaaactcttactctctttttttttcttttcttttcattctgattctcattcccattcattccatacacattcccaatcccaaatacaagtctccacctagtcctagctaaccctaaaagcgtgggctaggtctacatgaaagactgctcttgtcgtctcatacctaacacgttataccaagcacaataaaaaaagacctcacaatcacacataaatgatctttggcttgaaataaggctaggctaagggtatgggaaactgctctaaaaatgagagacagctacttggattaacagagggtggtgaagtgaataagataatccaagtatgtatatggtagccatgagttcacaaacaatgcatagacatgataattgcaaattcagttcgggttctaatagataaggaatggcatcagataagcgagtttcgaatcaaagtagtatagtcaagttacaaattcaaagcagggtgtagtcttactttagaggtacaatcggttatgcaacatagaagtaactgggcattgaacttacttcattgaatcaaaacatgcttatcggtatgaaatcatcactatcccctatgcaaatgagcaatcctaaatgcaagcacactatatacaatcctaaaatgatatgcaatctacatgacactctgtttttgtgaaatcattttctgaaattttttcaaatttttatggtttttctatgccttagatgatgccaaatttgaaataagaaaagagaacacaatgttaaacatgtcttgaaccctcccccaaacttaaattacacactcgcttgtgtaataaaatctgaaagagaattcaagaccaaagcacaaaacacacaaagaaaaataaaaacaaatgctatggtatatacaatggttgaggtggtgttacctcagtgatcaggtgaagtagatggagacatagtcatccatactctcttgggtataggcaggggctgaagttgaggcgggagggttttgctcgttctgtccggtcgagcgtgtgaaagctcgtctctgcctactccttggctctctcagctcggagatcacttcccgaggctcaaaagatgaagctcggggttgatcgatcctttcagctctccttgcagctgagctcgttgaaccgcttcttcttacttcggggttggaagacggtggccttggcttactctggaagtccttgagttgagcagccatactgttcagctacttcttcattgttctcatcttcttcttgaaacccttcattgtcttgttgtaaaggtttccaagctcttcaagcacaccaagcttcttgtgaacttcagcaatctcatctccctcttgcttagcaccttcttcataatgagcttgctcttgttcgctagtcccttgctccggttgatcaatatgttgctcaaactcgatttgctcctcataatcagcttgagtaaagtactcatgttgctcatagtcggctgggctatattccggttcatcctctcgagctcctccaatgtcgatgttcaaggcagagggaaatggcatgaaattgatgttgcgccttgtcttcaccaaagtccgattctcgcattgtaggggtagaagagaaggtccaagctccgagtggttgaacttgaagagatagcgatccgctagagttgttttctcaagaaaatccttccccttgagatagtctaggtcaatgaacttaggcaacacgtcaggggttccgaattccatacccacaactcctagtattggcgttaagagaccaccaacacaaagactcccgtgaattcccgagcgatggatggttgcagcttactccttatagctcaataggtgatccaagagaacaacactcaacgaagtgtctgctctatcacccgccaaattcctcccatcttttgtctctctcaaaataaagaccaaagattggtctatcatgcaaagctcctcttcaccaacaaatctggtggccttctttggaaagagggtgttggcgatgcattggtggaggtgtctaatcacgggattatggattgaagaactcttgctcttggttggcgagaagggcttcggaccggctattgtattccaaagagatttcagctcttcttaatcatagtcttggcggattccttctccacttggaaacccaaaaatggaatcaagatggcgaatatcaagagtatactcgacatccctaactttgaaagttatgtaaccaagacctcctatctcctctttctccgaatcatcaacacaaaaatgaaccttgagggttgcaaggagttggcagctctcctatttgtatcccccacattggcagctcatgaatgttgcaagattggccaattccatcaagtattccatatcaccacaaataccaagctcttgcatcgtttccttatgagggtatctagttccctcaaacttcaactccttcaagtattgatagtactcgctcaggattggctctctcttcctccttggccggtttcttctcccaacaggggttggtgtatcatccccgatgatctcaacctcttcctcagaaaccgcttcttcaaagggtgcctcttcatggtgttgttcttcagcttcaacgaccctctttccccgagctacttcttctctttgcatggttgagcggcttgagcttcctccttgaatcgagcttgatcttttagcacggcgagcatggcgaatttggcgttcagtcatgccactcatgtcaaaagcctcaacttcttcattatcagcagaggatcttcttgcccgagatgaactcttccttcttgaatccatggagattggtggtgagcttcgacagggcaaacaagaacaattctccaagaggtatcaaaaaagaaaggaatcggtttctttggtgatgtaatttttagcttgaaaccgattgaatgtttgaggaaagacttaggagtggtcgagtaactttggtgaagtattggtgaaggggaacggattcttaaagagtgatagggagcgttttggggaagggtttggaatgaagacttcaaagctttgtgagggggttgcgaaaacgagatgatgaaagagagagtttcatggagggtttgtcgaaatcaatgggtggaggagattggtctttggtttgctttggaagagatagaaaagttgattggaaatggtgatgggcatgggtaaatggtttgtccgttgaataatgaagtgaaggggaacaagtgggacatgcgacaccacttcttggtctccaaataattcaagctcaagtaaaggatcgagcatcttctttagttgcgcaaaatttgatccaacggtggagagcttctcattcttgtttactcgatcaaacggaccaaaataaacttcaggaagtcactcgctcaaacggtggtgatgcacctctcatttgatcatccaaatcaatggctaaaaatactcctcctcattctactcgatcaacggttgagatcttttttgacttggtttgaatttactcgactgttgactctcttagggtcactaaaacaaacttgaaacacttaaagaaaaacatcaaaaataacaagaaaaatagaaaattatatacatggatagacatgggacttcctcccaagtgagcttgttttaagtcactaagcttgactcttacagagcttagtcagaaaaaaggttgaagcgacgatcagagaagtcctcatcttcagtggttgaattttcagtgcttgaatcatactctccatcctctcttgagatatggtaggatgagtactcatttgatttttcttcaaagtaagcgtctttttgatcagtagagtagtcttcttcttctgaaccaggctcccttgaccaatcctcaaattcaaaactggggtagcctttaaccatttcttgaagttccaagattgcatggttcagtccttccatcttgtaagttagctccccaatggtatcctcttgagctttgtatccaaccgagagttccagaagttcttcagcaacagaatcatgaatcaagtgttcttcttcaacagaggggttggtgggatgtttaggcactcctcgagaataagtcggaataggagtttcctcctcactcaacaacttgctctctcggcttctttcctctaagtgaactcctttctgatcttctggtgcaaaccatttgatataacccgattttcaccgattttatctatgttttaggtataggattttgagtctttatgttatttctcgaatctttttagtgtcttttcaggtattctatgcaatgggacaacaatggagataaggagacattttggagcaaaagctaaagaaaaggaagcgaaggacgattttggttcaggaatcagcgaggagtgtcgaccgacacactcttgctgtcgatcgacaccagttttggcccaacaagaaccctagacgctttcgagtttacagaagctcaagtttgccccaaaagattttcctatttgcattattagtctatggacgtttttagggtctatatatattgtttttagacctaagtttcttttatcaagtcttttatcaagttctttgcaaaccctattgtaagagacataagttattcatccattgtttttcagagtttcattcagatctatatacagtgaagagatcctttctttctccttctctatttactgtgtttatgctttcaccctcaaatatgttgtttgtttcatccaatatgtctgagtaatctgcttgttaggaatagggtttctcattagggattcatatggtttagtagattgccccctttgctaggttatctgtagaattcttcatctttaattatgcctaatgctagatctagagtaattaattggatcttgaatccagacaatagatatgcccgccataggtatctgtagttggatctattatttgatgagtctggtttataggtgtgtaataaaaatcggcctatctactaagatgaacaattgaactcattaagaatgcatatttaggttgatagtttctcagcttctccggttattattagctatagatatagggagtttcgcggcacgcccactggttattccataattagagttcgagtttaagaatgattcgataacaacctagctttcattagatctactaaccaatagtttcctgagaataccttgttcctagctctttattaaatcgtttacaacacaatcaatttgctgtctttttactttgttctcttttattttcactcataccctgctagcttaatctcgacatttaactcactgtttaaacaaaagaaccccgtgaattcgatcctaaaatactacaattgatctcttatttgagagagtagttctaggtaatttgaacgatatcaaatttggcgccgttgccgaagttcttgggattcatctttgagttttgtttagagatttcgtctagtttttacttctattttgttactcacgcgtttcttgttttcttcttttctgtgtttcacgtgtatgcctaggcaaacaaggagcacaaaacagaaagagcttatcaacttgtctgttctagactggggaaaacttgaacacaccaaccgaaaaactcagaacttagcaatggctgacagagtcatcagagctgatgcagaaggagttttgagaggtgaggatgggcaagcctacaatgaggctggttagagattggatgatcatggagtcatcctacctgaggacgccaataaggatcaggcgcgcctcaatgcgcagttagctgctagagacgcagcaaagctcggtgttgagcgacaccaactaggtgtcgatcgacaccatcgggagcatcacgccgatgcaatcggtgtcgaacgacacaacagaggtgtcgatcgatagcaataccaaattcttgcagctattcctccaactgcggaaccacgtcgtactcttggggatttcaacaggcctggctactttgctttagttggcaagcatcctttccatggcttatctcattagcagccaatatatcatatcgagcgatttgaggatcttgttctgagcatcaaggctaatggagtctcaaaggactacctgaaggaattgaactatctacgaagatgaacaattgaactcattaagaatgcatatttaggttgatagtttctcagcttctccggttattattagctatagatatagggagtttcgcggcacacccaccggttattccataattagagtgtgagtttaagaatggttcgataacaacctagctttcattagatctactaaccaatagtttcctgagaataccctgttcctagctctttattttacaacacaatcaatctgctgtctttttactttgttttcttttattttcactcataccctgctagcttaatctcgacatttaactcactgtttgaacaaaagaactccgtgaattcgatcctaaaatactacaattgatctcttatttgagagaatagttctaggtaatttgaaccatatcaccattctgttgtgaaatcttcgtcctccttgatagctagtgcagtttccatcttctctgaatcaataccatttgaaaacttttaactcttttttcaaacattcatagttgatctttcagcttcatcacctttgaagataatccctctatgactctgctttgccatttaaatttttttctcatctcataccagtcatcttttgtaggatcttcagtctgagctaacctttctattgctctcttcctatggtcaaaagttctcttcagcttgctgagttgagaagtatagttaactcttggtggggtttcaacttctgtttctttatcaatatccatgtcctgaatcccaaaactttgacctcctgttgtggatttccctaaagcttctctgatgtcaaacttcatcttgatgcctttttcaaggttcagattaatttttccattcctgacatctatgattgatccagctgaagctaagaatggtctgcctaggatcaggggatccttgccttcttcatttacgtccaataccacagaatctgtaggcatatttccaatcttgacaggcatattttttattcggccatgaggatgtgcaacagaaccgtcagctaagagtaaagctaagttgtagaacttgtattccatgatctttagccttttagctgtagagagagggataaggctaacagatgctcccaaatcacaaaggcacctattgaatgtcaatggtcctagagagcatggtagagtgaatgaaccgggatcatcaagcttttcttggatgactttcttcttgtatgtttcttgagtggaggcactgctaatcatctcttgattttggtccttcttgagttttttaattttgaacttttttcccaattggtgagtattcagcaaaggtgtgtgctctatagtccagatgaattgctgggtggcaggtgcaacaatttgagttgaatccccccttcttgaatcatactttccttagtatggggagtctgatgacttgttggagactcatcttcttggtggattgtgatagcatttgtagtaccatagtccttaggattctggactgctttccctggaagttgctgaggatgcttcggagcagaggttgatgcaaattgactctccacatacctgatttttgagttcaaagcttcgaatttgacatttagatcgttataagaacaatcgatcttgttgtgtaattcagctatcttcttgtcaagccatagctccagtagcttgtccttgaatgatttgtcgaatgagttgcttaatttcaggatcttgagctacatccttgttcaggaagtttccattggaggcggtgtcgagaagcattttgatctttggtaaagctcctctatagagtgtgctcaataatgaagctttgttgaaaccgtgataggggcactgagtgatgtagcttttaaacctttcccaagctcctctatagagtgtgctcaataatgaagctgtgtgaaacctgagatctcgttcttcaatctagcggtgcgagcaatagagaagaacttggcaagaaaacctttcttacaatcgtcccatgagttgatggagtctgggggtagagtcttctcccaatggtgtgccttgtctcccaaagagaaggaaaatagtatgagcttcaacatatcttcagtgacaccattgatcttagtaaggccacagagcctatcagagctgtcaagatggtccaggggatcttccataggtagaccatgaaacttgtttccttggatcatggagatgagactactcttgatctcaaagttgttgttatgaactggtggaggcactatcccttgtctttggtgatgattccttggggcatcaccagcaccaatgtttcttggttgatcaacattaggtgggtcttgaacatcaattggtctgttctgttgatccatagcagctggtctttgttgatcacaggttgcctttgctttggtgtcttctaactcacgagctattctgtctattctgtctctgaatggtagtaggtgtgcagaacctttggatcgagtttgcatgcacaaagattagtacctataccacaaaaacaagcagacgaaatgatgagttagtaacttgataaatgtaaaagaacttgatcttaaaagtttctaatatcttgaatgtaacaatgcaacaatgaattggcaacagcaccaaattgataagtaggttttttaggcctacagctgaagggtgtgaggtttagttcaattcccctacaagcactaacatgtcgatgcagttataggggatgtcaatccagtccactgtttattgctagcaatcaagatgtgtaaataagcaactaagtcaagccagattatagagatggttggtgtctagtaacaatcctaggttaggattcaaacaagtaaaaataagaactttaagagccctactcgattattgggtcgagtagaacgaacatgtgacaaaattaagaattaaaatgcaatcaataggggatacaaataggggatacaaataacaggtaaagaaaagtgcaatcaaaaagggatacaaataactctaatagaagttcttaggatggattcattgataagggcaactctagggttcatcagatggctgataggtgaaaggtagatacccttgacgatagattcaaaaaccgggtcaatccattgtcgtgacagagacccccaaaactctaccacctcctaatctcaaatgtcgttgatgaaacatagcagagcagggtttaagaaacaatctaccaaagctaataagcagacaagccaatgtcttggtcgagtctacaaatctctggaattcgtagatcaaacgtccatttgaacgtcttttggacgctggacgtctatgatcgaatctccacattagccagcaaaaaccgcataggggccaagcgaatccagaagggttctaacctaatcttaatcacctaactaaactagatattaccctaatctaatccatcctcaagaaccctaatcactactcaagcaacattctcaagaacacaaacccagaaattactgaaatcataccaaaatgtagatctaaacaagctaaacaactttacttaaacaactaaatgcaaaaacgaaatagattaagagtaattaagtattgaagattcataaacacaacgaaaaactaaaggataaaagatggatcctttggacaaatccaaagtgatatatttctagtaaaatgttgaaaccctagattcactagaagacaagagaattgaggcggtttgggcaaatgctcgatcttagggatcgagtaaagagggtgctgcaaagtctgcgcctttgtgtctatgctccgagtgatcaattggtcgagtagatgcttcttcctctcctatccgtatgctcagatgtcaggttgagtggggaatgaggaggatccgaagacgctttgatagctcaacaagtcttgtagagttggtcacccttggtcgagtaatgggtcgggtagaggatcgagtaggaggggcgagtagatcaatttgctgcttcatccgaggctgccttggtcgagtaagagggtcaagtgaattgcagcctcctttgtagctgcctggatcgagtaaagaggtcgagtgaaatgatgcctcttctgtagctgcctggatcgagtgaatgaatcgagtagagtcctttttatctccttctgcacctgaaaacacaccaaaacatgcaatgcgtatgcaagatgatcctagatgcctaagtatgcgaaataagctaaaatggtgcaaaaatgatatgatacaatgagcaaatgcaaatctaaatgatgataaacatacacataaaatgagtaaaatacagtgttatcacctaaccgaatggactgtgtagggacatgaccaacgagaagacaattttccaggagataatgttaatctagaatcatacagaagtacttggtcattagtctctaaggttcgagtgaggatcttcttgtcatggtaagcttttgtgtgttctttgtagacctttgagttgtcataggcatgaatccttatctcaacaagctcattcaactgaataagtctcctttccccagctgatttgatgtcgaaattcatcatcttaactgcccaagctgcttggtgctctaattccactggaagatgacgagctttaccatagagaagatgaaaaggtgtggtcctaagaggagttttgaaagctgttatgtaagcccatagtgcatcatctaacttgtaagaccactcttttttcgatttttcaactgtcttctcaagaatctctttgatctgcctgttgaaaacttcaacctgaccgctcgtttgtgggtgatagggagtagcaactcgatgcttaactccatactgaataagcaattttacaagaatcttgttaatgaaatgcttacctccgtcactaatgactatgcgtggcactccaaaacgacggaagatgatagacttgaaaagtttcatgacaactgctgaatcttttttggactagctatagcctctacccacttggaaacataatcgacagctaataggatgtagagattcttgttggatggtgggaagggtctcataaaatttatatcccaacaatcgaagacttcaacttcgaggataaatttctggggcatctcattacgctcgcttatttttctccttctctgacaaggatcacattacgatatgaatttctgagcatcccgaaacattgtaggctaccaaaaaactgcttgaagaactttggatactgtcttgaaggttgcaaaatgaccaccatagctggagctgtggcaatgcgataatatatcaggaacctctgttgcagcaatgcatctcttataaactccattagaataatgcttatagagataaggttcattccaataatatcgcctaatctctctcagaaatctcttcttgttataatctgtgaaattatccggttccacatctacagctaggtaattaacaatgtcagtataccatgggtaatccttctcgatcgctgtggcggcgcaattttcagttgataaccaattttttgtctgattgggagtgtgtcgatcgacagtctcaatggtatcattcgacaccatcgagctactgcgaaaatcatcgtcttttgaaacgtgatagtctatcaacatagacgaagtgtcgatcgacactaaagctcgattctgcatctcatcacatttgcagtcatcttctttagctgtatcaatcatgtatatgttctccttaggcaagaaatcattaatagggatatcatcatcgatcctaatgcgtcacaaatgatctgtgacaccattctcaactcatttcttatctcttacctcgatgtcaaattcctgaaaagcaaaatccgtctcaaaagtcttagcttagcatctttcttttgcattaaatacttcaaggcaacatgatctgtgtgaacaataaccttggatcctacaagataagatatgaacttctcaaaagcaaacaccacagctaacaactccttctctatagttgcataattcctttgagcatcatcaagtgtcctacttgcatagtagatggcatgaagtttcttatctttcctcagtcctagaacagccccaactgcaaaatcactcgcatcacacattacctcaaaaggtagatcccagtctggtggttgaacaatcggtgcgctgatcaaagcttgttttatctgctcaaaggcatcatgacactcttgtgtaaactcgaatttgacttctttgcagagtagagtggttagtggtcttgcaattttactgaaatccttgatgaatcttttgtagaaaccagcatgtccaaggaaactcctcactgttttgacattatcaagcgcttgaagacttgtcataactttgaccttggctctatcaacatctataccatgctcagatattctgtgaccgagaactatccaatcctgcaccataaagtgacatttctccccattcaaaactagacgtttctcctcacatcttgccaataccttgtagagattctctaaacaatcctcaaacgatgatccataaactaaaaaatcatccatgatgacctccatgatatcctcaatcatgtctgtgaagctagacatcatacctctctgaaatgttgcaggagcattacaaagaccgaaaggcattctccgataagcaaatgtaccataagggtaggtgaaagtcgttttctcctggtcatctggatgaatcgggatttgaaagaaccttaaatatcgatcaagaaagcaatagtacttatgatttactaacctctccaacatttgatcgataaatggtaaggggaaatggtctttcctcgtggcatcacatatggaagatcgtcttcaatcaaaattagtattctgcgttggaatcacagatggaagatcatcttcaactattagttgcatcagatgttcggtctcatctaacagcttagtatatgtagaagtttcatctaacagcttagtatatgtagaagtttcactgtccaaatctgcactatcttctatggaagagaccaaaactagctctagtgggtcttctaattccatatctgaaatactatctaaagctaatgaagtgaaagaatctatcaggaaagttctgacctctatgattggtttcttaaccaacgtgctcatatcgaacttcatagtaagatcgccaacattcagccctatccgtccttctcaaacgtctataatcgctctagctgtgtgcaagaaaggtctcccaaagattaatggatccttaggttctttctcataagaaaagaccacaaagtctgtagcaatcatgctcttctcaatcataacaggaacattgctaagaatcccatcttgaattcgggtagaacgatctgccagcacaagagtgataaaggtaggctcaagattggaatacccaagacgcatagcaagcgagcgaggcatcagattcacactagaaccgggatcacataaggctcttgggaaagaatcatagttgatggcgacacttagtacaaaggttccgaggtcaggtaacttccttggaagttgtccatgaatgatatcgctaccctgctctgaaatcttcataacactgtattcttttgtcaaattcttagtgaccatcgtcttgacataccttcgtattgctggagagagatgaatatcttaaactagaggcatctcaaaattcagcttgtcaatcatagccttgcatctgacatcatctaaggctagtcttgactttttaggactcttggggaaaggaattcgccggtttggtgacttagtttcagctggatgttgcacattgtctgaacgagctgggtgtcgatcgataggaggtgggtgtcgatcgacactatcgggaataatttcctcctcctcaatgaaattgtcgattccactcgacaaaggtaaaacagagtcgtcaagagtaattggtgttgatcggcaccctgatgtatcaatcgacattgaggatttttctgtaactggaatagatgaaatctgagttaaacgttcgcgctgaaggattaggtttagttgctttccactgcgtaatgtgactacattgatagatgctgatgtaggagaaggctcaaatatatgagatctcaggttgtcgatcttcccattaagatctgtgtagacagaatcaaacttgtcattaaattcaaccacgagctttgtatggctcttaagaatctgcgcaagcatggattccattcggcggtcggaggagggtggaggggcttggataggagcaaaaattgctgaaacatgattctctttacttgcggtggcaatctcaactgaaaatctttgttctgtgtcaatatcatgtgtcgaaatactagttacagctgataagtgtacattttacatgttttgagcatccatttgtcatcactttagcatcatatcaacactgttttatatcatttctcatcatttgtcatcactttgcatgtttaggatagttttgcatgcatgttgcatatttgtgttgttttcaggtgatttggagctgttggcaagctaattggaagaagcggacctgatcacaacaaaacactcgacccccttgcgagtagatggttccacgactttaacaaaccactcaaccccctggtcgagtagaagacctcatcacttcacgtcaccactcgaccccctggtcgagtaccaccatgagagtcactcgatcacatccactcaatcccatggtcgagtatcatcatctccaccacttgaccatcactcgatcacccaacttgaccacctggtcgagtacctccatcaccttcactcgttcgctctaacaccaagccgagtaccaccatctctatcactcgacttcatactcgagtgccagcttcagagtcttctccattccgcactcaaccagacactcgagcacaaggaagagaagaagactccagcttatcactcgatcattcactcgaccaccttggtcaagtaccgttcttaatctgtcccaatactgcatcattttgagtattaggattttggaatattttgctataactagcatgcattttacattttcgttaactaagttttattccgcagacattgtgttcttgacgtttttgtaatccggatttctcttaatctattcagtattcagtgtttgcttttgatttcgtttactaagttgttcatcccgttatcatccggctattaccctattgctatcatgttttcattcttatcatcgtttatattctctgcaatgatgtttgagtagtgactaggtttctgaggatgggttagagtagtttagaattctcagtatgctaggtggttgagtttgatttatagatcctttctggattagttgttcttcatgcctatcgctttctgatcaactggaatttgagcccagacatttccgcgcccaaaaggtgttcaatgaaatgtctgaaccactaattccaaagattcgtggctttataccaagttattggttgtagggagcgtttgggcgttaacttgttgattcgtaatgcctattaggttaactctcgtcaatggtgattgagtctgggactagtttaacttgagggtctcttttgcggtggcacttagatttggttaccgaacttgttatctaaggataatttattgagcatgtcaatcacctgtaaactgaggaaacaaaactactcaattaccccatcctcgggaattctttatttgattaatttatttgcttactctgctattgtttactgaatcttgttacatgttacttagtttttgtgattttggcctgttactcgacctgatactcgaccacccagttgtctggcaacagactgtgcagtcgagtatccctgttacattttatgtctgttactcgacctgtcactcgaccacacccagtgctcttcaacgagctgtgttggtcgagtgttttcttgtttctgcttgattttttgtttcctgcatgttcacttaggactgctagaacaccccaaaacttgttattgtttggcttgactctgtgaactctgattgcatcttgattgctagcatcacacccatttggattgataaccttcagtactacaacgacatgatagtgctttaggattaattgatcttaaaaaactattatcaacagcattggtgatgaggagcaatgcttcaccagtagttcttgtcatgaagttacagtagcttgctgcatcaagttgattctggtatggctcagctatccctctgtagaatatattaatgagttggctctcttggaagccatgttgttgacattctcgctgataagatttgaagtggagacatgctactctaagggactcggttggtgcttgagtgaacgaagagatttgcaaacgaagtgcctctgtcacggattcattgaagaagtgattcatgaaggtgtgctttgtatcagtccaattggttattgaacctgattctagttgacgcaaccatgatgttcctttgcgcgcgagagagtggggaagagtttgcaccttctggtacaccttctgctttaataaggtaatcagctggtacaccttctgctttaatagaagacttccaaatgatctaatggtgattcatcgagagctcctctaaactttcctcttgacacaagatcacaataggcagggtgtatagcaaagtcttctcgttcaaatggtggtagcttgaatgttgatcggttggtgtagaaaagatcacttttgttaaggtcgcctaatttagccagctggttctgcagagggtgtcggtcaacactatcgtgaaatcctgccatagaaacgcgattctcaatttgaaggtacctgaaacacaagaaaccaaaggacaaagaaacacgtgaataagtgatagaaaagaagtgtctagacttaaaacaacacctagtctaatggtgaactaaaagagaacttcggcaacagcggcaaaattgatatagctcaaattgccttaagcttactccttcaaataagagatcgtcgttagcacttaacggtcaaattccactaagttctctatgttcacacaataaacttatggtggttttaattaagctagacaaagtatattaatgtaaaagacaataaagcaagtaaatgagttgtagattcaagtgattaaagcgttgggtctaagaaattgtgtcgggagatcgataaattgtagatttagctaatattaggattgttatcgcacggttatcgaactcaaactatgattatagagtaaccggtggcgttctacgaaactctctatacttagagctaagataacaggagaagccgagaaatcctatactagagcatgcattattatcaagtttgattagttcacctagtatctaaaccagagcccttctatgagcctacctgttcttcttaaatgcttaggctcacatatgatagttcaaataacaagtacctgtggcgggtatacctattatctaatatcaagttctaggtgatcaatctaaaactagcaataagaataatcaagatgaagaactctaaaaataattctaaggggttttcgagctactaatccatctaaatccctattgaaactccctaaaacccaacaaggtgattactcagacatgataacaaaaacacaaatcataatttcaatagtttgtattgaataagaataagagtaaaaagagttcagaatcctctctacagggattcgattcttctctccaaaagtgtatctcaaaataataaaactaaacttttgtctaacaatgaacaaataattaggtatataagtgactaaaaacgtgcagggactactttgcaaataaagaaaacttcagggcttctcaaagacttggcagaaataaaaaattctctcagtcgagataagggtgtcgatcgacagaggtgtggtgtcgatcgacactattgcgtggaaaacgtctttgataatcttcaatgctgaaaagtttccaaaattccttactatgctccatagctcccaaatgtgtaattgcacctgaaatgactcaaaacatacgaaaaggactagaaagactctaaaaaccattctgaaactattttagaaatcactaaaaactaggacatatcacgagtgctactggaaattgctgacgccttagtctaaacggaaattttgtctaaggcggcaagagaaacatcctcgaaattaataccttctgatctggaatgtcgcacatgataatttctacttcgatgacatgattcgccaagcgagtgacttacagacgtgtaccattgcacaatccttctttgggatctaaatttctaagcagacaagatcgactataaaaaggttttgctagtaccaacgaacccgtaaacaaaaaatacacctcctcgatcctgtagaacagcgtataggctctcttggtatagacctttctgctcaccaattctcttaccataaagttcaatatacttttcgtgcttttctgtttgaatgtatccaagttcgttggcgatcaaattattcctatgcccatgaaccaagtaaagctcaggacaaggcataccaccataattagccaaagacttaccgctcctacggagaatatcttcaatagctattaagcctagaacttgcaactcgccatcccttaacgtcaaacctacgcagataaaacataagaaattatctatatatacataagctatggacatgaaattaagaagggagtcaatattcaatactttaatgagaaaattatgcgattacacaaattttaccatgatttccttgttttagcctctctacaactactaaatcttcagacaataaaagccaagtagtagttcagaccttcggcggatcagcgacactggcagacatcaacatgatcaagaaaagtttgcgcagataaactccaattgcccaaaaacttgcttccttaatgccttcaatattttctttgtcataatcaagcaaactcatggcaaaacaggtatcttggaagcttttatacacgacaccgttggaagccaatcgtttttggctttgtcaaaaattgtatacaaccaaccttgtttttattacgatcgcacgtcatgccacaaaaaataatcttcaccagacgaccaaggaacatggtaattcctaacgatcgcaaaactcctttcccattctttctacaatctttctcgaggcacccaaacaaatttcgaaaggaaagttagcataagacccttagcttcttcgggatattttttgttagcaatcatccatgcgagaaacatggagtggctgacagacttacgatttaaaatttcatcgacagggtcatcttgattgtaaatcataaactatttacctggagcatgaaacgaaagcttcatcacatacgtagtgcggggatgggtaggaaaagtaagtatacgccaagttgcctcacgtgcagatatatctacatgtacaaaaaacaatataaacctaataaatcttagtacaaatgaatcagaccaaataccaagtcccaaaaaaacatacctacagctagaatatttttctctctcgtcatgaataatattaccattttcatcctctttttgtacagtgttgctgatatagtctggtcctttatggatgtacttaaaaagatacttgatagaacgtgattaattaaactattcgacgtgaataagagcacgataacgtaacaacaacgctctgttgtaaggaacaacataccttttatcgcactcgaaaccctttttctcgataaatctcttatcctcacgtctcctatagaggaggtaaccatcatcgtttactgtcgtcaaagagtttcttggttttggaaagaattttgaacatttcccatttctcatctaaacattatagggaaattctggtccacacggtccatatatcatacaatcagagactatgtcgtacaaatgaggctctaaatctttatctcaaatctcggcactgataattttatcaatatcatcaccagtcggaatcattgtagtcttttgctaaaaaaaaaaccatatgtgcatgaggaagacccctattctaaaactggattgtgtacaacgctgccccgaatgatggaaaatattaagaagttaattagtaactgtcaaacatattaaacattggtaagcatcccattaataagtttatataactaaagaaacagtcccaaaagtatcttccgtcgctaattataagacaataaattatcgagtttcatcttgaaaacctacaaattatgtccagtctatcctcagagtttaggacatgcttttcaagatatctcgtgatttcaggccatttgggattacaagtgatagtaataaagatgtcttaataaccaaaatatttgcacgtagccatcgcgtcgatttaatcttgcatcatgtatctcgatccacctgtaaaggaagaaggtatgaaaatctttgttccttgcttctcaagcattggtcaccacgttcggcactctgcataattcgctcataattttcacagcggagattcttctgattgaaacaaatgtaccgtaatctatttgtttctatcatagtgtacatatcaaccataaattgttggaataggcgtccggacaatggaatgattggagactgactagccctagtctaaattcgatacgcaaacaattcacgcatcgtgatgtttttccttttctttcaatttacaccaacaaatcctatgtcgatacctagactgaacccatcttctccatatggaaagagtaatgggtattgtaaaggtaagtaagctggatgcagctcacttattcacggccctattgcaatgaaaaccacaacttttcatttaactagcaatgaatatgaactcaacgtgtggaacaccttcttttttgggttattatgtatggtttgaattcgcggaaaaaaacatattcaaaagattaacaaaacgatatctataatgttagaaaagagtgaataaccaattcgtaaatatcgaagaagattgaatagtattgaaaagtcgtgctagactctgatttgctcgtttaaagtttcgttggaacaaagagtgttcttaaaagtaatcgaaaaaagtatatcaataatgctggataaaaagacgtgtcacgatgctagttgaaatgaatgcaaatatcttcagttaatgcccaacaattatccgacctgaataaatataccagccgttataattattttaggcatttctagtcgtagtctctagtataatatcacgtgtattatcaccaatttcaaagtcaccgagtaccagaccggcaacttcatctgaagtaggaagattgtgccttcatccctcatgcttacgatcaaaatagagcaccaacttcagaccagtattattaccgcttgctgcaaacctctcgcttgatgttctgaaagctttaacatgaggattatgagcatctaacatctccttcaacgatttcctaaacaccaaataaaattaatatgtaaattaggcttttaaaaaaaattatatatatatatatatatagacatgtgtgttcatatatttacgtataatatgatacgtacccgtaaacagtcttacaattgactatctcattcaatgtgttgtgtatgtacagctgcaagaatgcaggcacttcgtctggtttaggaaaaagatcaccaatcaaatggtagttttcaccagataagtgaaataagtacggcccatttccatcgtcaccagaatgatgaaactccctccaagagagataaacacaaatatcatgttatacactttaactaactcgcggtaatgaatactcttactgtcaccgttatacaatagtgtagatagtgttgctggtggatctttcattacaggcagtttaaccttgctctgtttgcagcaaacaccaaacttttgttttttagcttttacattattatttagtcgttctccgtaccacatattccctgcattgttgacagttgaatatgggatctccattatcataatatcctacaataatatgatgcacaatattacttttgttatatatttataaaataacaatgcacattttactgacgttaaaagggaaataataacactgtcagctaatcctggttgaacaatatcagacgcttctagtcccataggaaacgcacattgtcatgtattatttttggtcaaatgatctgaacaaacgtccgtctcatcgaactcaaagtcgtttgtttctgactctggatcggttgcgacaaagtatacaaaatttccttcgatatcaggtagcaaagcatctcctgataagtggtatattttatatatagttattcgaagtttattaataaccgagatgtgctagagaatattgtaatgaacaattaatatataacaaatatcaaccatctaatagtttctttgaagctgctcttttcctcttaagaacatttatccgaaacctcctcgcatctttgtacctgtttctcttgccgatatctatatattggtgatgtacaagaatattaaaagcatatggcacataatattgttttttttataatggcatctgcattcatcagaatatatgagttaaaacatgtacactaacatatacaacatcatatcaacaatcgagctaatattttgaaacaaacctcttttaacacgaagcctagctatggacgaaaaatctgtagggttttttgttcttcgtttcatattacaaaacgaatcgttctcaaccttgtcttgtatcacaaggaacaatcacaagactcacatgtatacatattaaactaaatatgtataaaatacaaacgataaatagtaaacttctttgatttaatattcgataataacaaatattcctttttagatatatcaaatatattaaaacaaatatatgaggagaatgtacaatttcatatgtatgtaaaaaataaagagatgaggacaattgacaatttaaatattctcagaaattagtaaccataatattatgttctgaaaaataacatatatttctctcagtggatgaacatattttgaaaaatgaatattattcatttagattgtcaaagcaagcaatcaatcacgatattttgttcaaatatattataaagataattgttttatagctaattgtggtagaactatatctcaaatataatcgcgtctattcgataactaatgaggacgactatcaaccaagttattaacggtacaaagttgaattatattatggaacacattatataattttaatattatattagataagtcagaaaataaaatagcaataactatacggccaatacatatcacacgttctcggttttattccgacactcagaaaataattatcattaatatttattcctaaatatataattaatatatattcctaaatatataattaatatatattcctaaatatataatgcatttatgtaaacatctcacaaatacatatataaccaagtcagtaaataaataatttctaacacttgccatctacaacattaaactctttttaaaaaatttaaattaaatccatataaatatatcaatcgacaaatcaataaaaccagactcaattccgaaacaagttaagatctaaatttgtaaataataaaataatttttttctttttttcagtcttggattttgtcttttggttgtacttgattacaatactagcagcaccaacacttcttgtcttctttgacccaacattgataagagcaacaacatcacgatcgatcaatcgataaggtcttcgccaagatcatttggagtctgattgacgtcaaaagaagccgtaacaccatccaatacatctacggagctagtagattacatatgctaaaatttgaataattgccacatgagaatgtacccaataataaaaacaactaatatcaaattattcatagagtacaaacctcatgcaaaaactcttcgaccatgtttggattatcgcaaaacttctgcacgaaataatgagtattcctcttctgcttattatcagcacctattcggactttaaacatgattttctttcatatcaattctgtcaagatagaaggcaacacccgaggatcgtcctatttttttttatttttttaaaaaaagacagcatcattatccgttaacgcgttgatgtgataattatacataggcaataataacaaacctgaagaatctcatcaagtaatggttgagcactcttcttaactagatttttggctattgaatcgaaaagaagaaatttaacaaaatcatgggaaactcgtaacatgagacgatatttgtttataataattacaacagtagtcaacacgcaaaacaatattatatatatactaaaagttttaagagagtatgaatgttatatctagccacaacgtcggtaacaacccactaccaaaagtatcaaagacgtaaaacggagggccattataacctttttctctggataatgctgcaactttttggtacatatcttgcaccagagataacaccaacgataaggatcatcgatagcatcaacagttgcaactgtaacacatgtgatgtcctataattcaacagaaatatagtaaatgttataccaatataataaataataattcagttatgtaaataatatagtaaacaaaacctccacaacagtcactatctcatggatagttttttgactttccgaacaaagaactcatcacgaagtggtatggtagggaccgcaggcgtgtttatccggtcttagataatgattggttcacaatcaccaatctgtaatatgcaaaccacgattctacgttaacacaggccatcaaaacaaaaacgacaaatagtagtataatatatttaattacttggatcggaaggcttctacaatgataagctgtggatccaaaagtatttttgtagagctgaatgcattagaaacattccagttatctaaaacatataatgattaacgacaaaccaataacatataaacgaacttttaaaaaaagatgtgttacaccatgcacgaactacttgaaataagttttagcgtacctctaaactcatttacctgagcaaaacgaagaatacatatcatagttgatttcagattaagctctgaataagtctttacttgatcaacatattttccctacagagtacacgataccactacgaccaaacatacatgcaataagtatataatacttgtaacatatatatatatatatatatataaagacataatcgacgtgtaaccaatcatacgtagtatcttgaagctgaatatcaaacacagattttaaatattagatattgcttattaaatgaaaataattattacacgtaaccacataataacatcaccaatcaaaattttatcatcgacaacaccactcaaaaccatagaaaactcaacaaaatatttctcaagtatatcaactaggaaattgtcatatggtatgacaagcgttgtatgatagaaatttattttgaagagcatgggacttgttttatactcatgaccgttgttgattagctgaaaagtatcgattgtcactgattcatcttcttttaataaacattgatatttagtcataagtttatcattaactcaaccgaaaataatcgccgactatgattaaagtgcaatgtatacaatcaatagtattctcattggcgtcggtaagaagatcatcacgttccacacaattagctggataataatacaccatgaagaaattattagtagataatataaatataaaacatatatagataacaagaaatataataagaataagttattatacctcataattaaaaaacttatttcgcaaaccagcgagaacctatatggtttataaggaaactaagaaatattgtcaatttaaaatgaataaaacaccattcataagggcctatatcgagttgttactgaacctgttttgtatgcattaagggctctaaggattccactgcctattttcataaaatttcaattacaaaaattagttatatacagatcaactgtaatttccaaacagataacgaaatcataacaatataataacatttagatagcgagagaaaaagtagtttggattcaaagactttgaacaacaacagccatcgtacactaaaaatagaagcataacgttaaacacaaaatagtatatttttagaaaatttaaaatttgtaacacagagatgtatagttacgtccaaagaacagtcttgcttgagagataaggcttctatactcaagatcacaccttcaaacttacttttcaattattaacagtaaaagagatgaatgaaattgcaatgctttatcatataatcactaaggctgaatagtatcaataattacctcatccaacgataagtctagagcaaaaaattcaacgacctaagaaattaaaaatacattcccaaatgatattaaatacatttggcgtaacatttctgatgtcgaagatgttataaaataccgatattggtcggaacttaccgataaaaaaaattcacaaggttcctaaaaaaccctaaaaaagttaaaagctaatatcaaactaaaaagtatgtaactaacatcctttcaatacgaatcatcatagttgctacttatcgttagagaaaagtcgtaaagaatgaaacattaatgaacacatcaaaataataaaatatattatagtaccccagtttcaggaatatgctggcgcatgcagagaggtttaaaataattgatttggccacctatgtcacaaaagtgcacttatcttttcggtcaaaagtcctgagagaactccaaagttaagtgtgcttgggttagagtagtttcaagatgagtgacctacccggaagtgattgtcggaaccatgcgagtaagggtaaagcatgggaaaagatcatgtggtgatttgtagggccggtaacaagtctttaaagcttcccggacgtggtgtactgattgtcgaacatgggtgggctcatgggcccgagagaggacgtgaagcccactggtaggggcgattggagcgtgccacagataccgaaaaaaggaaatactccatgctcaaacaggataccctagcagatgaaagcatacaaaccatatatatattcagacgaacaataacaatcaaaagtgaccaataaggaaagtgaaacaacccaacccataaaaacttaattcaatcaaccaataaagcaatatttaaaccacaagtcaaaaataataatttatgaataaataaataagtcgaccaacaaaactaagaatgactaacaatcctaacacaactctaacaggattccaataaccaaaacacaaaaataaaccaaacgagttccttgatcatcctctcttccttgccatgattccacgatcacactttctctttacctgcaccaaaagaaagagatgcataagtattatcacaaatatttagtgaggcgatcctcccatctacgagctatacacacaagcaaataaaagggggtataatcacaaatacaacataaacaaaccagtcactgaacaattcacccaaaaatacattcaccacacctacatatcatcacacaaaacaaatcatacaacccaatcgctcagataagctcatggtcacgcactcaccttaacaagctgattctaacaacaattaaaactaggagagactctccttgcgtctgaaacagtccaaaaacgtcctacaacaagtccataaccaaaagcaaccttgaagcaaacggaacatgaaaatcagaaacaaacagtctcaaagacgaaaccctaaaaacaaaaccaaccgttaactatcaaatcccttcgttgaaaagctagccttagaggtcacaaagcttcccacaaactctcgtgtcgattggaaaccagacgagaccacgatctcagttacaatgcccgctggtcctaactcgcgtctgagaaaacgtggctcacgaaactgcgaataactcaacgaatttaaatccaaatccatttctgtatattggagaatgactagaaagacttgcaaataattctaccaaatgtcgttacctttgaccacgatttgatatgtcgaaactgtttcctcccaaatcctaacgattctggtccttctccttctctctcttttttcctttacaaaacgaaaagtggctaactaaagctctaatttcgagtttccttcttttatatgcacactccagggttttcattaacccaaccgattaaaccgagcgatttaaatacaaaccctaaacgattatccggttcacgggcgttacaattctcccccactaacatagattcgtcctctaatctagcttcacccttccactccaaagaaatccgtgcaaccgtcattacggtccgcactccctccaaccagaccccctctaggtctttctatctagtcgatatactcacgattaactagtcattgttgctcacaactcactctccactctcataccgtaatcttcgagcataaacactctaaggcctcagcctacagtatctcgggtatcacacgtattatcttccccactcaaattcaaaccctgagttgtgtcggctcactctcagccacaaaatcatcgagttacgacacttggagaaaataataccttaaaactcgctctcgggtcgtcaccctaaagcgcgctctcggatcgtcacccgaagccaccgtacacctcgcacgctaaagacaccaaatccctctagttaccggtacctcatgagcataccccgctcctcacgagtcgttgggaccctcatgtccctcgagcaaacaatactaaacgcttccgaacatatctccagactctctcatggattcgcgtaagacacttttatgcctcaccatccatcatatcccctcaagaatatccttatgaccaactcccagccatctcataagcacacctctctcttaggttgattactcaaacttttcaaaaatagacaactcctttctaggaaactttccatttttggaaaccgcacaacacatttttaaataagacaagtcaagtcaaatccaagaaaaaatacttattttatttatcatcaaatgtcatgatcgttacaactccaaacaaaaatacaaaaaaaagagaaataagaacaacaactcaagagctcaaaaactcaacaacacttaaactggaaaccaaggataggcaaactcatgcagcaacctgcttctcgaaccacttcttgaaccttgccttcatcctcgcctatggctcccaagtctcctctgtcacaccatcgcagtcccacatgactttgatcgaaggaatcatcttccgccgaagttccttgatcctcctctcgagaaccctcactagtctcgcctcccaagtcatgttgggttgaagatcctctagaatcttagccaacacctcatcatccttgtgaagacacttcctcaacatcgacacatgaaacaccttgtgaaatgcacgcataacatctggcaactctagcctgtatgccactggtcccagcctctcaacaatcctgaacggacctatgtacctcagacacaacttagtctctgagatagacctgttcggacctcgcaacatggaaatcttgagatacactctgtccccaacctcaaaatcaagctctctcctcctcttgtcagcataactccgccgtcgatcctgagcttccttcatgttcagcttaagaacagaacatggatcctctccgtggtctcctgaacataatctgcaccatatatgctcctctcccctccccacttgggtccagcataacggtgttctgcattgcctcccgtacaacgcttcgaaaggcgccatccaaatactcgctagatagctgttgttataagcaaactctaccagactcaagtgatccgcccaatgacctccccaatctaagacacacatccgaaacatatcctcaagtgtctggatagtcctctcagattgaccatctgtctgaggataatgagccgtgctcatctgcaccttagtgcccatctctgcctgaaaggctctccaaaacgcagaattaaacttggaatccctgtctgacacaatactcacatgtactccatgcaacttcacgatctcactcacatatttcttagccaacaccgccgctccatcatttttttttatggccagaaaatgtgttgacttagtaagacggtccacgatcacctaaatagcatctttggtccgcgacacatgcaaactgataacactgtattttactcagattaattggtaatagcttgtcctgtggaaaggttgtaaaagggtgatgacttgggtttaaggaacgccaagcgcaccaataacctacatgtgagccttgagggcccaaggagagaggttagggttgatgcgctgcagcgccaactggacgcaacgttgcagagagtggccacgtgggcgggtcccacgggacgggttgttacagaaagtaatagaataaaacgtcgaagctcgtgaagaacatacagaacaggaagacatcattttgcgaggatgattgctgtcttttggaactgttcctgtgtatacaacataaacgaaagagagttaataagcggacaatctaattataatatctgtaaaaataacacaataagtctataaccctaacaactacacatacaactatgaataaagagacgaaacgttatgattgtagcaatacaacacgaacaatatttatagatgatgagtttggggtagatgaattagggtttctagaaaacattatctagaaaattttaaaatataaatcattggattgttcagttatcaatatataaaatatcataggcaaaatataaaattaatagaatcttagaaataggaaataaaacattatgataaacatacaacaaaattataatttcatggcccaaactttcgagagtatggcccatataatcgactgatccattgtaaatttaaaaggcaggggcagaggccaaagtattaaagccgacggctacgattaaaaacccttattttcatatctaatctaacggttgcgacttaatctctcatattaactcacttaaaatttaggggcgaaactacaatttactcatgctgaagatagcctggatgatgagataaatagcaaaaaaagcttgtcgtttattatatatatagattaatagatacatgagtgaagatgacgaagttgcgatttgataaaggtggagtttttattttttggagaaaactgaatcgattcagcatgagaggatagagacggtgaggaggaaggatgcctctagtttttttttttgtgaactgattttaggttatagattgacccattgatattaggggactacaaaattattacgcttttatgttacgtattgagtatgtgggcttcatatagttgggcatcttactattatgggtaaaggtttttatttatgaaattttttttttgccgatgctgacgtggcgtatgaagagagtgttggaaaaatagttgttgtggacaccttgagagatcttcaagaagtttcttttattagtagtagatgtttcattggtttatcaataggttaaagtctaatgctagtcattcattgctctatgtgatcaatgctttgacttaacatataaccacaacttgaaccatttgaaaaccgcaacccattcctttaaaattacttgaagctttttaaaacacatcaaaattacttgaagcgtttcaagtccttttaacctttagccaaaacattgttatggattcctcaaactcatattcccatcaacgaagctttttagaccttttcacctctcaagaagagaaccaagtgcttgcaccaattcagtatgcttgtttttcaccaagcatagatgttggatcatcagaagttcaatgggctaatgatccaagcaaagtggaacagccaattgtaaacaagaaatcaagacgcaaatggggactaactgaagatgtggtcctcagcaatgcatggctcaacacctccaaagatcatgtcgtatccaatgagcaaaaagcaatatgattcttgcaccgtatcgctgcctactttgctgcaagtcccaagctagaagggatggaaaatagattaccaaaatgttgtaaagatagatggtctaagataagtgagggttgttgcaagttcgtaggaagctatgtggctacaaccaaagagaaaaccagtggggagaatgataatgatgtgatgaactttgcccaccatagtttccacaccgattacaagactaagttaactcttgaacatgtttggagggaggttatgtttgatcaaaagtggtgttctagcaatgctttaaatgtaccagccaagcaaagaaaacaaaatgaatccgtaggagatcatgtgacagttgaccttgaagggtatcaaacacgccccattgatgtaaaggcagccaaagccaaagccaaaggtaaagctaaaacgaggcttactgtggaaggtgatgcaaacaacactatgacagatatgcaatatatttgggggattaaggagaaaaatttaatattcaaagagaagccacttaatggtaaagagaagtttctctctgaaaaaaataagctaagtaatgagagattactagagagtctcctaaccaaaaatgagtctgtctctgacatcgagttggctcttaagcacaagttgattactaacatgttgtcctaagtctatgcttttgagtttatgttcttgtttaagttgtattatatattttaagtgtttcggttgtgttctatgctttaagtattatgttctgttcttttgtttaagttgatttcggttgtatttcagttctaatcattaatgaaatgagtttattactttgtgtgttatatacttttaagtgtttacagttgtgttatatgctttaagtattatgttcttttcttgtgtttaagttctctaacttgtatttagtcttatgaaatgagttttgagttgctgggtctagaaaatttgaatagtgccgacatcacttgtacaagaagacaccacaagttttgcaaacaccacaagttttgtttggtgtagagacaccacaagttttgtctgtatttttgtgatgacaccacaagtttcaaaaagaccactagtaatttgttttcaattattgtacaccacataaactttatattttgttcgaccaaagagcacttgtatttcagttgtgtttctatataattaaacaatcttcttctaaacaaagaacgcatttctcctagacaaacgaaaaatcttcttctttactaagaagttatatttattgacttctacacaatcttttttttctcctaaacggttctatcttttttatcaagctactttaccaaatcatatctttttgaaatccttcctcttttcaccaaattattcctctttatttccttcaaataaagacactacacaatcttatctttcttattttcttcaaatcattcctcttttcaccaaaaaaggccttgtactacttccacaaaaaaaggatcttcttcatcttacaatcttgacaaaatgcttgacgataagtttgatcaatattttgatgaaaccttacagagatatggcacgtattttttgatcaatattcttataaacccttacacatccagttagaggctattgcttctcaagatctttggatatggcacgtattttttggacctccaggtaccttaaatgatatgaatatacttgatcgctaactagtttttgatgatataatataaggccgagctccaaaagtgaaatacgtaatcaacagaaccgactatcatttagcttactatctcacatatggaatttatcctaaatgggctacattaatccaatctattttacttccacaaggtgacaaagattctttatttgctccaagtcaagaagcttgacgtaaagatgttgagcatgcttttggagttttgcaagctcggtttgccattgtcaacaatcaagctcttatttgggataaagaaaatataggaatgatcatgcgagcatctataatacatcacaatatgatattggaggatgaacaagatgggtatacttagtttgatgcatcctaattcacacagtaggaatcaaccacgtcttcacaagtggatttcaactattctacagatatgccttcaaatctaggtaatattatggcgtctcgagctcgagttcgtgattgggctttgcatgaacaattgaaagatgatttagttgagcatatatgacacaaatttggcaggaatcaagctaacaactaatcgttattctggttttcaatttttatgtgatggctgttaaaaatttaagggtgtgattggaagatgcttctaaggctttaagagcatgtccaatggtaggatttaagctggttctaaactgttaaaagatttaaaatttaatatctgtacactattatttcagcaatgataaatcaactttaaccaatattgatgtgttatattacactttctgccatcgtgatttcagcctaagaaaatatatactagagcttcaaataaataattttacactacatgacacacggatcctctcctggatcattggagcatccaacgtagattcattaacaaatgatccaaccacccatccaaaaccgagtttatattaaggaccttattttccttcttcagagtccaaccatataaacaagcccattgtcgatatatacatatttgaacattttagtggagggaaaatctgttttttacataatctgcataaaatcttctaaacaaccaaatcaaatttatcttcaatatcgcaactcagttttccatgtacttggagtaagaaacgaggtaacttcattatatctaatactagttacgatttcataaaatcttccaaaaacaccaaattaaatctatcttcaatatctcaattcagcttgatatgtacttggcctaagaaacgaggtaacttcattatatctaataccggttacgatttcttatcttcaaattatttggatttgtttttagaataatcttaaattctattttgattattgaaacataattataccattatactaaacttggtctgaagacaataaatacatacatcatttacaaccctaaacatatcagcctactaagcatcataatagcataaaacacaaagttcaccatcaacttttaaacaaaatgaatggggccatggctacgacttaccttactgatgttaagcccttcaagaccagctagcgtgtacaaatcaaaattctcaacacctggaaacaatacacatcccagtcagtagatacactcgaaatggtactagctgataagagggtacgttcttgttacgccatatttaaaaagttcatcataattttatatatatttcttgatgataaattagaatattgtgtttaagggatgcaagattcacgcaagtgtgaaaaagggattggtgaaaaagtatgaaaggcacgtagcgcttgatcagtggagagttattgaaaacttctctttgggtcaaggaaggggacaattccgagtgactgatcatcaattcaagatggcttttgttaaccatacatttttctcagcatgtgtttccatttctcatgatgcttacttgacatacctacgtttcaatccatcaatgttggtgcattgaatccattctatttggttggtaagtattttcttaatattatagtctgctaaactaaatcttgatcaagttatcattggatctaagacaaacgtattcattgcagatgttcttggtcaagttttcaatatggggaaaattgacaacatgattgtcaacaacaaatcagcaaagaagctcgaattggagctgaggaacgaaatgtaagtaaagagtttcgtttattttcttagtttaaatattacttatgtctaaataatgtaaaatggtttttaattaaagcaatgatcgcttgccatgtactttgtgggaaaatttgctgatcaagtaagtcaagcatgtgagaattcaagtggtgaaattgttgtttgcctaattaggtttgccaaaatcagtactttcagaggtaatagctaaacaactatcttaaatcgatttaataatatttatgaagaaaaatttacctttaccatgttttacatttttgtttcatatgtaacaagggagaactagattacaaatgcttttgatgcttctgttgtcgtcattaatccagagtatttagaggtggaattctttaaaaacatgtaatcactaagcctatactatgtgttttccttgtaaaaatgatatccacatctacgtatacttaagttggtgatttcatggtcttgttgtggatacagtttgcgaaaggatggtcttgaactcacaattgccgagactaaaccaaagcttgaattgtctgtttgaagtgaagattacttcgagcactatcctaaaaaatctattgcctgcttacttgatttcactgaggtagacacattaactattattgtgtgtttaaagttactctggaattaagattctatcagatgatttttaatacttttgcatgtattcagactcagaaatgcaagatattgtgcaccatctttaaaatagatggtgatatgggttggttttatgttggatgcaagaaatgccgcaagaaagttgagatgaacaagaataacgataccaccattgttgttaaactaaaaaagcctacctttcggtgtcctaaatgcaaccttaacataacataagtgattccaaggttcgtggtctcactcttgtttaggatatttcacttgattcatacattttacggtgattaagaaactaaataaccaaacatttggttaaaggtttaagttccatgttggagtcatggatcatacaagagatattcaatgtattatgtttgatggagctgccacaaagattgttggttatttagcatatgatcttctagatagtgtatatgatgatgatgtgagtaataacaatacagaacaagattgtcattttaaaattttatcattaagttcttatattgtgtcatttataattcatatgcaggatcctaaaaaactgcctcgttctatcaagaacttggttagaaaaacatttcagctacttgtgtgtgttgagaatgacaatttttttggaagtaatgatacatacagggttggtatggttttgtcaggtgttgacaatgtgaagatagaggattgatatgtcctggtttttactcatttctaacatagtttcagaatggtttttagagtctttctagtctttttcgtatgttttgagtcatttcaggtgcacttacacatttgggagctatgaagcataatatagaattttggaggcttttcagcaatgaaaattatcaaagacgtttttcacgcgatggtgtcgatcgacaccacacctatgtcgatcgacacccgtatttcggctgatggaatttctgatttctgcaaagtctttgagaagccttgaagttttccttatttgcaaagtagtccctgcacgtttttagtcactgatatacctaattatttggtcatttgttagacctaagttttgatattgagatacacttttagagaaaagaatccaatccttgcagagaggattctgaactccttttactctatttctaattcatcaatgcaaactattcagattatgatttgtgtttctgttatcatgtttgagtaatcaccttgttgggtttagggactctcaatagggatttagatggatttgtagatcgaaaacaacttaagattattcttagagttcttcatcttaattattcttattgctagttttagattgatcacctaaaacttgatattagataataagtatgcccaccataggtacttgttatttgaactatcatagatgagcctaggcatttaagaaagaacaggtaggctcatagaagggctctggtttagatactatgtgaactaatcaaactttataataatacatgctttagtataggatttctcgccttctctagttatcttagctctaagtataaagagtttcgcgtaacaccagcgattactctaaaatcatagtttgagttcgagaacggtacgataacaatcctaatattagctagatgtacaatttatgtatctcccgagacaattccttagacccgacgctttaatctcctgaatttacaactcatttagttgctttattgtcttttactttgtctagcttatttgaaaacatcataagtctattgtgtgaacatcgagagctcagtgaaattcgacccttaagtgctaacaacaatctcttatttgagggactaagcttaaggcaatttgaggtatatcaaatttggcgtcgttgccgaagttctcttttagttcaccatcacactaggtgtcattttaagtctagatacttcttttctatcacctattcatgtgcttctttgtcttttggtctctagtgttttaggtaccttcatgttgagaatcacgtttcaatagcagactttcacgatagtgttgaccgacaccatcagtgtgtcaatcgacagcctttgcagaaccagaaagctacaataggcgactttaacggaactgatctcttctacaccaaccgttcaacattcaagctaccaccatttaaaagagaagaatttgctatacaccctgcctattatgatcttgtatcaagaggaaagtttagaggagctctagatgaatcaccatttgatcatttggaagtcttggaagacatagtgtcctctactaatacaaaaggtgtaccagctgattaccttctttgcatactcttcccccactctctcgcgagcaggggaacatcatggttgcgtcaactagaacaaggttcaataaccaactggactgatttaaagaatgcattcatgaattaattctttgatgaatctgtgatagaggcacttcgtttgcaaatttcttcggtcactcaagctccagccgagtcccttcgagcagcttggctccgcttcagatcttatcagagagaatgtccccaacatggcttccaagagagtcaactcatcaatctattctagagagggatagcaaagccatacaagaatcaactcaatgcagcaagctaatgtaacttcatgacaagaactactagtgaagcattactcctcatcaccaatgctttaactagtctttcgacacaggaagttgacacaaaacaaagaatttcagctgagattgccactgcaagcaaagagaatcatgtttcagcaatctctgctcctttctaagccccccaccccccacccctccaccctccttagacaaccgactcgactccatgcttgcgcagattcttgcgggccaaacaaagctcgtggttgagtttaatagcaagtacacagatcttaatgggaaaatcaacaatctgcaatctcatatccctgagccttctcctaccactgcatcagtcaatgcagtcacactacgcagcggaaagcagctcaacccaattcttcagcgcgaacgttcagctcaaacttcatcttttcgagttgtagaaaaagaatcagtgtagaatgatatagctcaaattgccttaagcttactccctcaaataagagatcgtcgttagcacttaaggatcgatttccactgagctctcgatgttcacacaatagacttatgatgtttttaaataagctagacaaagtaaatgaatgtaaaagtcaaataagcaagtaaactagttgtagattcaagtgattaaagcgtcgggtctaaggaaatgtctcgggagatagataaattgtagatctagctaatattatgattgttatcgcactgttcttgaactcaaacaatgattttagagtaacaggtggtgttccgcaaaactctttatacttagagctaagataaccggagaagccgataaaccctatactaaagcatgcattattatccagtttgattagttcacctagtatctaaaccagagcccttctatgagcctacctgttctttcttaaatgcctaggctcatctatgatagttcaaataacaagtacctatggttggcatacctattatctaatatcaagttctaggtgatcagtctaagactaggaataggaataatcaagatgaagaactctaagaataatcgtaaggggttttcgatctactaatccatctaaatccctattgagactccctaaacccaacaaggtgattactcagacatgataacagaaacacaaatcataatctaaatagtttgcattgatgaattagaaatagagtaaaaggagttcagaatcctctctacagggattggattcttctctcaaaatgtatatcaatcaccaaaacaaaacttaacaaaacctaagtctaacaatgaccttaaaacctaattaattgtctaaaacacgtcttgggcctaaatattaacttctaggcctttttggggcgaaactgagcccgtgcacatttcgtacagtttcgtgcaaacttcgtgcaaaactcgtggcgaacccgtgtcgaccgacacaaatctgttatcgatcgaaactacattcaagactggttttctgctccgtttttgctccaaagtgtcccataatcgcttgataacccccagaacgtacgagacctgtaaatacaccaaaaacactccaaaagaactataaagcactctagagactctataaaaacaatcctaaatcatagataaaataggtaaaaatagggatatatcatcgatcgatacatcagggtgtcgatcgacaccaattactcttgacgactctgttttgcctttgtcgagtgaaatcgacaatttcgcgaaggaggaggaaattattcccgatagtgtcgatcgacacacaccccctgtcgatcgacacccagctcattcagacaatgtgcaaattccagctgaaaccaagtcagcaaatcggcgaattcctttccccaagagtcctaaaaagttaagacaagccttacatgatgtcagatgcaagcctgtgattgataagctgattgttgagatgcctctagttgaagcaattcatctctctcccacaataagaaggtatgtcaagacaatggtcactaagaatttgacgaaagaatgtagtgttatgatgatttcagagcaaggcagcgatatcattcaggaacaaattccaagaaagctacctgaccctggaacctttgtactaagtgtcaccatcaaccacaattacttcccaagggccttatgcaatctcggttctagtgtgaatctgaagccttgttaagttgctatgcgtcttgggtattccaatcttgagcctacctttatcactcttgtgttggcagatcgttgtacccgaattccagatgggattcttagcgatgttcttgtgatgattgggaagagcatgattcctacagactttgtagtcttatcttatgaaaaagaacctaaggatccattaatccttgggagatctttcttgcacatagctggggcaattatagatgttcgacaaggaaggatagggctgaatgttggcgatcttactatgcagttcgatatgaacactttggtcaagaaaccgatcatataaaggaattctttcttgatagattctttcacttcatcagcttcagatagtattttagagatggaattagaagacccactagagcgagttttggtctcttccatagaagatagtgcatatttggatagtgaaacttctacatatactaagctcctagatgagactgaacatgtgatgcaacttataattgaagaagatctttcatctgtgactccaacaccgactactaattctgattgggattcaacaaaggctcctaaaatcgatttgaaaccacttccaacagggctaaggtacgcttttcttggtgaaaattctacttatcctgttattgtgaatgcttctcttaatcccaaaaaactcaccttattgctaagcaagctgcgcaatcattgcaaagctcttggctattctcttgatgacattgcatatatctctcctgatgtttgcatgcataggattcaccttgaggatgagtctaagtcttcaattgaacttcagagaagattgaattcgaatctgaaagaagtggttaagaaagagattatgaagctgtcggaagcagcgattatctatccgatttcaaatatgagttgggttagtccagttcatgtagttcctaagaaaggaggagttacagtagtcaagaacgagaaagacgagataattccaactcggactatcacaagccatagaatgtgcatcgattacagaaagctgaatgctgccacaaggaaagaccatttccccttacaatttatcgatcagatgttggagaggttagccaatcataagtactattgctttcttgatggatattcagggttctttcagatcccgattcatccagatgaccatgagaaaaccactttcaccttcccctatggtacacttgcttatcggagaatgcccttcggtctttgtaatgctcctgcaacatttcagagtggtatgatgtctatcttcacagacatgattgaggatatcatggaggtcttcatggatgatttttcagtttatggatcatcgcttgaggattgcttagaaaatctctacaaagtattaacaagatgtgaggagaaacatctggttttgaattgggagaaatgtcacttcgtggtgtaggatgggatagttctcggtcacagaatttctgagcatggtatagaagtcgaccgctctacgctgcaaagaagtcaaattcgagtttacacaagagtgtcatgatgcctttcatgccatctactaggcaagtaggacacttgatgatgctcaaaggaattatgctactacggagaaggagttgttagctgtggtgtttgctttcgagaagttcctatcttatcttgttggatccaaggttattgttcacacatatcatgctgccttgatgtatttgatgcaaaagaaagatgctaagccaagacttttgagatggattttgcttcttcaggaatttgacatcgaggtaagagataagaaaggagttgagaatggtgtaacagatcatttgtcacgcattaggattgatgatgatgtccctattaatgatttcttgtctgaggagaacatatacatgattgatacaactgaagaaggtgactgcaaatgtgataagttgcagaatcgagcttcagtgtcgatcgacactccttcaatgtcgatcgacactcacttttcagaggaagttgatattcgcagttgcgcgatggtgtcgatcgacaccactgaaactgtcgatcgacaccctccctatcagacaagaaattggtcaccaactgagaactgcgccaccacaacggttgagaaggactacccatggtatgctaacattgttaattcctagctgcagatgttgaaccggataatttcacagattacaacaagaagagattcctgagagagattaggcgatattattgggatgagccttatctctataagcattgttctgatggagtttataggagatgcattgctgcaacagaggttcctgatatactatcgcattgtcacagctctagctatggtggtcattttgcaaccttcaagacagtatccaaagttcttcaagcagacttttggtggcctacaatgtttcaggatgcttagaagttcatatcgcagtgtgatccttgttagggaaggggaaagatcaccaagcgtaatgagatgcctcagaaatttatcctcaaagttgaagtcttcgattgttggggtatagatttaatggggtccttcccaccatccaacaagaatctgtacatcctagtagctgtcgattatgtctccaagtgggtacaggctatcgctagtccaaggaatgattgagcagttgtcgtgaaacttttcaagtctatcatcttccctcgttttggagtgccatgtatagtcatcagtgaaagaggtaagcatttcattaataagattcttgcgaaattgcttcttcagtatggagttcagcatcaagttgctactccctaccaaccacaaacgagcggtcaggttggagtttccaacaggcagatcaaagagattcttgagaagacagtgggaatatcgaaaaaggggtggtcttataagttcgatgatgcactatgggctaacagaacaactttcaaaactcagcttggaaccacaccttttcattttctctatggtaaagcttgtcatcttcgagtggaattagagcacaaagcagcttgggcagttaagatgatgaatttcacatcaaatgagctggagaaggagacttattcagttgaatgagcttgatgagatacggattcatgcctctgacaactcaaagctctacaaggaacgcacaaaggcttaccatgacaagaagatcctcactcgaacctttgagcctaatgaccaggtacatctttatgattctagattgacattatttccaggaaaattgtcttctcgttggtcaggtccctacacagtccattcggttaggccatatggaactatcgttcttacagacaacaatggaagatcatttgctgtaaatggacaaagagtcaaacactactaggctgaagccgagattccagtagaaaatcctttggatcttcaggacgcacctgttgattaagcaactgcagaatcaagctattgaatataaacaagcgcatagtgggaggcaacccactagtaagtatacttctttttcattctttcattcatttgagtttaacttcggatttttggttttataggaacctttggttttgctttgtttcagactatttgttatttgttttgaaacttgttgcacctatcatcttaagctttgttgaacctattgatgtgtgttttagtgatttaacagtctaactggaggatccatgtgaaaacactaacccaagctctacaacaatgagctgaattcgcaaagctatgcacaaacgaccagggtgtcgaccgacaccaccctggtatcgatcgacaccactctcaggtggcaactcacgtttctctaacttttaactattgactatttttctttcgattcctctagcttaataactctagggacaatgttatttaagtctggggaagtcagttactaacttcatcttttcttttcttatgagtcagttgtgtcattctaacttagatagttgttttattgagtcaaaccttttgtctgaaattatgatctatctctggagtttattttagattcaaatcaatctgactaatggaaaatccagaaagccaaccaacaaacttaacgacatccattcccaacataatccacaaaggctggagctaatctcactgctcttccttttacctcatcaaaacggttagtgttcgtgggacttgactccttgttcatacttgataagtcgaccaatgtgataaaagaatgtattcctctcccttgataaaataaaataaaataatacatgagatattgaaaggattttcagacagtgtatatctagtatacgagttttcctttgtttactctctataaggaataagtctgggcgagagaaagaatgccagaaatataaagaaaattaatggtcgatttgttatggtatagtacatgaatgagtctaaaaggttcttaaacattaaattgattgatgagacccaacgatgatagcctagtggatatagttgagtgctttggtatggaatctaggatgttatgtgggctagcggggaattacatggtggtcaggattcgagtagaaatgtttagtgcatggatttggttcaagtggtgaaattgttgtttccctaattaggtttgccaaaatcaatactttcagaggtaatagctaacaactatcttaaatcgatttactaatgtttatgaagaaaattttacctttaccatgttttacatttttgtttcatatgtaacaagggagaactagattacaaatgcttttgatgcttctgttgtcgtcattaattcagagtatttagaggtggaattctttaaaaacatgtaatcactaagcctatactatgtgttttccttgtaaaaatgatatccacatctacgtatacttaagttggtgatttcatggtcttgttgtggatacagtttgcgaaaggatggtcttgaactcacaattgccgagactaaaccaaagcttgaattgtctgtttgaagtgaagattacttcgagcactatcctaaaaaatctattgcctgcttacttgatttcactgaggtagacacattaactattattgtgtgtttaaagttactctggaattaagattctatcagatgatttttaatacttttgcatgtattcagactcagaaatgcaagatattgtgcaccatctttaaaatagatggtgatatgggttggttttatgttggatgcaagaaatgcagcaagaaacttgagatgaacaagaataacgataccaccattgctgttaaactaaaaaaagcctcccttctggtgtcctaaatgcaaccttaacataacataagtgattccaaggttcgtggtctcattcttgtttaggacattttgctcttattcatacaatttacggtgattaagaaactaaatatccaaacttttggttaaaggtttaagttgcatgttggagtcatggatcatacatgagatattcaatgtattctgtttgatggagctgccatagagattgttggttattcaacatatgatcttctagatggcgtatatgatgatgatgtgagtaataacaatacagaacaagattgtcattttaaaattttatcattaagttcttatattgtgtcatttataattcagatgaaggatcctaaaaacctgtctccttctatcaagaacttggttggaaaaacatttcagctacttgtgtgtgttgagaatgacaatttttctggaagtaatggtacctacaaggttggtacggtctggtcaggtgttgacaatgtgaagatagaggattcatatgtcctggtttttactcatttctaacatagtttcagaatggtttttagagtctttctagtctttttcgtacgttttgagtcatttcaggtgcacttacacatttgggagctatgaagcataatatggaatttttgaggcttttcagcaatgaagattatcaaagacgttttttcacgcgatggtgtcgatcgacaccacacttatgtcgatcgacacccttatttcggctgagggaatttctgatttctaccaagtctttgagaagccttgaagttttccttatttgcaaagtagtccctgcacgtttttagttactgatatacttaataatttggtcatttgttagacctaagttttcttaagcttttttttttatattgagatacatttttagggagaagaatccaatccctgcagagaggattctgaactccttttactctatttctaattcatcaatgcaaactattcatatttatgatttgtgtttctgttatcatgtctgagtaatcaccttgttgggtttagtgagtctcaatagggatttagatagattagtagatcgaaacccccttaggattattcttagatttcttcatcttgattattcttattattgcttgttttagattgatcacctagaacttgatattagataataggtatgcccaccataggtacttgttatttgaactatcatagatgagcctaggcatttgagaaagagcaggtaggctcatagaatggatctggtttagatattaggtgaactaatcaaacttgaaaataatgcatgctttagtataggatttctcggcttctcttgttatcttagctctaagtatagagagtttcgcggaacaccaccggttaccctaaaatcatagtttgagttcgagaacggtgcgataacaattctaatattagctagatctacaatttatttatctcccgagacaattccttagacccgacgttttaatctcttgaatttacaactcatttacttgctttattgtcttttactttcatttactttatctagcttatttgaaaacatcataagtctattgtgggaacatcgagagctcagtggaattcgacccagtgctaacgatgatctcttatttgagggagtaagcttaaggcaatttgagctatatcaagcatcccaataacttagagagaacaatcaatctttctcagctcatcctaggcagtgaggttaaactctattttggttttgttttgtactacatattataactatttactgaaacttttaatcctttcaggcaatgtacctgctcactaacagcagtagtgaaatgttagtatctggcatgactactccatcttccaagagagctgtggaggatacatccatggagagatgttccactaccaagaagacatgcttgaaaccaataaagttggagaaacttgatggcaataaggagacagagcttggaaaggaagaagacgagaagaataatgggggaaaatgatgtaggaaaagacaatcctgtttccgatgaaccaaattgcgctgcattttgattgtggattttccaatagctcattggagacaaactaatgtcggagagaagatattcatgtttttgtttttttcaaacttattttggtgtttctgttcttttggtatttatttaataacgcctacttagggtatatcagagtaaatgatttactctgattagtagtcaatctaggttcgtttcatgttttttcaccactttcatcaataagatcttctattttaaaagattctctgttacttttatttttgagatatgctataggaaaaattaactgacatttttctttccctgagaacactgcccatcttttccatctcctattgtttgtttatcaaccgataaatgagaaaacgattatattttacagtaaaaatatatatacaaagtagatagtatttatgattaggggaaaacaactctctaaactaagtagtttaatgtgacttgatctaagctgttaaaaacatatatttatagttaacacaaattgtcagtttagctccataaatttatctcaaagtttgaaataaagtcactaatatgcaggcaataaacaatgtttatagaccgtatatgttctttattggtataaagaaattttagagagttgtgatcgtcatattttggtacctatatttatggtattcagatattctatctcgacaataattattttgttaaacataagagtgtatacactaaatattcatatgttagttaccaactatatttgtgacctatatttacggtaaaaaattaaaatatcttaacaatatattttagggacctattatagattctcaaaacatcacaaagacctcagccacattcacacaaaacttttgatctttgttcaagaatacattatcttcccatttcttacgtgaatcattgcaaattaagaattcacaagtaatttataatataagatactccactcttggtgatttttttgaaaagatcttattgtttttcattattaatacactttcctttttgtatactatattgtaggatgaggaagagaaaaaatggtgcgtcaaatgatgaatcaaagaatacgaataaccagcgtcatatgtcagatattgggaatgaaaatcttaatcctaaccagagtgctagcagtattcccacccatgttcaaatttttggataatatcttgagtcataagatatttaaataaagtttgataatatcttgaattataagatatttaaataaagagattacgactaataattctaggagttatctagaggtatgttaggagttatctaattatagttctaataggattaggagatggtattaaatatatatatatataaggagatgtcaaagtgtgacataacttatgagactaagtgtttgattgagagattgagagtttaaattttgagagaattttcctaaactaataaagagagatattctttgtttttgtgttcttaatctttccttcaaaacaatatttggtatcagagccgtttctaaaatcgaaagaagaaaacgtttttgacatcaaaacatgggagatattgttgcagtgaaaccaacaaagaatgaaccatcatccattacgtgtcatatgcttaacttaagcaattacacagtttgggaacttcgtatgcaaataacatttggaatttataaggtgtagaagaccattgatcctagaacaaccgactttaataagaacctcatggctaggggtttacttgtccaatccataccagaagctttcacactacaagtagggaatctacaaactgcaaaggaagtatgggactcgataaagactagacatgtaggagcagaaagagttaaagaagctcgagtacaaaccctaatggcagattttgaaaagatgaagatgaaagaagcagagaagattgatgacttcgccggaagactctcagaactatctacaaaatctgcaccccttggagtcaatattgaagtccctaaacttgtcaagaagtttctgaatagtttaccaagaaagaaatacatccacatcattgcctcattagaacaagttttggatcttaataacacaacgtttgaagacattgttggttgcatgaaagtcaatgaggaacgtgtatatgacccagaagaggaaactaatgaagatcaaaacaagttgatgtatacgagttcagactcaaaaagtggaaaccgagattatcaaggagatttttggtatagaggacgtggtggcaaaggaaattatagaggaagaggtcgcagacgaaacttagtcactatgcctctcaatgtcctgaccaataaattaagttgcaagaagcacaagagaatgaatctagtgacatcaaagagacagaaaaagcatatgcactcatgatgcatgaggtagtttatttgaataaaaagaattgtgtacctagcaattttgagacaaacatcgaaggagatgagtattggtatctcgaaaatggagctagcaatcatatgattggagataggagatattttgacaaacttgataagtctgtaacaggaaaagtgaggtttggagatgactctaggattgacatacataaagggaaaaggaacaatagctttcacagatatggatgggagatcaagaataatgaaagatgttgatatggttcaaattacctagaactactctctcaaataagagatcaattgcagtactctaggatcaaattcacggagttcttttgttcaaacagtgagttaaatattgagattaagctagcagggtatgagtgaaaataaaagagagcaaagtaaaaagacagcagattgattgtgttgtaaacgatttaataaagaggtaggaacaaggtattctcaggaaactattggttagtagatctaatgaaagctaggttgttatcgaaccattcttaaactcaaactctaattatggaataaccggtgggcgtgccgcaaaactccctatatctatagctaataataaccagagaagccgagaaagtaccaacctaaatatgcattcttaacgagttcaattgttcatcttagtaataggccaattcttattacacacctataaaccagactcatcaaataatagatccaactatagatacttatggcgggcatatctattgtcttgattcaagatctagttaattactctagatctagcattaggcataattaaagttgaagaattctacagataacctagcaaaggggacaatctactaaaccatatgaatccctaatgagaaaccctattcctaacaagtagactactcagacatattgaatgaaacaaacaacataactgagatataaagaataaacacagtaaatagagaagcggaaggaagggatctcttcaccgtatatagatctgaatgaaactctgaagacaatcgatgaatagcttatgtctctcacaataaggtttgcaaacaacttgataaaagacttgataaaagaaacttaggtctaaaaacaatatatatagaccttaaaaacgtccagggactaataatccaaatagggaagtctcctggagcaaatttgatcttctgtcaatttgaaagcgtctagggtttttgccgggccgaaactggtgtcgatcgacaccagtttcggcccagcgaaaaccctagacgctttcaagtttacataagctcaagtttgccccagaagatttccctatttgtattattagtccttggacgtttttaggactatatatattgtttttaaacctaagtttcttttataaaatcttttatcaagttctttgcaaaaccctattgtgagagacataagctattcatccattgttcttgagagtttcattcagatctatatacagtgaagagatctcttctttccccttctcaataagctattcatccattgtactctctctcaaataagagagtagttctaggtaattgatctcttatttgagagagtagttctcggtaatttgaaccaatatcacatatgcctaacaagtctaatcaaatcctaaccaacatgtacttctctacaagcttacacaacattctagattccatacctaagttccacaactatacccaccaggctttcatcgctgggtctcatcaaacaagtcaacattcaagatccttgtagactcatttctgtactataccatgataaattgaccattctttatatattttttttctttttcggtgttctttctctccccagacttattctttttagagagtaaacaaaggggaactcgcatattggatcgacaccctcggcatttttccgacctttgtaattgatcattccaaataatgtataataatgggttcataggaaacattcctacccctatacactatctgaaagtcgtctcgatctctcattatatttttctttttataaggggagaggaacatatttttttgttttatcacattggtctcaatatcaagaatgaacaaggagtcaagatctatgaataccaaccgtttgaagaggtaaaaggaagatcagtgagattagcttcagccttagtggttgagttggaaagtaggatatcctcaagtctgttggtttgccatctagattttccaatagtcggattgactcgaacctgcagcactcatcaatcaggcaataaacaagagaaatatatatcatgattcctaactaaactaaagaaaacaatttttttcttcttttttttggaatgaaaagaaataaccaaatgaactgcaaaataagaaacaacaataaaagcatcattagtaagagcctcccccagacttaaacgacattgtccccagtggcattcaggtgtgtgttgatcgacactcttctcgtcacctttaagaacaacaggagagacaagctttcgaggaactctaggcttgttatcttgtgaagtagtcttcgaataatccaaagaattaatcaaagataaaacaggagaagagagagaagagaacttatcacataggtcctcaagtggtgtgggctgaagaaaatgtgcagaatcatctgtctgtgaaacccgtgggtgtcgatcgacagaggtagtagtgtcgatcgacactgttgccctaccactctcatttgcgagttgagctgatgggagcgttgtgtgtggctctgtggtgggattctgatcagtttgaggaggtgtgcttgtgctggaagcaatgcaactgatagactttataagctctgaaccatccatgccaaactccatcttcacatcaaacctagcactagctgtagctaggaatgctcttccaaggataagaggattcttgggttccttttcatagtccaggaccacaaaatcagcagggattatggagttaccaaccttaacaggaacatcttcaaggattccttcagggattcgcttggaacgatccgcgaagagaagagtgatgcgagtaggcctgtagtgagtcatgcctagtctctcagcaacagacttaggcatgaggttgatgcttgatcccagatcacacaaagagcggctgaatctgcttgtggagatagagcaatcaagaacaaagctacctggatctggaagcttctcaatggtctgaccaggagtaatggtgcggatgtactcaactatgtctactctctgtgccttctccttcttggcctttggcagcatgattgtagtgatgtctctggtaagcatcttagcttcatctgagctaattccattgtcaccaagtcgcttgacatacctgttgagtgaggcagaagatgtctttgaagcatccttaggaagagtatggaggatcttctccattatggctgtgcacttggcagcatgattctcctgcttagaacgacgcctcctcggataagggacaggaggagtgtagacagactcgggctgcataggtatttgcacctcacagggagtccagggaaaagtaatgagttaaggtatggagaggtctccattatgacaaactctttttcatgtctcagtgataagggagagacatgggaggatgttgatgacatagaaacagagaaagatgaccataagaaagaagaggatacacaacgtaaggtcgatgcgggaaataaaaatgaatatcaagaagctggagggatgctgagacaatcaattcctagagcttcgaaagatagtcacaagttcatctcgacaagtacaacacagagcactaggatccccaatccaaagaatctgagaacacgtcaaactcaaaaaactcatgaatgtcaggctttttttggaacgtttggggtttcaataaaacaagtaagcatggagtggtgagaaaatggatgaaggaaggcaattttgattttggttgtttactagaaacgaaagtaaaggaaggtagagcagatcggataattaattatgtgttcaaagattggtctttactctcaaattatgaagagcatcgacttggtaggttatggctggtttggagaaacaatgtaagtctcacactgctttataagattgcactacttatcacttgttcagtctatgtcgaaggtagacatgaggaattctttgtctcttttgtttatgcatcaaactttgtagttgaaaggaaagcgctttggagtgataaaagaaaccatcaagattctcctatgtttaaagacaaagcttggcttatatgtggggattttaactaaatattggaaggtgatgatcattctctatatgattcctcaccttttattccatcagggatgcgagattttcaggatatagtcttatactgtgaactcacggatctaagctatcaaggtacaagattcacttggtgtaataaaagacaagagggtaccatatgcaagaagctagatagagtattagtgagtaagtcatggttacaaaaatatagtcaatcatatgctatatttgagccggtaggatgttcagaccacatgcgttgcagatttcacctgtcaaaggaagtgtagagagtaaaacgacctttttaaatttgtgaatacagtgacaacgtaccttggctatcatacaacacttgaagagagttggagaacatcccctccactttttcactcaacatctgcaatgtttagtctgtcaaagaaattgaaagagctgaaacctcatctacgaaagatgggaaaacagatggttagtgctatatcaaatcgtattaaagaagcctataagacactttgtgacctgcagaacgtgacaatgactgatctaacatcgcaagcattcacagctgaggcagctgcgtatgagaaatggcggaggttgttagacattgaggagaggtacttgcaacaaaaggcaaagcttcactggatgagaataggagatcagaacaatacggctttctttgctgcagcaaaatttaaggaagtaagaaacaatatcagagaaattcagtgtgaagatgggaccatagcatagactcaagatcgcattaaaatagaagcagaaagatactttagagattttctatctatgcgtagattatatccaatggttgagacaagatctagaaagcattgtgagctttaaatgtgatcaagaagacaagaacatgctgataaaagaagtattagaggaggaagtaaggaaaacattatttgtgatgccggttaataagtcaccagggccagatggattcacctctgagttctttaaggaatcatggtcaattgtgggtaaggatttcgtggtagctaaccaatcttttttcaagaaagggtttctaccaaaagagtaaattcaactattctagctttaataccaaaaagaaagaagcaaaagtaatgaaagactacagaccaatatcttgctacaatgttctatataaggtcatatccaaaattctcgcaaactagctcaagaccattcttccaaagttcatagctccaaaccaatcggccttcatcaaagacagattgctaatggagaaccttttgcttgctacagaagtaattaaagattacaacaaagattcagtctctccacgttgtgctgtgaaaatagacatctctaaagcatttgattttgtcaatggggttttttgttaaacacgctgcgagctctcgatttcccagagcaatatgtagattggatacaaacctgtgtcagctcagatctttctcagttcaagtaaacggtgaactcgcatgttattataatagccagagagggcttcgacaaggctgctccttaagcccctacctattcgtcatatgcatgaatgtgctttcaagaaagatagataaggcttttcatgtaaaacgaattgattttcatccaaaatgtaaacaaatgaagctcacacacctctgtttcgcagacgatctaatggtttttgtcgaaggaaacaagaaataaatagaaggagcaccgaaggtctttgaagatttcgtagttcactctgtcctgaagattagccttgaaaaatctacgctttatatggccgatgtcaccacaagtgtaaaggaggagatcgtggaacaatttccattttaatatggagtactaccggtcgttatttaggattgcctctaatgacaaagaagatgactacaacggactaccttcctctattagagaagattcgcacgcaaataagttcttggacagcgagaactctctcctttgcggggcgactccagttgatcagctctatgattttcagcgtaacaaacttctggattgcggcatttcgactgcctaaagtctgggtaaaagaaattgacaagatgtgcgctgcgtttttatggtcgggtccgattttaaatacgaggaaagccaaggtcgcattgtcagaggtatgtactcccaaaagtgagggatgattgggaatgagatctatagaagaagcaaacaaagtatgtgtgttgaagctgatatggaggatactttcagcgaaaggttcactttgggttgattgggtaaacaaccacttaatacgtgatggttccttttgggcggtgaaagacaacataacaagaggatcgtagatatggaagaagttgctgaaatacattaaactagcaaaacagtttcatcgagtagaggttaacaatggtgaaactacatcgttctggtatgacatggagttcttcggggtatcttcatgaaacactaggtgaacgtggatgcattgatatgggtattccgagagcaactaagctgaatgaactgataaagagatcgcgaatacgaaagcatagacgaagggatttaaatcgagttgaagaagaactgtaaacaaagaggcaagcaaggcgggaaacagaacgaatgtcgctttgtggaaggggaaaaatgatttttataagcagaaattttcatctaaagagaaatggtcacaaatccgcgtcgctaagccaataatgcaaggtcatacggaggtttggttttcaaacgctacaccaaagtacgcctttctaacttggttggttgttaaaaacatagttgcaacaggggaaagaatggttaaatggaagcaaaatatggacacaagctgcatcttttgccaagaacctatggagacgagggatcacctcttcttcgtatgtccttattcgagaaaagtgtgggaagaactgatgagtgggcttcttctagacaatttctaggcaagatggcgagatgttatgcggattcttgcgagtaacaacttggacaacacgaaacgattcataattgggtatgtgttccagaatgctatacacactttttggggggaaagaaacagcaggaaacatggagagacaccattaccgacagagaagattgtgaagatgatagataagaacattcgcaatcgcttgagtacactgacaagaggaggagaggagagatatgcgggagggcttcaaatgtggtttgtgtcaatactacacactagataaaaactcttttgaaagtttttaagaaaagtttgcactcgatgtataattttttttttttttgaatataatttaacattaaattaaaaaaaaaaggaaaacagagaatttatgctgctaaagaaatccgaagactaaaaaccgcgtaagtgtcgattcgaagacgcaacttattggtgttttgaagatttccaaattcggcccacaactttctcctatttttaatgaaggcccaacacatttttaagacatatatatatatatatatatatagtttttaggtcattgtttagacctaagcttggagtggctattctccttttatcttttgttcttgggagcaaaaccttgtggagactccctttagagaagatctttcttactctttctcttgatatattgactattgatttcctattcaatcatgttttgttcttctatgatcatgtttgagtagttctcttgttgggtttagggattctcaattagggatttggatgaattagtagatcaaaaacccttttaggataatgatttgtctataatttgcatgatttaggcatttattcttcaccactttgtcattgtttcatccacatttcatctcattaggagtcgttttagtgtgttttgcatacttaggacgattttgcattagattgcatgcgcactgcatatttggttgtttttaggtactttggatgcttttggagttcaaacagaggagaaacagaacagaaagtcagaatgcccaatgaatccttcagcttaagtactctatcgcagcctcggagcccagccagggcaaatcactctatcgcaacaccggagaagctagcagctcagtttcactcaatcgcaaagcgagaggaatcacccatcttacaccactcgatcaccacctcatgacatccactcgatcgcactcgatcgcagggtcgttggaccatacaatctcgtcttcacttcagaccactcgatcgtaaggcggagtccctgatgcccagtttggtcaatgacatactcgatcacagggaatcccatttcagcccatcagatgccaatgacacactcgatcgcagggtcatgacgtgaagattcgctatctatctagtatccttatttgtttcattttcgcttatataagtagcctcttagggttttccctagggcagccattattcatacaacttttatcttttgcaactttcatagccgcattgtttctcctgcgactttgtattcactttcaagtatttgatattcaattttcgtttaagtctttcatcatttctgttatcatgttttcaatcgttgctttgctattgtctttgattatgtctgagtagtgaaccgtatttctgaggatgggatagagtagttgtggtttactttgtcgtttaaggtggttgagtttagaatactagaatcccttctggattagttgcgcttattgcttgtttcactggctaatgtggaatatgaatccagacgttccagcgctcagaaggcgtttaatggaacgttggatctattaattccagagatattcgcctttaccccaagggattcgcttgtagagagtgtattggctttaacaagttgattcgatattgcctgcttagttagagaacgcacatgggaattaggtcagtgtctagctttgctttaggatttctatcacgggagtgaattaatctgttgttgaacttgttgtctacggatagcttctgtgaagttttgtcaaccgcctgaatagattaaggagaccacactattcgattaccccgtccttaggaatcgtttatccattttactgcctgttatcatttctgctttgttattcacatgcctgttattgccatttctgcttttagtttcatttcatttatgttattgcatactaggactgttagaaccaaccaactctctacttggctttacttaaagctttctaatcatatctcatctgtttgcatcacaccggattggattgacaacctaaaatactacaacaacatgatagtgttttaggattaattaagtaaaatcttactatcagataatatatttagaattcttcatcttcgattgttcttaatgctagttctagagtaattaactagaacttgattttaggataataggtatgcccaccataggtatctattactagaactatcttagatgagcctagtttttagatgtgggctagcgtcaattacttaggtgaacttatcaaacatgattataatgcttgcttagttctagggatttacaagagagttgggatcaatactattaagcatagtgagtttcgcggaacaccaccggttactctatattagtaatttgagttctagaatggttcgataatattcctaatttactgctagatctactattttgatataacctgagaatttccctaaacccgacgttttaatcatctgaaccttcaatctcttttattgctttcttttcttgtcttttattttataatctatttgtttagcttaattcgaaaccttagtctattgtgtgatctaagagctttgtggaattcgaccataaagtactacaatcaatctcttatttgagagagtggtcttaggattaattttacccatatcaatagtactgactacatattcaacggtgggatcacgtttctaacggttagttcttgacatatctatatgttttggtgacagttttatatggagtaagttgtgaaaatttgtgttgtttcaatgggaaacgaaatcggtttgggctgtgaatttacaggagcctttaggactcatggagtaaggttttggttgatggagaatcaatgtggagctcaagagtatgcagttaaaacccttatagtaagttggtctaataggagagaaaggagaatagaaatgttcttcattttcaactaggctaagttgagggtggtatttgcgaaacatggtatcattatcttttgttttgcttcttgacgcatgatatgtaggcttagatctgattgcataggataagattgtgtgatgatatgatttgatgattattgtttgatatgtatggtgatgatgtttgaccatgatatattatgtatgagaatgttaagtataagtatgtatgtatgatgattatgtatgtttgtatgaaagactggggagaatcgagctatgggccgtggtctccctagtaatgtggatagtgataggctgacgggttacatgcaggtcaagaaacgctgacgagcctgggatgcatgggagtgtctgagccacgagggccaacctccactcatgaggctctagttatcacgaggatgactggatctagcgatacgtatgtatgtgctattatggataagatgcttattatgaatgtgttattcgaagttaaaacattttaggttgattgcttgtgtctaagtttatatgttatgatgatggttgtatagctttagaaagtgttctatgtttcagtgggcatagttgattcccctcactgagtattctttactcacccccttttttccttttttcctcatgatagtaagtgtggggagttatgtgcaatattttgttcgtgtgtggagtttaaagaaaatgttttggcaaaaagcagatgaataacatgtcgtcttggcctatatggaagggcgggtgttacactcacaatcaccacccatgtgttgtgaaactagtcgagatgccgatcttcagtggtgatgatccattatgatggctgcctcgagtagaacaatatttctccttgtagcaagcacatgaagttcagaaggttgagatcgctttcatgagtatggaagatgctgctttgcactagttacaataccttcgttggctaattccaacactgtcttgggtacagcttcagatataattgatgtaacagtttggagaagacgttaccgcatctccgttcgaacaattagcagcttttcatcaaacaagttcagtagatgagtttgtccacgaatttctaacccgggcagctcaaattccgtttctagattcacatcttcagttaggattatttctcctggactaaaagaggagatttgtgtgaaatttcgtccaaacgacatgggagacttatgactgcgattcatgttgcatggtctattgaaaaggagctgaatttttactatgggacaaaaagcaaaccacatgataaggcatttaggtgatttaaagatttgggactctaaatcattccctacggacacttgatcatgggaaaccagttgcgttaagacatacatcttctaatgttgggtcaagcagcaacatgtataggccaaggggtacacgtcaatattcacaccaagaatatctcgatatgaaggcgagagggttatgtttccgctgcaagcaaccctagctattcccctcaacatgattgccactacaagtctcttagagcatcctcaacgggaggatttaagatgtttcttaactaaataaatgattaaaattaaatccaaaataatgactttaggttagatgcgctcttagcgtagaggcgctcttaggtaattgcaatggtgatgtggcattgtttgatgtctttaccttcctactctctctctctctctctctctctctctctgtctccctctcaccggagatggattcttcactatcttctcctcaatcacaaatcctttattgatcaaactattcaattccgtttctatacacgctgctcctcttcttttccttagattccatggcttcaccggagaaatcatctccttgatagttaagaactggagatctctgttatatcgatgaagatggattcatatttgtggttaatcggttaaaggaactgatcaagtactatgttaacatagattgttactttaattgctttagtaaagatttatactggttttggatgtatactttgtgagtcaagggagagaagggattttacaactacagtatttgattgattttttaagaactccaacttagtatattatcattgacagaggtgtatcaaggaatttttttacccagttcaaaacgtaacaaataaaatgtctttaataaaaaaaaatcatttttttacaacttctcaaacaaaaaaaaacgtcctacaaaagcatcctacgatcctttatgtcctggaatctctttatcacaatctcatttgtaatagtattgaatacatctttctcaataaaacaaactaaacaatcattcaaaaattgttctccaatacaatttcgtcgatgtgtctttacgatcttcatggctgaaaaacatctctcaacagtagcagtagcaacatgcaaaatcaaaaccaatttcaaaagcctataaccaaagggatatgacaaatgttttcgtgtttccaccaccttctgagcaatgtctccaagattctttaaattagaaaatctctcatcatttcgaacagtatcaatgtagatagataattctttctcaatagatatgaactctcctaaactaaagtcaacttggtagaacttagataacctcactaactttgagtgatcaaactcataaaatgcatcaatgggagataaagaagcagcacaaataagcaattcagtgttcacctcattaaaatggtcgtcaaatttctgaagatggaaatccaaaacagaatataagcaattgaccttgtagtgatgcatatttgatactcttgttttgtttcttcgtctctttgagtcaacaaaatcttcctccatctcaaccttttcaagttcatgtttctcacaaaacgaagaaactttcaacatgagagaatctcacccatcatccctaaaacactgaagttgtctcttagttgatttcaccaatgatatagcatttaaaatattttgatctcttctttggagcaccatagacaagttctctgtgagctctaaaaggtgtatcatcatgtgtagctaaaacaaacagtcaaagctatgaaagtaattcaggagactatgtgcttgacgtcttttcaagtcatctacgccgtaattctcaaagcattcgagaaccttgatgatagaaaagtacatcttagtcaaccgcaatagagttatgtagtgagaattccaacgagtatatcctggtctttgaagagagatctcttgattcaaccatgttctagtactgatttcaccattaattattccttctagaatcttttttctatgcttctctcggatcaaatctttcctcttgcatgaagctccaactacatttaacaacaaagaaatcaaatcaaaaaagtctccaacattcagatgtttttttacaactgccacaacaactaattgaaattggtgagtaaagcaatgaacataatatggtgatgtgctttccttcaaaattaatgattttaatccattgaactcgcccttcatgttactttctccgtcatacccttgtcctctcccctttttaatgttcaatctgtatttagcaaacaaatcatcaatagcagattttaaagatattgcagatgtctctttcacatgtataatactcagaaatctctctttgactatcccacttttatcaaaaaatctaaacacgagtgtcatttgttctttatcagacacatcagcagattcatctactaacaaaccaaaaacgttatgatcaatttcttcaattacagatttgacttctgcaaaataatgcacatatctttctggatcataggagacttaattttgttattttcaggagcattatctaaaataactttactcacaacttcattttgatcagcagtatactttaagagttccacaaaatttcctttattagcagaattttcagacttataatgcccacggaaagctaatccttgtcacaataagtaactagaagcatcaacagaagcactcaaccgaattcgatactcatttcttgtaatatcatcttgtttatgcaaagcatgatcaatagactaccttgtttcgtcaagttttcacacttcataactacattgttgtgaaaactatcaacacctcctacatgttctggaaaactcttaaaattattccacctacagaatccatctgtgataaatgcatcacttcttatacatttaccagcattatctctgaacaactaacaacacaggcaaaaagctttttcttttttcacactatactctaaccagcttttgtacccatcaaaccaagttgggttaaatcgcctcaatgttttttctatcagagattgtttgaaaatatgctcacgaggttgacaaggacctctaatcaagtattttcgaattacctcatctctttgatttggatgataatctgttattctttttcgatatacaggatccgaaggtaaatcaatatcatctgattcactgcgaggtggagattgttcttttcttttataatatattttcatagtgttcattgcttcgtttgaaactaaattaagaggaaaaaaaaatatgtcaacattataattagttgtataataaattatgacacacatgattatgtacgaatgatacagaccaattttgaacatagtatttatgactgtttttgtaaacagtggttaacggactttgagtctttgagattttgaccacatcattaagctaatatttttctccattgtcaatcaaaatatattgaaccaaaattctacacatcaacaagcaacaaaagccaaacgatgaaggttatcaaattcttattatgcaatcaacaactattcacattcatttatggtaaagctaattttcacctaaattataaacttacttgactttaaaaagaagttgcacattgttggcttgctggctgctgctgtttgagaagaagaaaactaaaaaggtacgtaagatgaatttcttttttttcttaattcaatttggttaggttaaaaattgggccagctttgtttctaatttacaacaaataaaacttttaaatatgatatacattcttttattattggctaatgggcttacgatggtatgacaaaaattaggcatgtctaattgttaagatattgtgtcattaaattatactcggctagattcatatatacaaacccaataaccttaaggaaaattataaaatttaggcaggtcagctgaccacccatcaatacatgtggatccgccgttgatcaatgatgatgctcacaaattaaaatcttaaccaaactcttaactaataaattttcataatcttttcataaaattttatgaagagtctttgttaataacctcccattgaggatggtcttggagtttgatgttggcagagggcgaaacaattacaaatggcgagataatggctatggaagggcatgtcagatactgaatccagccttgaggataaggctgtttttgagcggtcagcaatgatacgaatacttcataatatatgatttaggatatagtttcgattttcttacttacttttccttgtcttttacttttacattttattataaataagggttatggtttgtttgtgaaacctatccaagcaattgagagctttgaaagattctaccggattaggtcgagggaagataacgtagttctcttttgggagtttatactcttgttactttattgttccatatttctactatcataataagggttttggttttgagttggattctacctctaacagttgctaatattgttactgtataaaaagacatatgcgaaataatatttagagatactctgttttcttaatgtttgatatccattccaaaaattgctatgttcaaaaactatgactcaggtaaaatatatttttgggtccgccactgatgcatgccttggtttagcaatgaactgtgagagaacttgtacggcataacacaattttaaacgaatgataaaaaataaaaacctactaattaattgtctgtaacttttaggatcctcaaacataggactgtccatccttcaaaagcttgtggttctgttccatatgaggcattgggggttcttagccaataaacttatctcaatacttattttctttgagaacgtaaaatgttgtaattctgattgttaagaattcaggatagctactaagcactatcgaggtttctttacattttttttttgtcctttttgtttcattaatgaatagatgtgccttataatattttttggtcgtaggtctcactcatgaagaatttcaatgcagaaacaccaaactacattatatgaaccaacttgcttatattacgaataaacacaaaattacatagtggacaaaaagtggccacatttgaagcactggagttgagcaaagatctcataactcgcaatctgcaaacaacaaatctcttaattcctctttttgtctcatatccccttgtttttttaatgaaatgtgtatagacgaatgtgtagaaactgactctctctctctcctctcctctctctctcctctgaagctcaagctcattgctctcatcgtcggtctcattcgatttcagtcgccattgttaccatatcctctcctccggcgagcttcgtcgagatagaaagaaaagttatgtttctcgagctgcatagagcttaaaattgaagatttgaacctagaaatttaagatattttctcaattagatttgagattaagcaaattgtgtttaggtattcacattggaagtttatggacactgcatgggttgaatagatttgtaaatgggtaagaaatggattacaacaactgaatcatagtgaattgtagttttgaacccgaaccattcgatttgagttcttgtcgggaaatacaactggtagaactgagtagaattgcacatgattcaattgaaaaatatatatgtagtattactcgtagctctagttttacccagatgtatgtagcatgacttagttgcactagtattgaccatttatatgtagtattacttaggtacagtagtattacctatttacatgtagtattattgattatactagtattatacagatatgtgtagtatcactagttattcttgtgttacccagaattgtagtataattagtattattgacagagtttttgtgttgtttttgtgggatacaatggtggagaaggtgatcatatattttaattggaaatatcaagcgtatagcttgatgatgaatacatcaaggggaaaaataactctctccatgttagaaggtaggatttgcacgaagcttggattagatgaaagtaaggttaaattgcaaatgaagtacaatgcaatgatgttaggaccaacttaagagatttacattagtgatgatgaggatgtcagtgtctatatatctttaggtgaaatggttagtaaacctttgactgttgacgtcatcactccaccagaattgcccgagaaactgtcgagagtggaggtgctcaataaaagttttattggtaagaactatgctgatttggattcaaatgaggatgaaataagagataatgctgccatcgtgatgggcgaattggaggaacaaggaataaaacaaaatgaggcaatggcaatagtggaggttgatgatactcaaaattttgagattggatcacgtgatgaatgtgatgatagagatggtgatgataggggtgatgaatacgttgagccaccgcctgttgtagaatttagtcagtttaaaaaagaatgggaagacggtattggtttgactttgcaacaataatttccaagcagggcagcattgtaggaagtggtggacaaaggtgcatttgctaacagttttggttatgttattaaaaagtctgataaggagcggtatgtcctaacatgttctaaaaaaaattgtggttggcgtatacgagcttcaaatattcgggatacaagtatttactctattagaaagtacaacgagatgcatatttgttcccgaattagtatgagtagtacaaggatgaggaagaggaaatgtacccctgaattagtagcagctcttcttcatgatatttttcctggtcttttagaaactccacctcctaaggttatcatggagctttatcagacgaaattagatgtgaagatatcatactccaccgcattgagagggaaaaggcaagccgtttgtgatttaaaaggtagcgcggaagatagctacaaggacatcaattgctatttgtacatgttgaagagggcgaatgaaggtacaataacatatctgaaattggatgagagggggaaattccagtgcctatccatagctttgggagctagcattgaaggctttcaagtgatgaaaaaagtgataattgtggatacaacacatttgaagatcggatatggtggtgttctagtctttgcctcaactcaagatccattttgtcatcattatatcatagcgtttggcgtactcgacagtgagaatgatgctagttggggatggttcttcaagaagttgttaagtgttgtacccgatactccataattggtgtttattagtgacagaaattcaagcctcatcaagggcatacgtaatgtgtattctgcggctcatcacgggtattgtacttggcatttattcctaaaagtgaaagctcatgttattgacatcaacagagacgtactcgcatgaaaaattttggagttaagtcagaaatacaccatggctgaatttgagagggagtatgatactttaagggtgagatttcctaaagcggcctattgtttggaggatacaaccgtgaaagaaaaatgggctaggtgttgtttcccagggaaccgatacaatttggacaccagcaactgtgtggaatcgttgaattctgtttttcttaatgcaaggaagtattctttaatactcatgctagatgcgatcttggccaaagaagccgcttcaggatctaatgataataagtttgtgcctttagtggagaactacttgcatgatttatgggttgacgctgaaaaactaaaagtgactgagctaaacacatttcagttggaatatcaaaggcaacgactatttggtcaacttgctcttgaaaacttgcagttgcaaggttattgatatccaaaagtattcttgtattcatgcattagccgctttcattgccttggagagtgataaaacaagaactcgaggtattgatttacatgaattggtttcaaagtattattgggcggagttgtgggcattggcgtattataggattatttatttagtcccggatagatcagagtgggatatcccagatgacatcaaagcgttgatggtattacctctgcctcggaaaaagaagaagggtagaacaaaagtgcttaggttttcttccaccagagaaagacgtccaaaacgtcaaaggactcaaaacaaaaggaggctgaggcagtcgctgcaatggtttgtaaacttattcgcgttgtataactgatgaaagaattatgcagtactggtaatactagtataacaaatgaataaataatgaaatactggtaatactagtataactatcgaaagatattaaattcaaatttaaattttttttaaacatcaaatattacacagactatgcagagataatgaactcttacaaatgaattaaaacgaactaaattaggaaaaaaatatttggtcaaaatacatgttaatagactctatcctacatattccttatactttcaagctaactttttgttataaactccaacttaggattgaaattttacaatttcatattatctacatataattacattaaccctttagaattcaatagtgatagacttccctcaactgaacaactagatatatcattttgaaggatatgtaatactgcctaaattggtgacaccaaaaataaaactatatggacattttgtacaaccaaaaactagaatacaactaactttaaaaaatggcgcacatatctaaattattgcgcacacgtggaaatcacctttctcccctcaaaaattaattttccctccaaattcaattttcccccaaaaccaaacaaatttcccccaaaactaatttccccccaaaaccaatttcccccaaaatatcttctctctctcctctctacgacataactatctctctcgaactctctctctcgaaattcactctctctctctctctctctctctctctctctctctctctctctctctctctctctctctctctctctctctctctctctctctctctctctctctctctctctctctctctctctctctcgtcgaaattcactccctctctctcgatcttaattcattctctctctctcgaaattccttctctccaatcagttatggatcgattgtgtgagaatgacccatggtatgatgagatgaagaacgttaagtggataatggagcatctagaagaagtagcaatgatggaaggaattccggcaatatatccttgtggtggacgcatccttgacaaaagaaaaagatactatgaatgcaccgtgtataaggtaaattgaagatatagatatcatcaatcttgttttagaataattgatttctatatagaattcattttttgtagaatgatgggttacacattcggaaactttgggataaagctatggtagaagaggtgaataggttaagagagcaaggttataaccatcacaaaaagattcaaagcttggagactctaacaaagaaatgcgttcgaagttggatgagatccaaaaaaagatggggactttgtggagagtttgttgtggagagtgaggaattattggggttgtgtgagcttaatttatgcctttgttttgaaagacttttattgagtattcccttgtattcccaatattatcgttaccaagtattcccttgtattcccttgtattcccagtattatcgttaaatcttagtattcccttgtgtaatcgttaaatcttagttttcccttgtattctcagtattatcgttaaatcctagtattccattgtattcccagtattatcgttaaatcctagtattccattgtattcccagtattatcgttaaatcctaacatatcaaattccttgaatgcttccaacgattcaactcttttatccaaatataaaatcattgttataatttcattcagctggtctaccatcttcttatccaagctatcaatcatctccaccacagaaaccaaactaaggagttcttgtccacctattgcggggatatcttccgcacccgcaatctatggacttgcggtgatcttcaaggtttgaatatcctactggtagagctcgtcaaacatgattagacggccatctttatgacgcttcaaccaactttcaaccaccacatcagccacgtcatcgtcgtcttcttcttcagtgattgttttcatgagttcgtgctcctcaattctaggtgtgacgatacaatcaatgacctgtaaagataaacagtatgaatggattattataactaaatagaatagcaaacgtttcatataacagtatatctaggacaactaacctgagttgtacccaattctgcataaatggtatcaagagtaaagcctttcaaatggttcttcttgaacttcaccttgcacatcctaggacatccctcatatgctcctgcaatgtcctcaatattttgtttgctcaactgtgggattgcctcgaatgcaagaagctacagaataataaaacaaattttaataacaaatagtatttcacaatattacgagtattgataacaatcacctattaatataagttttaactaacctccatctgaagacagaaacccggaaccggccatatgtacttctcgttgttggtgactgaaccattaaaatgattcatcgtgtgtgagatggtttcctaacatgtaatcgaaagaatacccccatcccccccccctactgaaaattcctacaaaacgagagatcactgacagtctttaggcaaaattcatccacttgaggtgccttatccccggtcttgataggcactatgataatgctgcttaagaaatacaataccatcatcctgaacctttcttttgatctttcacatgacggtaccattctgatataggtcaaattgccttaagaccactctctcaaataagagatcgattgtagcacttaagggtcgaattccacaatgctctcggatcacacaatagaccaaggttttgaattaagctacgtaagatagtaatgaagataaaaagaaacaaaagaaagcaatagcagattgtgaggttataagacaagaaagtaaaaacatcaagcttagggtattctcacgaaactattggttagtagatctaataagagctaggttgttatcgaaccattcttaaactcaaactctaattatggaataaccggtggtgttccacgaaacttcctatgcctgtagctaagaataaccagagaagccgagagatctttaacctaaacatgcattctaaaggagttcagttgttcaacttagtagataggccgattcttattacacacctataaaccaggttcatcaaattatagatccaactacatatatctatggtggtcatatctattgtctggattcaagttctaggtgatcaatctagatctcgcattaagaacaattaacgatgaagaattctacagataacctagcaagagggcgatctattaaaccatatgaatccctaatgagaaaccctaaacctaacaagtggtttactcagacatgatcaaagaaacacaaatcatagtctgaataagaaatcaataatagcaagagaaagagtaaagaagatcttttccaaagagagtctccacagggttttgctcccaaagtacaaaagagatgaggagaatagcctctccaagcttagggtctcaacattgacctaaaaaatatatatgtcttaaaaacgtgttgggccttcattaaacataggcgaaagtttgggccgaatttggagatcttcaaaacatcaataagttacgtcttcgaattgccgtcatgtattgatgtcgctcgacaccaggattggtgtcgtttgacacctacgcggtttttagtctccgaatttcttcagcagcataaattctctattttcctccagaatgctccattgtctccaaatgaatcccaaacatgtaaagacctgaaaagaaatagaaaagactctagaataacaaatagactctaaaaattatacctaaatcatagctaaaagcagtaaaaatagggttatatcatattcctatgagcttctctctcatgtcttcgcgtttcataacagtatttttgaaatgcttcttcttgaaatccaaatttccctgatttttatacccaagtgtatagttcttgcaattgaagcccgatatcaatgcgtgttccgatataccatatcaaattggaacgtcattgacgatgaacaacgcttctatcttcctttcaatgtgcgccgtgcgaaaaaggagcatccacatcccaataagtcggtgatttgggtctcttggcatgtggaagatgtgttgggaactctgatggttctcaaaccttgccctcttggacttgctcattgcaggccgcaacttatcgaatatagtcaatacttcgtgaatatagcaccgagttgaaagcttgattttcttcacatattccgagggcgggaaatacatactcagcggtggtattgcttctgtttcctcatcgatctcctgcaacagacattcattcatattactaccaatgttacctagaatcatacacatagttatatcctagtaatgacagtattacccagaaatcatacacgtagttatttcctagtaatgacagtattacccagaaacgcatagttatatcctagtaatgacaatattacccagaaatcatacacataataccaatcttagtactaccaatgttacccagaattcatacacatagttatatccaagtaatgacagtattacccagaaacaatagtattatcatgtcctaccagtttcacatcattcaaatacttaccatagccgccggattttccactcgattttccactgcaatctcatcctccatattctcatcggacaaggactctcctccggcgccattcccttcttattcgttctcttcttcttctttctcttcttcttcactctcttcttccattgcctctaaaaccggacttatggtcgggattggttcttcaactcctcctcccacaattgccggattttgcttcgtcgatgatggctcctccgtcgttgtctggtcctccgtcgttcccccatctattggcttcgttgtcggctcctccgtcgttcctctcctcctctttaacccagtttttttccttagaggcggcattaggattctctagggttgcagttagggttacggttgtaattagggttagaagaaggagaagaataaaattccgagaagagagattagggttcttgttgagactgttgagaagagaacgaagaggattgagagtctcgattgagaggcgtttggaagagaacgggtggaagagaaatcgaaaagtttttgaaacttgaagttttgaaagagaaaccgaatagatccagagaaatattcgtttgggagagatgggtcgggtgtgggtcgaagagatccaggttttgactgtaatattggattttggttggggtatacaagtaaaatccacactattcgaattaaaattaaatcaaaattcccttatgttcttttagaggatatatggggttagtgtttggcaaatagggacttcccagacattttctcactagagttattggtagttggatgcatcataatttgttaataaatgaagtcaaatttaattttttggagaattattgatgaaaataattaaatgtattggcaaatttcatcgtttattttggaaaaagaaaaaacaaaaaccaggtttaaaaagatgagtttaagtagcataaccaaaaaatggtgatatgatcaaacaggaataggatggatgaatatagaggtgatgagatctttgagatttccatgcggataggtgaattcatcattactattcttgcaaaacacatcgaacaagcgtgcaagattgaggcatcgcaccaaaactggtcgtggcacatcagttatcgtcaacaactcctccatgactatcttatagttatctctagccatctttctcaattcttcaaccgcttcttctttagtaacaccgtgttgattcatgtaagagttgaccccattcaccacctctccttttctcatctctctctgcacattgtatatatatacccatataatttctaagtatgcaggacaaacgtcacatggcaacgaaaaagaatgtacaaattgacgtagtcttaattattcctcttaatatttcatttggtttaatacctcgtaggtgactatgtcgttgtttatacgatatagaaaactcaaagctt

SEQ ID NO: 1329 - DNA, 68639 bp, Arabidopsis thaliana
gaattcattatagacaatacctttcaaagggatacatccatctaaagtggactggtccacctaatcgagtctctctagccaaatgaatcgggagatgaaacattatatcaaacagagatggaggaaaatacctctccagctggcacattgtctcaactaattcagactccaatgacattagcttctcagggtcaataacccgctgacacaacctgttgaagtagtggcacaatctacttatagcaactctaggtactcttggcagcaaccctctcaaagcaacaggcagcaagttttgaaggagcacatgatggtcatgagacttcaaaccaccaatgactggtggatccatagacacacagttggagatattggcacaatatccatccggccctctaaatctagctagccttttgcagaatctccttttctcatccttagacaaccaatatgcagcaggaggtaagtaagtcctcttaactcttaactgagggtgcaagttactacgagttcccatgtcttccaaatccttgcgtgcattcaagccatcctttgatttgacagattgcatcaacatagagacaatggcgtcagacacattcttctccacatgcatcacgtcaatgttgtgacggacaggcatatcctattacacaaacaataagtagttagtaccattcaagattaataatatgttaatagtaaaatgtgatagtatttaccttccaataaggtaattcatatagaattgatcgcttcttccatctccattgatgtgtgtcttcatcgtaatcatcatcttcacacaagtctgatctttttctcttactgtttctctccaaaggtctcccaaaatcatttttaaagcctttaatgcttcaaatatctcttctcctgtttgaattctacttgttgtcccttcttctacagtgttatcaaaccagcctcttcttcttctgtatggatgtcctggtcttagtcgtctcctattccttaaatacacatgttttctactgaacttcaaccacctaaatggtgtatctttcccacagacattacaagcttgttttcccttaaccttacaaccagccaaagtccctaaggctggatagtcactgatactccacaagaacatagctctaagagtgaaactttcttttttgaatgagtcataaacatgaatgccttcactccacaaatcctttaagtcatcgatcaatggtgctagatagacatcaatattattgcttggtgcagtaggtccatgtatcaaaagagttagcataatattttcagccttcatacacatcgttggagccatgttgtagttaacaagcaaaattggccaggtgctatacttagtgttttgaatagagaacggattcatcccatcagcagaaagtcccaacctcaggtttctaggttcagcagcaaattctggccatttatcattcacttgagcccaagccaaagagtctacatgatgtcgcattgtaccatcatcactagcattactgaaatgccaccgttgatcctcagccattttcttggatctaaacattcgcttaaatctatccttgattggaaaataccccagtaccttagctggaatccccttcttctcttcaccagtgtgtttatccctctcccatctggaagcattgcatcttggacaagtatccctcagctcatactcctttctgtataagatgcaatcattctgacaggcgtgaatgatatcatacccaaaaccaaacatcttcaggaattttttgatctcatttgttgatgttggcagcacattctctcctggtagtatgtcgtgcactaagctcaaaagttgatcaaaataattctctgacatcccactcttcactttgatgcggtatagccccataattgcagacaccttagtgtacttcggacagccatgatatagtggagtttcagcttcctttagcttctccctaaaatcagcttcttcttttgtttctggctccttactatcatcttcattctgattctgagaatcagaatggacgtctccatcaaaataagctgttctaattagctcataagcttcacattcactagtagtactactaggctcaacttctaacttatcagcccgtatctccccatgcttactccaacatctatttctcttgtatttatggtccattcccttcataactagatgctccaaaatagtctcaattggttgatgacacagattccggcaatcaatacatggacaaaacatttcagcaggatctcccagacttctcgatgatgcgtaaacaaaagttgttgctcctttctcatactcaatgttattccttggcagccatacccatgacttatccatttttaaaagaccaccaagctccaaccccatatatatgataatatatatatatatatatatatatatatatatatatatatatatatatatatatatatatatattagcattcaggtatataagcaaacaaaactcaaagagcaaagacacaaagagaaatttcataaactcaagatcactatcaactcaagttctgtgttattactcaagttcaaatctcaaaatcaatactcaagttcaaaatcgaaacaagtgaatggtctcaagttcaattctataagaaacacaaatcgatacaagtgaatactcaagttcaaagctatatgatattcaaaatcgatacaagctaagtgaatactcaagttcagttctattagaaactcaaatcaatactcaaatctaagtgaatcctcaagttcaagtgaatactcaaatcgatatatgcaaactaagaactacagaaatcgattcaaactaagtcaaaataacatacctgtcaaatagagacacggcggctaccactgaaatcttcgagacacggctaccaaaagcttctgagaaaacgaaaccctaaactgattaaaaccccaaatcgatgctcaaacaagtttaattggacatgcaatccctaaatcgattagaaaaggcacataaccttctcaaattagaaacagatctgtgactgagaggctgaggagtagcgagcgtcttcgagagagattgaacagagtcggtgagcaagaacacgaacacaaagagagacagaaagaagaagaatcgattagagcagaagacgagaatagggaagaacacgaataggaagagaaagagtcgagaaagaacacgaatagttttttcagtacttagaattattttgaggctaatttttttgtttcggcgggcaacaaaattaatccgcgctattacattaggtagcgtttaattaatggtaatgctatagaacaataaccctaaatccaaaaacatggcccgcgtcattttttatttcccgggtacgagattatagcgttttgaaattaccaaacgctataaaagttgagccgggttataaattatagcagaacatggttaactactatattatagtgctataaatactccatattcttgtagtgagagtaaacaaaggggaactcacatacttgatcgacaccctcggcatttttccaacatttgtaattgatcattctaaataatgtataacaatagggtcataggaaacattcctacccttatacactatctgaaaattctgtcaatctcatttttttttgtttttttattgttaatgagactatatgagtaccaactatgtgcatgctctaagctattattttaattcgcaagttactcctgctatgctaagaagacattattgataacatgttttacattttgttttattatttgttaggggaaaacagagtacaaatgcttttgatgcttcagttgttgccatcagtccagagtatccagaattggaagtctataaaaacaggtaatccttaactctattttaggggtgttgatagcaaataaatcatggatattaagttggggattccatggctgattggtaactatagtttgccaaacgatggtcttgctctcaccatttccgacactaatccaaagcgtgaattgtcattcgaaagtgatggttactttgaccagtatcccataaaatgtttttcctgcttacttcatttcaggttcagaaatgcaaggtcatgtgcaccatataaacaatataaggtgatatggggtggttttatgttgcctgcaagaagtgcagcaagaaagtcgagatgaacaagaaagacgagaccgccattgctgctacacaaccaaagtctaaatacaggtgtccaaaatgcaatcttaacatcacccaagtggttctaaggtatatcatctcattcctttttattaattatattattatctatactgtgtatggggatcacccacaccagacattacttttgtgtaaaggtttaagtagcatgttggagtcatggatcaaacaggagatatcaaatgtatcctatttgatggtgcaacatcagagatgattggtcattcagctttcgaccttcttgatggggtttatcctgatgatgtgagtaataacaaaacaataataatatctatcattattctatattatcaataaattcttatagagtattgtttatcattcaactgcaagatccagaaagaatgcctccttctatcaagaacttggttgggaaaacctttcagctacttgtgtgtattgagaatgacaatttgtttggaagtaatgatatatatacaaggttggtaaggtttggccaggtattgacattgtgatgattgaggatgctgatgatttagagagagcatccaatcgttctcacctcatcttagacactaaggttggacttagagtctctttcttgtctgtagtttgtgtattcatatatatcttctttatatctgtggagagatgttccaatagcaagaagatatgcttgaaaccaataaaattggagaaactaaatggcaaaaatgatgaagagatcggaaataaagaagatgaggaaaagacaggggtgaacaatgaagcaaatgagaatactaatttcaattactaagaatatgttgccctctaattatgtttatttcaatagctcattggagagagttagcagttgaggagaagatattcatgtttttgttttttaagtagtcatttttatgtttttgtttcttttctatggatctaataatggctacttagggtatatcagagtaaatcatttactctgattagtagtcaagctttttcgtttcatgtgtgttttccaatttgatcaataaaatcttctcttctaaatatatacgatttgactttcaatcataagatatgcaatatgcaaaatcaactaacctttaggggcggacctacttagggaaaacggggggtcaattgaaccctttaattaatcaaatactaatttttgcatgatatattgaaaagtaccaacagctcaattagtattttctaaggtgttgacgttcttaaccctgggttcaaatctctaacatgacacttattttcttttttctccatttagcctcaaatacatgtatctcttttgtttcatacacatttttttttcttttaaaaattacattaattaatataccatttttaattgctatgaaaatgattttctttttgtgggattgtataatattataagaaagtcagttatatcatactgtttaaaaaaaaattgacattggtaaaatttatttctgggtccgtcactgctaaccttatcctgtacctgaaaacactccttatcttgtccatatcacattgtatgttaacatgcatattaataaaaaaaatattatgtttttggaattaaacatatataccaaaagaaatatgtatacatacttatagtccttagtaaaaccttagtatttatgtattaacaaggcagaaggttattatcatttttttgctttatgtaagtttttcaataagggtcatagaagtatctgtcctatattcatttccaataacttagcggatctaaccaacatttgtccctaatttgaacacaaggccaatttccacatttataaaaggccatctatttaaaaaacccacttttaacatttacaaaatattcaaatttgtattttatgtttctaaatcttattagcacggttttaacaatcttactaattcccgaaaatatagctgcaattaatattttattcttttaaggtacctatatctctcacagagttttgaacttacacgttgagggaaaaactgttttatcaggtaatcttaactaaatcttctaaacaaccatatctaccatatcatatatttcgtagttcagtttattatgcacttggcctaagaaaccagtcaaatacactagatataattcctgttacgcaaattttatcaagattattagaatttaatttcggtatattcttaattccattttttattattgaaacaagattatcccattatactaagccatctattgaagactataaatacacacatcatttacaaccctaaacacatcagcctactaagcatcataatagcataaaacacaaagttcaccttcaacttgtaaacaaaatggatggggccatggctacgacttaccttactgatgttaagcccttcaagaacagctagcgtgtgcaaatcaaaattctcaacacctcgaaacagccacatcctagtcaggagaaacactcgaaatggtactagctgatcaaagggtacgttcatggtattgccatatttaaaaagttcatcttaattttatatatacttcttgatgataaattagaatattgtgtttcagggatgcaagattcacgcaagtgtgaaaaagtatgtaaggcacattgcgcttgatcagtggagagtttttgggtcaagtcaggggacaattctgggtgactgatcatcagttcaagatggcttttgttaaccatacatttgtctcagcatgtgtttccatttctgatgatgcttacttgtcattacccaagtttcaatccatcattgttggtgaattgaatccattctatttggttggtaagtattttcttaataatatagtctgctaaactaaatattgatcatgttatcattggatataagacaaacatattcattgacaacgtgattgtcaacaacaaatcaacaaagaagctcgaattggagctgaggaacgaaatgtatgtaaatagttttgtttatttttttggtttaaatattacttctgtctaaatactgtaaaatggtttttaattaaaggaatgatctcatgccatgtactttgtgggaaaaatttgttgatcaagtaagtcaagcacgtgcgaattcaagtggtgagattgttgtttgcctaattaggtttgccaagatcagtactttcagaagtcataactaaacaactatcttcaatcgatttactaatgtttatgaagaaaattttacctttaccatgttttacattttcatttcatatgtaacaggggagaaccagtttacaaatgcttttgatgcttcagtttttgtcattaatccagagtatttagagtggaaagtttttaaaaacagttaatcactatactatgtgtttttcttataaaaatgatatccacatctaagtatacttaagttggtgatttcatggtcttgtggtaaatacagtttgccaaaggatggtcttgaactcacaattgccgagaccaaaccaaagctagaattgtctgttcgaagtgatgattacttcgagcactatcctacaaaaactcaatagcctgcttacttgatttcactaaggtagacagattaactattattttgtttaaagttactttggaattaagattctatcaaatgattttctaatacttttgcatgtattcaggctcatatatgcaagataatgtgcactatctttaaaatagatggtgatatgggttggttttatgttggatggaagaaatgcaacaagaaagttgagatgaacaagaataacgataccaccattgctgttaaactaaaaaaaagcctaccttctcgtgtcctaaatgcaaccttaacataacacaagtgattccaaagtttgtggtctcattcctgtttaggacatttcgttcttaatcatacagtttacggtgattaagaaactaaataaccaaacatttggttaaaggtttaagttgcatgttggagtcatggatcatacatgagatattaaatgtattatgtttgatggagctaccacatagattgttggttattcagcatatgatcttctagatggcgtatatgatgatgatgtgagtaataacaatacaaaaaaagattgtcattttaaaattttatcattaagtttttatattgtgtcatttataattcaaatgcaggatcttgaaaaactgcctccttctatcaagaactttgttggaaaaacatttcagctacttgtttgtgttgagaatgacaatttttctggatgtaatgatacctacaaggttggtaaggtgttgacaatgtgaagattgaggatcacaatgattcagaagagacaatcaatctttctcagctcatctcaggtagtgaggttgaactctatttcgattgtgttttgtactacatattataactatttactggaacttttaatcctttcaagcaatgtacctgctcactatcagcagtgaaggtagtgaaatgtcagtatctggcatgactactctatcttccaagagagttgtggaggatacataagtggagagatgttccacaaccaagaagacatgcttgaaaccaataaagttggagaaacttgatggtaacaacgagatagagcttggaaagtgataactaggtttttacgcctacctatggtctgaagtgtggtgtgttcagttcaattccccttacacactaacatgtcgatgcagctatagggggtgtcaatccagtccactgttattgctagcaattaagatgcatacagaagcaactatgtcaagccagattataatgatggtgggtttctagtaacaatcctaaatcaagattcaaacaactaaaatgagaatttatgttactgatgatgaagattcagaggagaacataagattggctgaggagtatgttagggagcaagaaataaacgccatcaatctctctctagccaaggcagaaccgagatgaagcttgtgcgatcgcagatgcatagcgcagtctcctcggctccaaacatcgattggattccggaagagtctcgcaacacacctttcactcgcaagatctccaacactaaaaatcgaatacttcaacgggtctttcgacccaaagggtcatttgaagtcttttataatctctgtggcccgagctaagttcaagctttatgagagagatgcgggtctcagtcatctgtttgtcgagcatctaaaggggccggcgttggattggttctcgagacttaaagggaattctgtagaaagtttccaggagctctcaacccttttcctcaagcagtattcaatgttgattgatccgggcacttcggacgccgacctttggtcactatctcagcagccaaatgagccactcagagatttcctcgcgaaattcagatctaccctagccaaggtcgaaggatttaacgacattgcggctctctccaccttgaaaaacgcattatggtacaaatctgaattccagaagaaattaaatttatcaaaacaacagacgatccgagacactctgcaccgggcctcagactacgtttcccacgaggaagagatggagttgctatcgaaaaggcacgagccgtcgaagcaaacatcccgggatgacaaatcccaacctggcgttccgagcccgaaaaagggcgctcaaggcgggaccttcgtacatcacgaggaacaaaatttctccagagcccataattaccaagctgatacgccccggggaagaggaggaggccgagaaagagtcttatacttggaccaaagaccaacctataggaaacgagcaggaatattgcaaactgcacaaaagctacggtcatcaaacttccaggtgtcgtagcctcggggcaatatttgcagccaagttcctagctggtgaaattggtggtggcctctccatcgaggacttggaagcagagaaggcaagagctgagcaagtgaacgttgtggcaaaccccaaacaggcgcctgttgcatcgaaacctgaagggccaaagagaggtcggggcgatcgcgaggcggacaacgacgaactagaaactggtcgggaaagaatctttataataatgggaggctcgacattttgtcaagacacgacagcctctatccaggcctatcaaaggaaggccgattcgaattgtaactaggttcgaccattcaacggaccagatgatgaagtaacttttcacgagagtgagacgaacggtttggatcgaccgcacaatgaccccttggtcataacacttactatcggggattttgacgtcgagtgagttttagttgatataggaagcacgttggatatcatttttcacgcaaccctgcaagagatgaaggttgatatgacgcaaatcatatcgactccaaggcatgtactctgtttttccggcgagaccactatgaccctcggcatcatcaatttaccagttcgagccggaggaattacgaaaatcatcgatttttcagtcacagaccagccaactgtctataacgcaattataggcactccatggctaaatcagttcctagccgtcgcctcgacttatcatctctgcctaaagttcctgacaaacaacggtgtgaagaccatctgggaaatcagaagaatgctaggatgtgtttcatggcagcgcacaagctcaggaatcccgtcactgagtcgacagccgatgccgaacacaaaaaggtgaagctaggccgagctgaagaaaaagttatcctgcagttttagcaattaaagattgacgaggctcgggaagcaaagaaacctatttctgatcttgtgatctccatttgcctcgacgataagaagcccaaacaatgtgtggagatttgtggagacttaggcgaagagctaatagcagagctgattacctttctcagagataacgtcaacaccttcgcctggtcgccagaggatttacctggagtgagtgttgaaatcgtatcacacgagatcaacgttgatccgtcgtttaaaccggtaaagcataagagaagaaagttgggacgggaacgtggcgaaactgtgaaagcgaagttgaaaaattgctgaaaattggatccatcaccgaggcgaaataccccgactggctcgcaaatctagtcttggtaaaaaagaaaaacggcaaatggagagtctgcgttgacttcaccgatttgaacaaagcttgttcgaaggatagtttcccattaccacatatcgatcgcatcgttgaatcaacctcggggaacaaattgctatcgttcatggacgccttcgctggatataaccaaataatgatgaaccctgaggaccaggaaaaaatggcggtctatactaagcaaggccttttctgttaccaagtgatgccattcagacttaaaaacgtcggggtgacttatcagcgtttcgtcaacaatatctttgccttacaaatcggaaagacgatggaagtatacattgacgacatgttggtaaagtctatgaaagaagacgaacatacagctcacctgcacgaatgtttccagcagctcaacctctataacgtcaagcttaatccggccaagtgccgcttcaaggtaaggtctggtgagttcttgggatatctagttacacatcgcgacatcgaggcaaacccgaagcaaatcaaagcacttttaggaatggcatcacctcaaaacaagcgcggagtgtagtgcttaactggaagggtcgcaacccttaatcgattcatctcccggtcaactgacaaatgcctggccttttacgacgtgcttcgggaaaacaaaaagtttgaatggacggctcggtgcgaggaagctttttaagaacttaagaaatatctagcgagcccaacaatccttgccaaacctgtgatcagagaactgttctacttgtatgtcgccgtattggacacttcgatcagcggagttttagtccgagaagacagaggcgaacaaaaacccattttttatgtttcgcagacatttaccggcgtggaatctcgctatccgcaaatggaaaaactcgccttagcagtcgttatgtcggctcggaatttacgaccgtggtactgggatctatgccgctcaacgccatcctacatagtttgagtcagtggggtcgtttggctaaatgggcgatcgaactcagtgagtatgacatcgaatatcataacaagacgttcgcgaagtcccaaatcctaactacccatgaaagaagctcgggaaaatccgcttgacacaacttggctcctacgtgtcgatggctcgtcatcaaatcaaggttcgggtgtgggcatccttctcacttcacccacaagcaaggttctcgagcagtctttcaggctaaatttcgaagcaaccaacaacgtagccgagtacgaagcgctcgtggccgggctaaaattagcccatggctaaaattgcaaaaaaaaggactttttgtgaatctcaactcgtcgcaaatctgttcaacagggaatacactgctcgcgatgaaagaatggaagcttatctcgctcatgtccaagatcatgcgaagtagttcgacgagttcgaactaacaagaattctaggaggcgaaaacacatcggctgatgctctagctgctctggcctcaacgtcaggtccgaacctgaggagagtcattccagttgaattcattgagaaacctagcatcgtgctcgaaaaagacgaacaggccttccccgtacataatgccgcgaattatgagggcattttggaaccaaatgacagctaagacttaggttgcgactccgagtggataggacccattagaagttacatatccgaggggaaagtgccctgcgataaatgggaagctcgaaaactaaaaactcaggctgcacgcttcgtcctaatcgaggaaaagttattcaagtggcgtctgtccagaccactaatgacctgcgtagaaaaagaagcggctcgtaagatcatggaagaaaaccacggaggctcatgcgaaaatcattctggaggaagagccctgaccatcaagataaaacgccacagttaattctggccgacaatgatcaaggactgcgaaaagtactctagacgatgcgaaagatgttataggcatgcacccacaatccatcaaccagtcgtgctcctttcattgatcgcgtcgccatatccattcatgggtcggttgatggacatcatcggccccatggatgcctcgaaacagaacaaattagtcctcgtcttaaccgattacttctctaaatgggtagaggccgaatcatacgccagcatcaaggacgctcaggtcaagtcgtatggaagattattttatgtcgccacgggatcccttacgaaattgtcacggacaacggctcacagtttatatcggctcgttgatataaccctatttttactgcttttagctatgatttaggtataggttttagagtccttttgttatttctagattcttttctagttgttttcaggtctttatatgtttgggatgcatttagagattctggagcattctggagcaaaacaaacaacttaagttgcaaatgcagttcgcagacaaaaatctgcgtaggtgtcgaacgacaccacccctggtgtcgagcaacaccaatacctgacggcaattcgaagacgcaacttattgatgttttgaagatttccaaatttggctcagaactttctcttatttctaaagaagatccatcacggttttaggtcatatatataattttaaaggtcattgtttagacttaagcttggagaggttattctcctcatctcttttgtactttgggagcaaaaccctttggagactccctttggagaagatcttctttactctttctcttgctattattaatttcctattcagactatgatttgtgtttctttgatcatgtctgagtaatccacttgtaggggcagggtttctcattagggattcatatggtttagtagatcacccctctactaggttatctgtagaattcttcatctttaattgttcttaatgctagatctagattgatcccctagaacttgtatccagacaatagatatgcccaccataggtatctatagttggatctattatttgatgaggctggtttataggtgtgtaataagaatcggcctatctactaaggtgaacaattgaactcgtttagaatgcatgtttaggttatagatctctcggcttctccggttattttagctgtaggcatagggagtttcgcggaacatcaccagttattccataattagagtttgagtttaagaataattcgataacaacctagcgattatttgatctaccaaccaatagtttcctgagaataccctaagtctgacgtttttactttcttgttttacaacctcacaatctgctattctttccttttgtttctttttattttcattactatcttacttagcttaattcaaaaccttggtctattgtgtgatccgagagcttaaccacttgggtgtcgatcgacaccagtaccaacttgaggaagcgttgacgtttgacagagaaaaattgatcgagattgacagagcaggataaataccagacagtagtgtcgaccgacactcacctagtgtcaatcgacactggacgcaaagtgcatcaatcagccttgactttccacctgttgccgaactagtctacacacctgaaattctctgtccattgcctcaacagtatatgcaagggatttaggaggagcactgcaaggctccacagaatcagggagacaaaaggaagacaattatcgtcttagaacagatttcagagctgacttgtcgacaaggtaagggaagacaagttgtaggacgggtgtcgatcgacaccaccaagagtgtcgattgacacccatcactggttgaagcagaatcctctccgatagctatttttccagctgggatcaatgctttaagtccaagttctactgtcacgtcacccattgcacctctcatacttcatctacctcctaaacggctatggtactcatctcctcctcctaaacctcttgatttcatcaaaaatactgttttacggttaagcaagctacgagtttctcgtcgagcgcttgttctttcttttgatgattgtgcaggaaaaatgagtattccacccatacctgagtcccaccttgctgatgctcctctcttcctagataaacctcacgcgctaactgttaaacgccagcatggatgatgagaggtctttctccgcgatatttattaccaccatctgatccacttgatccccatactccatcaaagtcaagctattgactataaacaagcgcttagtgggaggcaacccactagtatggtttatttttctttttctttttcttttattttacgtttttctttttctttttttcgcttactcggatttgaatgccactagggacagtgtcatttaagtctgggggagtcgcttactaactacatttttctttgtttactctctaaaaagaataagtctggggagagaaagaacaccaaagcaaaaaaaaaaaaaaagaatggtcgatttatcatggtatagtacataaatgtagaaggatcttgaatgttagcttgttgataagatccagcgatgaaagcctggtagatatagttgtggaacttaggtatggtatctagaatgttgtgtaagcttgcagagacgtacatgttgtttaggatttgattaactgctagacatatggatttggttaggatgatcaaggcaataagctcgagattgttgggagttctagtgttttaaaaccttttccacgggttcggcttttgtgttttgcttgatggcaagcaaaagctaagtctgggggagttgatataaccctatttttactgcttttagctatgatttaggtataggttttagagtccttttgttatttctagagtcttttctagtctttttcaggtctttacatgtttgatatgcatttggagattatagagcattctggagcaaaccagacaacttaagttgcagatgcagttcgcagaccaaaatccacgtaggtgtcgaacgacaccacccctggtgtcgagcgacatcattactatcttacttagcttaattcaaaaccttggtctattgtgtgatccgagagctttgtggaattcgacccttaagtgctacaattgatctcttgtttgagagagtggtcttaaggcaatttgacttatatcaaatttggcgccgttgccgaagttctctacgattcaccattagattaggattagaattttgtctaagcttttattttttattttttctttttatttacttagtctttctcttttctttttcttgtgtgtttcaggtgtttgtctaatcacagaaccaggaccaaacgagaaacatgaacgagagtaagattgctgggatcatggctaagctgaacgcgatccacaatcaacttgtggaggatgtcgattatgttcatagcagagattttccgaatcagagatttgatcaccaacaaggctacataggttcctatgggaatggtccaacgagctacactcagaattctcaattctagcaaccgcttcagaatagcaatagtttcagcttcacaagaaactatgatcttgcttcttaccaagccccccccccctccacctgcacctagaagcaagatcgaatcattgaaggaacatattctcgaaggtcaaaagaggatcttagagtgacctatccctagatggaatgaaagcagcctcactacttctggcatgctgcttcagtggaaagtgagtatgagttagtgaagattgaggaaagtgacgattttgaagttgtagaggcagtgtcgaacgacaccacccttggtgtctatcgacaccatcacatatatacgagacataaggctgtgatgaagcaaaatcgaccatgctcgacattgatctccagaatcgctcgacacaaattagtagtgtcgaccgacaccacctgggtgtcgatcgacaccagtaccaacttgaggaagtgtcgacgtttgacagagcagaatcgaccgagatggatagagcaggatcaataccaggcagtagtgtcgaccgacactcacctagtgtcaatcgacactggacacagacttcaccaatcagccttgactttccacctgttgctgaactagtctacacacctgaaattccttgtccattgcctcaaccgtatttgcaagggattcaggaggaggactggaaggctccacagaatcagggagacaaaaaggaagacaattatcgtctcagaacagattggatgtgccaagtctgcgtcggagcctatctcctgaaaacgagcaggataatactcaaagaatgcttgacaagttagatcagatcgatgaaagaagagattcagccctggtgtgactacaaaattaccaaaatgaaatggctcggggcaaacagggaaggaccatacctaattttgagagtcgtccgacccggtgtctacgaactcgccgacttaattggcaaagccattccaagatcctggaatgccatgcacctcaggaaatactataactaaatctaagaagcatgaacttgaactacgaggtggcttgatccctgaaaagggtacgtaggcaactcgtcttcggatcgggtcgcaaccgaaaagtttcacccaaaaagaagtccagtttgctcacaatggctcgtaatcaataaaacggttcgggttttaaagaatgactcagttattctacgattcggcatcatataaggaaaaaattggacttataataaagagtcagaaacttgatcttcataaaaatgtggataaagtcgtccaggcataagttctacaaaaaatggataaagccttccaggcacaaacactaaaacaagataaaaaataacggagtcccgcctcgggcttctaatcaagctcttcagatgggcgtactccttctgcaggcaagagcgagccagattaatcacctttgcctgcaagccagattaatcagcgattccggcttcatcagcgagagtctcaaccggcttaagcccaccaggactccgaggagtaggctcgagagcaggggctttaagctcgtctttcagctcgatcattaggtgagtgagatttgcctcggcgtcggcaaaatcttacaaccacttctcaaccaggtctttctcggtcgccaaagctccgccatcctcgagtgatttgatcagttgcccattggcccgtgcctgggacaagtacataaactgatcgttagcctcctcggtgactttgagcctcgctgcgaaagcctccgaatcgaggctcacaatcccaaagtcttctcgcctcggtaagcattcgcttgcagcgaacgacttcggaattcaatttaaggttgtgctcgaccaacctgacatcgttatccttgttgacagaggcttctcgttcagcttcctccttcgcaagattcgcttcggcggccttggagattgcctcgttcctttcctgctcggcaacttcgccctaaactcggcctcagccaatttattgattgccgcaaaattttatcgcatggctgagtcatagggctgcaccatctgattcatcgaggcgacgacctgaaaagcaaacaaaaataaagctagtccgaattcattccgacacacggacatacaatttaggcaaaaggaaaacaaacaaaatatacataacctcaggacgtgagacgccgtctccgcatatttcctcgactccagcaaagtatctggaggagggagcagataacccgtgcaggccccaagtagaggcttatccgcctcatcgctctcaaaatttgaagttctttgttggattctttctttaaattcgaaccgtttcattgatttgagccaatgtatgtgaacaagacttgtgatcgaaacttctcggttgtgacccgatatgattcatttcccgaccagcgtttaggtacgagctgggtaccggtgtttagagtataaccgggtttttgaagataaaagaattttgagcaaaagttattagacagattttatcttgtatttatatagcgtgctatcgccaagcaggcgtaagagatactccgagccgtcgctcatcgtattagccgaagcgttcaaaaattgtgaatcgaattattatttatgccgaagttaaaacttacaaaataataaatgggagtatgcatacacggacccactccccctttttttaatggggggttagctgaactcgtccgaagatgagctgcctacgtacccttttcagggatcaagccacctcgtagttcaagtttagtcacctcggatttagttgtagtattgccttaggtgcattgcgttccaggatgttggaatagctttgccgcttaggtcaacaagttcatataccctgggtcgtacgaccttcgagatcaggtacggtccttcccaattcgccccgagcttcccagcgttcggttcggcggtgttttgaaaaacttttcagagaactcggtccccttcgtgaaatctttgctgtcggacgttcgagttgtaataccgatccgtctcattccgataattttttattcgcaccaaggctgaatctcttcgttcatctattagatcgagtttgtcgagtaacctccgagtattatctggttcgtgctcgggagacaagcttcaccgcagactcggtatcgtcatttcgggtggaattacacattctgttccgtagactaaggtgaatgaggtttctcccgtggctcgacgaggagtcgtccaatgcgaccatagaacaccttcgagttcgtcggaccacaagccctttttagcatcgagccgtttcttcaaaccttcgaggattgttttgtttgcggcctcagcttggccgtttccttggggatatcgtggtgttgatttgctaagtcgaattccccacttatcgcagaagccttggaagcggcttgatatgaactgtgagccgttatctgtaacaatatcgtaaggtatcccgtggcgacataagatatatttccacacgaaactctcgacttgagcgtccttgatgctggcataagattcagcctctatccacttagataaataatcggttaagatgaaaactaactttttctgcttcgaggcatgcataggtccgattatgtccatcgaccaacgcatgaatggatatggcgaggcgattgatgataagagctcggccggttgatggatcgttggcgcgtgcctttgacatttttcgaatcgcttggagaatttttcacaatctttaatcatcgttggccagaagaacccgagctgggtattctccattgaattgatttgcgatgagctgagagtcacaaaaagctcggattttcgcgatttttagccctcgagttagattaagtccgatcacgagcgcttcgtactcgcccacgttgttggtagcctcaaagttcaatctgaatgatttttcgagaacttctcccgttggcgaagtgagatggatgcccacgcccgagccttgctttgatgacgagccgtctacatgcattagccaagttgtatcgagcgggttctcccgggtctcctttgtgggtagttcgacgataaaatcggctaggacctgtgattttgcacatgttttgttcctatactcgatgtcatgttcgttgagctcgattgcccatttagccaagcatcccgattggcttggactatgtaggacagcgcggagcggcatggatcccattaatacgatggagtgggattgaaaatagggtcactgtttccgagccgacattacgactgctaaagctagtttttccatttgcgggtagcaagattctgcgcccttgaacgtctgcgagacgtaaaaaaattggtttttgttcgcctctgtcttctcgaactaacactccgctgactgcagtgtcctacacggcaacatacaagtagagtggttccgcgactacaggttttgcgaggattggtggggtcgccagatacctcttgagttcctgaaaagcctcttcgcatcgggttgtccattcgaatttcatgttttcccggagcacatcgtaaaaagccaagcatttgtcggtggatcgggagatgaatcggttaagggctgcaactcttccagttaggcgctgtacttctcgcttgtcttgaggcgatatcattcctaataatgcctcaatttgctacagatttccctcgatgtcgcgatgtgtgactagatatccgaggaattcaccggatcttaccccgaagcggcacttggctgggttaagtttgacgttgttgaggttgagctgctggaaacattcgcgcaaatgggatatgtgttcttcctcttccatggatttaaccagcatatcgtcgatgtatacttccattgtcctcccgatatgtagtgcaaagattttattgacgaagcgttgataagttgccccgacgttcttaagcccgaacggcatcactcggtagcaaaacattccttgttctgtgtaaaaagtggttttctcttggtcttcggggttcatcatgatttggttgtagccagcgaaaacgtccatgaatgatagcaatttgtttccagaggttgattcctcgaggcgatcgatatgcggtaatgggaaactgtcctttgggcaggctttgttgaggtcagtgaagtctacgcagactctccatttgccatttttcttcattaccacgactggatttgcgcgccaattggggtagtttgcctcggtgatggaattgatccttaacagtttctctacctcggctttcacagcttccgctcgctcccgaccccattttctcctctttagtttaacgagtttaaacgttgggtcgtgcgggtaccaacgagcgggtaccaacaaacggttgcaccatccagacggtccttacaccttttggtcgagacacctcttcattcgtgagctaccacagtccaccagctcgagtgtcagctgactggaccaccccgctgggtcagtactcgatcagctcacctagttcagtcaagctatcggtcagctcacctagctgagctagctagtcttccagctggtttagctcacctagcttagctagctagttcatccagattgtccagctcacgtagctggtttagcttgaactttctcgttattccgactaagtattttggtccgttcctctaccatgatctagttttcccctaaaacaaaccggcctctttatgaacgcgggatgcaggcgttagaagtttacccccttaaactgaattcgtcctcgaattcggcgagtgatcttggttactccctaacttgggacacgggcgttacaagtctaccccccttaaactgaattcgtcctcgaattcagcgggtgtaagatcttctttactccttaatgttttcccatctttagcctctccgagactttagatatcatatttgatcaaatctctatttccgagtttgatcaagtttcccgatctttgtctcttacgacactcgatcaaattcctgatcctggtcctttcccggactcgattgatattttctgatctttgtctcttccgacattcgatcaaatttctgatcctagtcctttcccggaatcgatcatattctcgacataagtctctttccgactttgtcaatatttccgaccttggtccccaccggactcggtcaatattcccgatataggtctgttttcgaccttgttgttttttccttgatcttggtcaatctccaataagatcaaaactctagaaatagtcaaaacccgactaagtctgtacccgatcttagtcaagttctgactagatccaaattccattgatatcggtccatctccgaatatatctacccactttcccgttatgttaaaagttttgaatacaaagataatatcttggttcttgatcgtgagttgggtaactattttcgtttccaaacacatcgatccctcaacttccttatccgccaaactcttactatgacgttttcccgagcacttatccatcctaggatcaagcatgctctaataccaacttgtgagaccccgtcccggacgtctcggtgtccgggaaccttggactcacgtttgcgcctcttcatggccgaatctcttaatttttcgcgattcaacatagaattgcctttacgaggctaaattctataatcactttcttattacacagcggaagtctttctaaccttggtttaattccagccaacccttgtatcggttccatcatctttgtcccttggacttagatcgatcctttactcggtcaagatatgcataatgttcgctaaccattctaagcctaacaatcgcatatttctttatcctaatttcacggtcaattaccaaatgtctatcttaactaatacgctagatcgttacataccttggccaatatgcggatttgattccttagcccatttgtcgccttactccattcgttcaacgactcgtatccgatcgtgaattgatgaaccaatctctattgtttcttagccatacaaccaaccaaccccactaacctaagtccaacgatagagattggggatcgtacgattcccttggatcacgatgaccgaatcaagctcttggctcattggtccatccgtcctccaaacgtacgccccttcggtttcatggtgctcgattgagccctcgacttatcgaaccatccatatttccgatccggtcgtttaacactacgaccgcccacagtttactaaccacatacccgtccggtccatggtggtctgtaaatctttcggcttatcgatccatccatacgatccgaatgatttcattatcacacccaagggtctatggtttcatccatcggttaatcataggctagcccatgaaatccttcttctgtcagtcttaggtttgctcgcgtgtccaacatccgttttgtccatcgaatctcaccgtagactttcacgttggttatccgtcgagtcaccctttggtcttaccgatctccgatcggttttaccatggcagaggagatcgatacatgaaggtagccgcgatattgatcctatgtggtgaatcacgttccttacccattcttggtgctttctccctttaccggtaagattgcatccatgggcgacctttgggtatgtttggatgcacttacccttgtgcttcctcgaacacttttctcgatccatcccatccgatgatgggtctgtctgacccgttccgtctgatgatcggcctgtcccatccgatccgtccgacgatcagtctgtctgatccaatccgtctggccgatccgattagtccgatgatcggtctggccgatccgatccgtctggccgatccgatccgacgatcggtctaccagatctgatttgtctctaagacgaacggtctaccctcccatcctctacactccatcgaaccgttggaccgggaggtagcatgcgcatcagttcggttgagttatactcgccgagccgcaccccctctccgaccaacaacttcgggatgtgttgggattgttttgagaatgttttgtggtgtatggatgatgtgtgagatgccttgggcgtcctcccttatataggggagaatggatgcttcccgaagcatcacattcgttccttgcacccttccgaaaggtcacatccgtttcttgcatccttccgaaaggtcacatccgttccttgcatcctttgggcgatgcaaccgtttgttggtacccgctcgaccttacaccttttggccgagacacctcttcatccgtgagctaccacagtccaccagctcgagtgtcagatgaccagaccacccagctgggtcagtactcgatcagctcacctagctcacctagctagtcttccagctggctggtttagctcacctagcttagctagctagttcatccagcttgtccagctcacctagctggttcacttgaactttcttgttcttccgactaagtattttggtccgttcctcgaccatgatctagttttcccatagtgggatgaccatagcggggagacgaacattaggaaatgccggaactaggatgttttacgttgcttctgcaaaattacttgttattatgtaaattttaacgaggatccgatataaagatatatttttgggtaactctttgccaagtataagctatatactatgcataaaatgttttcttaaagccagccgagtgtttaatgatataagacctagtatgggtcgctcaacactagaatatccaagggttggcaagcctaagtggtgttcctagtgggaggagggtcaatcacaatttggttaaggaaccagattcatctggaacctctactaagttgtgatcgatcatcttcactgtagcgtaactgggtcgcccgtggcttgtccggccatagggcgattcgggggcgttacaatttttggtatcagagcatggttatgcgatgctcgtggacacttgggttttcaatgattttatcgagtaaatttgagtcgcagaatgcaacattagattcctgttgttcgtcttttagatgactaagtgggggatagttttaccttgttttgcagatgtcgtctagcaaaagaagcagcacagtcagtttgttgcacagtcttaatgtgcccaacccgaaaacttcgctccgccgagcagtacagacgatgatagtttgtccatgggcatgaatgatcagattatggccgaagatagtgaatctactgagtccactatgtcaattgaatccgatccgtccgaatgtccagagaatgctgatgatcatgatgacctgttatctagtgaagaagcgaaccatgttgagtggatgatcactgaggatggcgagttattcgcggtaccaactgagaatgcgaccgaagaacaagcgaacgaaattcttaacaacatgctatcaatgttctatgtgccatcgacggatgaggagggaagtttgggtgttctgaatctggggacaattggcgaacatgggttagaattggaagaagcaaatggagacttgttcgatgtgccagtgatccaggtggatggtgcgttcggagaaatgaatgagtatggagccaacaatgagtacgaaatgctaatgcttacgggtattgacgaggaaaatgagaatggagccatagagaatgagatagagaatgagttagaacacgcgattgatcagttaattgccaagtgtgctcaagactatgtcccgaatgggtaagaagaaggagaaaatgggaacgatgggggtgattcctcgtcggactcatttgaatccttaacgccagaacctaagagtccgagtgtgatcaacatctcctcggacagttcgcaagctatcttgatgataacgaatcctagcgaggtggattcatgctgggagaatgaaatgtttaaaggtaatgaaccgagtgatgatgaaggaaatgggaggtgggatccgatgctacttgaacagtaactgaatcacgagtctttgatgaatcgtctaagacttgatgaaaagaggtcgaaaggaaagatgattgataaggcgggagaagatgagaggcagaagggaaagagagcagcagaattagaaatggaattggagaaggctaaggaccagcgaatcattggagtaaacccgcattcacttgggatcggatatgggattaactccaaggttaagcccagaatacgggcaacagcgagaaagtcagttgggaggaagttggccactccggctaagcgcccgtgtgatatatgcggccatacagatcatctgaccgaagactgcttgtattcatcaccgactatgccatatatggataattataccaagtgctattgttgcagaggattggggcatgtgtccatgtactgcccgtatgttgcgccaaatgcgggcgaaagatctttgagaggagttgggccattaatgactgcgggggcagaggagaagtgtttgaatgaagggatgccctcgtttttgtgggtaaggtgtgagtgtcccaagtgtaggaacccttgaccgatggtccgtaagatcatctaggaaaatatagttaacttttcggctaagtatagaatcggctgagtcatagcgaaattttgtgtgtaaatatactaaggcttaggacttgttaaatagtgtataagactaagactaaaatccggtacttataacttgtatgaaccttttgaatgtatgataagttaagtattttcttgcttgtgtgtggccgaccattatatgagtgagaaatcacttgaataagaatcagatgagtttaaaaacccatcgaaagagcctcaacaacatccggtcaaatgaagaatcggaggaaagaaattaaacttagttgggctcgagatctagattgagcatacttcagggaaacaggcaaactaaagaaagttcggttcgaggagcaggcaattgtataattacgacaaggaagttgggaatggccaaaggttagaattcgagggcgaattctattaaggaggggagaatgtagtgacccgcataaggacatcgggcacggccaaaggaccgaatgagaaaattttgcccgattgcaaagccaattgaccacgtgtgtccaaacggtgctaaaacatcaaagggcaagaacgggcaagtatgggcaagaatgggcacaaatgggcaaagatgggcgtgtcgtggcgaagtttgccccgccggccgcggaaccgacatgagtaggacacctcactcgcggtgccttgcggctcaagttaccaaccttggagccgaagtcagctgagtcttggagccgaagttggagtgacacctgtcgccatctgtcaccacgccatcgtccgaagacacctgtcgcctgtgggtgcggcagctttccggacatgtggcagcgggcggtgcagtctggccgaccttgggcgggttctaaatagagctttctccgcccaaattcatttctaaaggcgagagagagactgtaaggctgtccgatcgttgactcgtccgaaaccgagaaaagctttcccgaatttagtaaaatttgcccttggtcgaggaaactctgtccgagacttgagaatcatcgcatgtggtcgagaaaacttgaccatgagtaaggaatcgtcgaccgtgctcgagaagttatgcccgaaacccaaaaaactttccgagctatcgaatccgtgagttgtggtcgaattgtgtgtttgtttgcatgttttctagagctagtctttagattatatgcatgcttactcacttagacctaactaatcggaattcggtttaagttagaacttgaatcttaaagtgaatatgggcatttgacgaacttgataatattatcactaaagaatgaacggactggtgcataactaggttaaaggaatatgtacttaactaagtttacttgatgaattgagatatgattcgagggcttacttaccttgttagatggttatacttatatgagatatgctatgaggttgtgagtaaatccttgatatattatgcatatatattacgtgatttggtgcttgattgtctatacttgttttggggcatggtaaactacttatatatagtactgcatgaggttattgtgtctaagtggtattcagggtttacccgataccatcatgcttagagtaagatgctgcctccctttttgtgttgtgattgtgtcagtaagtcttgatcctgagtggtcacttacatgatggcacaagactcggagcgtatgccgagtaattcatgacgatgcattaaagtgatgttccggttataagcctttgtggctatagcttgggtgttcacagttgtgtacgtacgtgtgatgtgggtgtgcatgtacgtgtgtgtggtagcatacgtgtggagaacatgtatacacgtatgcaggagtttgtgctgatgttgtggcactacaagaaaacaggcgtttactgactacaacactagtcgtttcatagtcgtaaacagaaataatacgactaatagacgactaacaagactacgaaacagtcggcacggaatagtcgtcgattggtcgtcatatttggcgacttatgtacgattaatttacctgtttatgggggattattcgtgtagtcgtaaactagtcgtacttcgattgacgactactttgcgactagattacgatcaattgtattaaactgtaggcactattctggttgtcgtatcttagtcgctaaataatatacgactaatttacgacgtctttacgactacctaacgactctcttatattgtcaaacgatagtcgttaatgttggttactatgttacgactatgctacgactatatggcgactattggacgactatttgacgacgacattttgtgtcctaataagaatttggtcatatcttgatttctttgttggttgtttatcgattctgagaattcggtttgtttgttgttctaaatgctataaagtataaccaaaacacatttttattgaaaatcctatcaaatacataaaacacaacttacacttaaggttcaaagtactaaacacacacacaaacattattgttcaaagttcaagtgaaaagggactgaaatctaaacctattgatcattctgtggagtagctggtagaggctctgtggttgtcgaagattgagagtccatgaagtcaaggaattgcagatctgtttgtcggagatacttctccactaaggacaagtgttcgagcttgtccttttgctcagtcgtgatttgggcagtctcagcttcacgcgcagcaatctcagaatcacgcttctcattgtaggctgtctgctcctcaatcttgcgttgcgcttccttcagccgttcttctaaatctaggaaggacgatgatgattgtccagggagattgcggttggcacagcctaatgtgtctttgagactgccaagtccataaggattgcctctggaatccctttcggtggacttgtgccatcatgtgtctttgagactgccaagtccttaaggattaccatgggcatggtcctttatgggcttgagcgagttcttagaccattggccattaaggaccaaccattagagcctcgtccattagactttggacagaccaatggacacttctacttttcattctgcccggatctctgatttttttaggtgagattcctatacatgtcaatcactgtttttttttaaaacattctcaattttcttgagttgttgacgttttcgagatttacttgaatagtgcaagacgacaagtgatgaaaagacagaaacaaataaaggcttcaagtttgttgataactgctctctaaagagttcccttgagagattctgactctgacataacaggtaaaaaagttaaaatactcaacacttacttggaatttaaaagaacactgatttgttgattacctagaaattaaaaggtatgaaaatatttcgtcttctcaaaacccaatcggaagagaaattcaaagatccgaaaacggggaaagatgcgatgacgaccaggaatcggagggttacaaaaggccgcagctgctggggtttgatcctaaactcaatttcatagttttctctcgaatcttatttgattgaatatgcggttttacctctgtatgcatcaaaaacaggatcaataccgattactaggagaaaatgtagccaagttacggactaatatgatgaaagaatagctctccacgttcctttcccagcttgaagagttcgctcgtaaacacgaggtcgttgtttgttaaatctttatatatatatatatatatatatatatatatatatatatatatatatatatatatttctttttgttgtgtttgctgttgttttgtcatcgtcttgatttcgtaataagaacatgtagtttaataacatgttcctgaatagtgataaaaaaatttctttggttgcagaatgacatttgtaagaatcctgccttcagggctcaattccatgaaatgtgtgctaacattggtgtggatcctcttgcttctaacaagggtttctgggctgagctcctcggtattggtgacttctactatgagtttagcgccactgaagaagatgcttctgagttttggttagctatgagtcttaaaggatataaaatctaatgtgtatttttttctcttgtttagaattggaaatgacccctgtgatattagaaagcagggatgtaataattttcgtgaattcattaaataggagttcagattattgaagtttgcatgcttacaagatcacataatggaggtttgatcagcttgcaagagctctgcaaccatcttcgtcagagaaggaagacagaccgtgaagctgtgactgaagatgattgtcttcgagctattagcaagctaaaggtttctatctcacttgtgtttttcttttttctttcagatattttgaactaatcttgctggtatcttgggattttctcctcagctattgggtagcagatttgaggttatcactattggcaagaaaaagtttgttcgttcggtacccactgagctgaacaaagaccataaccatatcttggagttggcaacaagattctgaacagaaagatgcagaacttggacacaaagctgctgaaggcagactgttgatgatgcctaatgaaaaactccttgactgaaactatgatcttaggtcctttaggttgtggacacaaactaagttattttggatatgatttgaaactaatgatgtcaaactatattgttctagttaaatagtattattcttcagtaattcataacatattcaggttttatttatagcgtagtaaaaaaaaaataggggggattgacaaaaatagcactaaaaggttttttcatccaaaatagcatctcttttgaaaaatccacaaataacactcaaaactttaataaaatagtaaatataaataacaaatttcccgccaaaagaatttccgtaaaaaattttaccgccaaaaaatcttcgttaaatttttcactccaaaaaaatgaggaaggtaactaggaaattcgggtgaggattcacaaaaaatctttcctgaaacccttcctaaatttagtgaaattcttcctaaattttgtagaatccttcttgaatttaaaaaaatgattatttgaaagattccacaaaattcagaaaagatcctacaaaatttcagaaagaatttcatgaaattcaggaagggttacacaaaaaaaaaaatctgaatttcgggcaacccatcttgaatcgctttgaatccttcatgaattgataaccataattttatttaaaaccatattatttctattattaatttagtttagttgctaataatttaacgcttacagaatatgttaaagaaaaaacaaattgtctatttatacacatattacgatttgacaaaaacaaaatattggatataatgtatgtcgcatttttttttgccaatgtacttaatttgttatatttggtaactacgaaaatattttatatttataacataaatattattacttagattttattgttaaaatattttatattttttaattaatggcatttgatttacattgttgaatttttttgttttatctctaacaaattaaaaaaatacaaaatatttcgatttatattcgaaataaatatattgatgctgaatattcagttaattttaatgttgttttattttatgtttttgtaaacaaataataccaaaaagattgacaaagtaaatcttagaatatattggatcatttaatctagttatttatttttgcaaaaaattattgaaagatctaaatcaaatatatttctttaattgtagtagttgtaatttactaaattacccttgcaaaagttcatttagttagttttaaattatcctcataatgttgtagttcacaaaatgctttctaattaatagtatagattgttagtttatttttattctagtttgatcacctaaatcatgatcttaggttaatatgtgtatcaaaaatgtttgttgagtttccgaaagaactaattaattaaatgatcatgtttttttatctcaacgagagacggaggtgaagcattcaatggataatcttcaatacatgaatttctttttttgaatgaatgtaaaatttattcagaaaaaaataaatattatatgaagtgaaacttttttgaacagttttaagaattaaaatttacctaatttcactcaaatttgaagaacaataattagattaacacccaaacattacggtttactaaaatatcacaaattttgtgtaaaacgaaataaacaccgattatattaattcaattaaaataaaataattggcatagaataactaaattaaatagaaaaatagaaataaaatactagacgaaaaatataaaaacaagacaaaaaaaagttacaataaaaaacaaaaaaaaaatatcatatttgactccaaccaagctttttcaagcttctcaaagcattgatggtgtagtcgaagtccttatgagtttttagttttagatcttctaaaaggaaaacactaatttagctcctaggatccggttgtagttctagttcttatactcaatcatatacaagacatctagtcatattctaaaaatgctaacgaagccttttcttgtttctcaaagcattgatggtttagccaaagtccctatgagtttttgtttttggatcttctaacaggaaaacactattttaccttctaagatccagttgcggttcttattcttatactcaatcatacacacgacatcaaattatatttgaatccaaaaacactaaccaagcttcttctttcttctcaaagatttgatggtgtagcagaagtttgtctgagtttctggttttgtatcttctaaaaggaaagcactactttatcttccgtgatccggttacagttttggttattatactcaataatacacacgacatctagttatatttaaatccaaaagcattaccaagcttcttctttcttctcaaagatttgatagtgtaccataagtttgtctgagtttttggttttggttcttctaaaaggaaaacaccactttatctttcgtgacccgattacgattttagttcttatactcaattatacaaacgacatctagtcatatttgaatttaaacgctaaccaagcttctttttacttctcaaaactttgatgatgtatctgaagtctctatgagtatttggttttggatcttttaatacggaaacactactttagcttcggggatctggttgcgcttctagttcttatactcaatcatacagaagacatgtagtcatattattctagaatatgctaaccaatcttctttttgcttctcaaagctttaatggtgtgccgaagtccctaagatttttctgttttggatcttataaagaggaaaacactactttagctttcgggttctggttgtcgttctagttcgtaactcaatcatacacaagacatccagtcatatttgaataaaaaatgctaaccaaacttctttttgcttttcaaagctttgttggtgtagccaaagtacatatgagtttttggttttggatcttctaaaagggaaacactacttttgcttgcggaatcaggttaaggttctagttcttatacttaattatgcacacgacatatagtcatatttgcctccaaaaaacctaacaaaactctatcttgcttctcaaagcattgatggtgtagccaaaaacgctaactacgattattcttgcttctcaaagctataatggtgttgccgaagttcctatgagtgtttggttttagatcttctaacatggaaatacaactttagcttacgggataaggttgttgttctagttcttatactcaatcatacactcaacatctagtcatatttgaatctataaatgctagccaagcttcttcttacttctccaagcattgatggtataggcgaagtccttatgactttttggtttcgaattttctaaaagggaaacactactttagctttctaattttgatttcaattttagttcttatactcaatcatacacaagacatctagtcatatttgactccaaatactaatcttattattaatgcatgtggctaggttatccgcctagctactgatctaagggaaaagatccccgatagagtaaccctaatcttggaaatagtgtcaccagtccttcatgttgttgcttgcgatagttgagtaacagagcttagagtactaaggaaatcgattctttatgcgttaaactatgcatccctgcctgcgatagttgagtaacagagtatagggagatcagacgagtaagtgtttctataacactcgtcccgccttattggccaagatggggtgttattcatctgatcttgcaaaaatgttttctttaaacttcacacacgaaaaaaaaattgcacacaactcgccatgcttactaacctaaggaaaaaggggaaaaagggggtgagtaaagaatagtcattgaggggaatcttctctacccactaaaacatataacactttctaaagctttacaaccatcgtcataacatatgaacttagacacaaacaatcaaactaaaatgcttgaacctctaacaacacacttatgagtggaggctagccctcgtggctccaacactcacatgcattccgggctcgtcagcgtttcttcaccagcaacctgtaggcccatcactgtccacattactagggagaccacgatccataactcgattctccctagtcatacataaaattgtatagttaaacagcatcactatacatatcattcaataatcatcaaatcatatcaccacaaaatcttatcctgcgcaatcagatctaagcctacatattatgtatgaagaatcataccaaaagaaaatgatactatgcttcccaaataccaccgtcaccttggcctattaaagatgaagactgaaataacccgacccatttttttaaaaaaatataattaaatattcccataaatatctaattaaatcaaccaataaaataacaattaaaccgcaagttaaaaatactattttatgaataaataaataattcgaccaacaaaaccaagaataactaacaatcctaaccgggttccaaaaaccaaaaacaccaaaataaaacaaacgagttcctaaatcatcctctcttccttgcgatgattccacgatcacactttatctttacctgcatcaacaacacaatgagatgcgtaagtattatcataaatacttagtgaggcgatcctcccatctatgagctatacacacaagcaaataaaagggtgtaatcacgaatacaatacaaacaaaccagtcattgaacaattcacctaacacacattcaccacacctacatatcatcacacaaaacaaatcacacaacccaatcgctcagataagctcatggtcacgcactcaccttaacaacttgattctaatagcaattaaacccaggagagactctccttgcgtctgaaacagtccagaaacgtcctacaacaagtccacaaccaaaagcaaccgtgaagcaaactggacaggaaaaaccagaaacaagcagtctcaaagacgaaaccctaaaatacaaactaactgttaactattcaatctctccggtgaaaccctagctgcagaagtcccaaacctgcccacaaaatctcgtgccaatcggaaaacagacgagaccactatctcagtttcaatctccgctggtcctaattcgcgtctgagaaaacgtatctcacgaaactgcgaataactcaaccaattttaatccaaatccaattctgtaaactggagaataacgatagaggacttggaaataactctaccaaatttcgttaccttttaccacgatttgatatgacgaaactgatttctcccaaaccctaacaattctgctccttctccttttctctctttttctcctttataaaacgaaaagtggctaactaaagccctaatttcgagtttccttcttttataggcacactctagagtttccaattaacccaaccaataataccggatgatttaaaaccaaaccctaatcgagtttccggttcacgggcgttacaattctcccccactaacatagattcgtcctcgaatctagtttcacccttccactccgaggaactccgtgcaaccaacagtacagtccgcactccctccaaccagaccccctctaggtctctctatccagtcgatatactcacgatttactagtcattgttgctcacaactcactctccactctcagaccgcaatcttcgagcataaaccgtcactctcaggcctcggcctacagtatctcgggtatcacacatattatcttccccactcaaagtcaaaccctgagttgtgtcggctcactctcagccacaaagtcatcgagttacgacacttggagaaaataataccacaaaactcgctctcgggtcgtcaccctaaagtgtgctctcggatcgtcacccgaagccactgtacccctcgtactctaaagacaccatgtccctcgagttaccggtacctcaagagcataccccgctcctcacgagtcgttgggaccctcatgtccctcgagcaacaatactaaacgcttccgagcatatctccagactctctcatggattcgcgtaagacacctctatgcctcaccatccatcatatcccctcgagaacatccttatgaccaactcccggccatctcgtaaacacacctttctcttaggttgtttactcaaaatttccgaaaatagacaagtcctttctaggaaactttccatttttggaaaccgcacaacacattcttaaataagacaactcaagtcaaatccaagaaaaaatactcatcttattaatcatcaactgtcatgatcgttacaactccaaacgaaaatacaaatgaaagagaaataagaacaacaactcaaaagctcaaaaactcaacaacactgaaactggaaaccaaggaaaggcaaactcaaaagctcaaaaactcaacaacactgaaactggaaaccaaggaaaggcaaactcatgcagcaacctgcttctcgaaccacttcttgaaacttgccttcatcctcgcctctggctcccaagtctcctctgtcacaccatcgcagttccacaggactttgatcaaaggaatcttcttccgccgaagttccttgatcctcctctcgagaatcctcactggtctcgcctccaaagtcatgttgggctgaagatcctctagaatcttagccaacacctcatcatccttgtgaagacacttcctcagcatcgacacatgaaagaccttgtgaaacgcacgcataacatcaggcaactctaacctgtatgccactggtcccaccctctcaacaatcctgaacggacccatgtacctcggagtcaacttagtctctgagatagacctgttcggacctcgcaacatggccatcttaagatacactctgtccccaacctcaaactcaagctctctcctcctcttgtcagcataactccgctgtcgatcctgagcttccttcatgttcagcttaagaacccggatcctctccgtggtctccagaacataatctgcaccatatatgctcctctcccccacttgggtccagcataacggtgtcctgcatggcctcccgtacaacgcctcaaaaggagccatccttatactcgcctgatagctattgttataagcaaactctaccagactcaagtgatccgcccaatgacctccccgatccaagacacacatccgcaacatatcctcaagcgtctgaatagtcctctcagattgcccatctgtctgtggatgataagccgtgctcatctgcaccttagtacccatctctccctgaaaggctctccaaaatgcagaagtaaacttggaatccctatctgacacaatactcacaggtactccatgcaactccacgatctcgctcacatatttcttagccaacagcaccgctccatcggtttttctgatggccagaaaatgtgctgacttagtcagacggtccacgatcacccaaatagcatctttggttcgcgacacaggcaacccaaccacaaaatccatcgtgataaaatcccacttccactcaagaatgggtaaactctgcaacaggccacctggcacctgatgctcagccttaactaactggcaaacatcgcactctgtaacccaattagctacatccctcttcatcccgacccactgatagtaccgcttgaggtctcggtacatcttagtcgctcttggatgaatggaaaacatgctcgcatgagcctcactcaagatctcccgtcgcaactcctcatccttaggcacacaaactcgcccatgcacaaggatagtcccattagctgcaaactgatactcagagccgtctgccttagaagccgcaatcaacccctcatccttctcctgagccaaccgaactctagtcagaagatctgctcgatccacagcttccaatcccaatggctcttgtgccataacacacaaccgcaaagcaccaatctcacttaccaaggcctcaacacttccgcccacgcgcttacggctcaacgcgtctgcaaccacattagccttaccagaatggtaagctatctccagatcataatcagccaccaactccatccatcgcctctgcctcaggttcagctctggctgagtgaagatatacttcaaactcttatgatctgtgaacacctgcactttcccgccataaagataagacctctaaatcttcaaggcaaagattagcgcagccatctccaaatcgtgagtaggatagttgccctcatgcttcctcaactgccgtgatgcataagcaataaccttcccacgctgcatcagaacacaatccaaaccaactctcgaggcatcagtatacaccatgtaaggctctccatgctctggcaatgctaacactggtgtactcgtcaacatctccttcaggctcatgaaaccctcatcgcactccggtgaccacacaaaaggaacatccttccctgtcagcttagtcatcggctgtgccatactcgcaaacaccttgacaaacctcttgtaataccctgccaacccaagaaaactcctgatctcagtggcattcgtcggtctaggccaatctctgatagcctcaatcttctctagatccactgaaactccctctgcaaaaacagtgtgacccagaaaacccatctctctctgccagaaactgcacttactcaacttagcgaacaacttctgctcccgcagcttctccatcactctcctcagattgtacctcatgctcctcaggactcttagaatacaccagaatgtcatcaataaagatgatcacaaactcatccaaaaactcctggaacacgctgttcatcaacctcatgaacgctgtaggtatattagtcaaaccgaaaggcatcaccacaaactcaaaatgtccatatctcgtcctgaaagcagtcttgcgaacatttgcctccgctatcgggatctagtgataacccgacgtcaaatcgattttggagaaacaagtagcacccctcaactgatccaacaactcatcgatccttggcaaagggtacttgttcttcacagtgacccggttcaacccccggtagtcaatacataagcggaaacacatcctcgaactcatgaacaacccgaatgtcgctcactgctacctgccccacagactccggcatagatatcgtcaccaggtaagcctcgcagcccttctcgatcattttctctgcctgcactgctgagatgacgagactccttgaggtaggtctcactctctgataaaccaaccttccctctggccgctcaaaagaaactctcccacggtggcagtcaagatgtactctataatgatccaaccaatccattcccagaataacatcatacaactctacagggctgataatcaaatctactggcattgactcccctgcaatctgaatatctacacccttcgctctcccaagaaccgctaaaaactgccctccagcaaccttgacggctccaagctgctcaccaggatccccacggatgttgccgcgcgaggcactctccggggtaatgaagcaatgcgatgctccagagtcaaacaacacatgggcctctacaccgcccactaattaggtccctacacaaacctcatgtgctaagaaccctaacattcatcacaaaacaatgatatccaaaacaacagaaacaattcacaaagtctgagtctcagaaatcataccagtaatcgctctcttgctggtactacctatctcacgcgtagtgtaaccctgcggtgccgctgcaatatgtgctaactgctgtactctctgctgcacctgcgctccgtgctgcaccgccggctgtaccactgccactgccatccgctgcagcttaggacaattcggcctgagatgtcccctctccctgcaatggtagcactccctcgtctcagctcgctgcgtgcaatctgccaccttgtggtcaaggctcccacaagaaaaacatcctgctctggaaggatgatctcacttcctcttctgcccctgcgcaggcttgccgcccttgctaggtgccacctgctgctgagtcttcttcggttttaccgctggactcactcccaccacctgcctctgaaggtcctcctctacctcagcagccgtctccaccagtgccgccttcgtggcgtattgcaacactctacaccgcaccctcaaatccggtcgaagtcccctcaagaacctcctcatctgggcctggtcatcctgcatgccccgacccgcatacaccaagagtcggttaaactcccgctcatactcccgaaccgaccgctcaccctgtgtcagctcaagaaaacgcgcctccatacggtcgagcgcctcctgcggaaagtacttggcattaaactcagccacgaaatctgcccaagacatatgcgcctgcctcctcctggcagtcacactccgccaccacaaatgtgcatccccctctagaaaatgcactgctagatccacccgatactctgcagggcatctgctcgaaccgaagttatgctcaacccgcgacttccaactgtcggcctcctcaggactagtaccaccaaaaaaatacctcgtgccaatcctctgcaactgctccatcatcctcaaataagatggaacctcctcagcaaccgcagccctctgctgcacctccgccactcgtggcgcaactggagcctgcactggtaccacacctggtaaccgctccaacaactgcctcaacaggcccgccaaaccaacccctggaacctgggctcctccggctgcggcacccatcactcttgggccctcagcaccaacggcatgcacaccggcgccgacatcagctccaccagcccccactccggctgcaccggctatatcggcaccaagaccatccccaaccccgggctccagaaactcagggtgcgaacccacactctgctcaactgtggcattgtggccatcactttcgccggtaccctcgaggactcgtcctctaccgcgaccacgaccacgaccacgaccatgaccacgaactccagctcccctaaccatctgcgctactcaagaacaaaaggctaagaaactagaacaacgaatatatcacaaacaacttaccgtggaatctcatttaaggctcgaagaagatgatgctaggactccaacacacacaattgactaagcactctataatcaaccctcagtatgctaacaccctagctaatcccacatcaatcatcaggaaaataattcatcaattaattattctatacatcctagaactgtgatcgctctgataccaaattaaaacaacccgacccattttgtttttaaaatataattaaatattcccataaatatctaattaaaccaaccaataaaataacaattaaaccgcaagtcaaaaatactattttatgaataaataaataattcgaccaacaaaaccaagaataactaacaatcctaaccgggttccaaaaaccaaaaacaccaaaataaaacaaacgagttcctagatcatcctctcttccttgccatgattccacgatcacactttatctttacctgcatcaacaacacaatgagatgcgtaagtattatcataaatacttagtgaggcgatcctcccatctacgagctatacacacaagcaaataaaagggtgtaatcacgaatacaatacaaacaaacaagtcattgaacaattcacccaaaacacattcaccacacctgcatatcatcacacaaaacaaatcacacaacccaatcgctcagataagctcatggtcacgcactcaccttaacaacttgattctaatagtaatgaaacccaagagagactctccttgcgtctgaaacagtccagaaacgtcctacaacaagtccacaaccaaaagcaaccttgaagcaaactggacaggaaaaaccagaaacaagcagtctcaaatacgaaaccctaaaatacaaactaaccgttaactattgaatcgctccggtgaaaccctagatgcagacgtcacaaagctgcccacaaaatctcgtgccgatcgaaaaaccgacgagaccacgatctcagtttcaatctccgctggtcctaattcgcgtctgagaaaacgtgtctcacaaaactgtgaataactcaaccaattttaatccaaatccaattctgtaaactggaaaataacgataaaggacttggaaataactctaccaaatgtcgttaggttttaccacgatttgatatgacgaaacttatttctcccaaaccctaacgattctgctccttctccttttctctctttttctcctttataaaacgaaaagtgactaactaaagccctaatttcgagtttccttcttttataggcacactctagggtttccaattaacccaaccaattaaatcggatgatttaaaaagaaaccctaaccgattttccggttcacgggcgttacaaagaccaactcacttctctttttcccgtttagacaattactagcatggctcgaacaacttattattgatcaccatcttggttatccatcaacgaagaccttagcctacaattcatgaagcctcctgcaaggtttaagttcaaaccgagctcatttacccaaccaacaacacaaactcgtcattatttactctttataaatctgtctcagaaacatacacataagtcaataactaaccgttaaaaatgtaatcccaccgttgcaaatgtagccaatagtatcatgaacgcatccaccaagtttattcccgatctgaaagcacatgaatctcgcacgtctttctgaagatgctgcatcagaactgttttctaaatttctgcaacttgagataattctaggcaaaatttcaaggtcaattttggatggagattaaatctgatggacaagatatcagctattctgagtttcttgaggcaagatatttttatagacgtcttgatattgatctaattccttttgggttcatcggaaaaatgcatcacaaaactaatagtcacacagtgttctgcatttatacttggcatagatttggacagcttctacagttacttgtccagaaagaaatactcataacctcttgaatataaatccgattcaaactccgtcaatggatgtggatttttggaaatgtactctttccgaggacaccttactcgttatctaattctctatgtattgacgggaatgagtctcataaaaccccatcttgaaactgttcttcctccttcctcttttctctttttcttctttctttgcttcgcttagcttcgatctggttcagtcttcttcacttaatacttctcataagtattaagaacaagaaatcactttgccactgtttctccttcgtggtgatgatgatttctcgtctgtcatgtttcgaccttcatctccgttttcttttcgatttcttattcttctttgtcttctctagatctgattatcccttcttgcctctaatctgtttgcgttccccttcaatgaccaatgcttgtttctctttctcatgagtcagatcacaacaaagcgtcaacaccgctacaagaaaatgattttattatgaccaaatatttactcataataataaatgttttgtcacaataaaagtattgatacgcatccgtgacgttttgcaaacagttgcaatacactcgtcacaactttttttcgtaacaaaatcgtcacttacattgtgacgtttgaattgagaagcaatatagtcaccaaatgtaacgatccataaacgtatcctaaatgtcacaaatactgaccaaattttttgccctcaaaccgtcataattcgtgaccgatactacgtatcaatttcgtcccttattatgtcgaaaatatagtctcaaaatgccgcattaagttactaataaaatgtcctttatcagtcacaattacttagtaaaacttttgtctgtaaaacgtcttaatgagtgatcgatactacgtatccgtttcgtccctaactacgacgaaactatagtctcaaaccgtcgcatttagttacttaaaacatgtctcttattcgtcacaactaccaactaaaaaactgtctcaaaatcgtcatattttatcattcgttgtgaccattttttttgtcttaaaccatcacaattaaagactaaacaatttgtcaccaattggtctcatataccaactaaaattattgatgcaaaaccgtcaagttttgtgactttcctaacgttctaattatgtcactcatcaagactaaactatagtctcaaaccgtcacatatgatgacccaaaaattgttcccaatcggtaggaaataccaactaaacaaggattagaccagcggtatcccgcgggagagggtttatatagttttttattaagtaaaaaagtgtatgttatatcataaaatattaacatatatatatatattttttttaagacttgtataactaattattggaaaaaaaaatttagtatggagactatttagagattaaaacaatatgtttcaaaatattttaaattgtgtataaattacttaatgtgtatttcatataaataaaatagttattaaaatgtaatataatggtaaatggtgtaattattctgttgattataagggctataaaaaccatatgtagtataacatatattatttttttctcaaaacaaagacaataacatttataaggagttgtctttaaaacatgtgttaataaaagagggctatttttgtttttacgggattttgattttaaagataaaatagaaaaaacaaaaagagagatgagagcagcttcttcttcaccactaatctcgttcttcctcctcctcgtcgttccatcttcatccttcttcagataaaatgggtgcaggacaatgttgaataccatagaatcagagcatttgacagcttaagtttctcgagcatgaattcattgctgattactactaaaccatcgacagtttgtcaaatattatgaaagctcaggtaattttaatattctggaaaaatttcttagcttcttagaattgtatggtaatgggttatgtgcaacctaatccgtttattcaattgacaacaatcacgaacatggtatcctagatattagtttgattgaataggtgataaccgtttggaagtgatctcgtttttgaaagtgatctctttatcgaacttgtcttcaaatgaaaagttcagagttttatgcatccgattgaaaaccatgttctatctttgagtatgcaggcttctggtatagtggtagtatgtcgtcgatgtgtacatgaagtctcttaaagccttatgtcaccaattaggcaaggtaatgcaatagtcttactcgttgttatattacttgattgttgaatgctttgaagactaaatttggttaattgattgttaagactgattttggttaacaatgaatcttatgtagtttgtgttatgtgctaaatgaatcttaagtgttttgttctaaatgtatcttatttcttatctttttaaaccaaaatctatattctgcttcttattttttattcagactttgtttggctatcatgaagctgtgagatgcaagtgtctgctgcacaatcgagagaatgattgacagtagcttgatctgtagataaatgacttgttctagacaaatatggatggaacagacagtgactaagaagatttcaatcccaatgatacattattctagcaaaaacgtctgaagtatcacagtggtatatgaattctaataaatacttatttttttcttgtaaaaagaaacttgctggtattgacatattttcagttttatgtgcagaaataatctgcgatactgcacctttaaatgcgaacaaagacaattcaattgactcgagaacaggcatgtttcttatttggttctgttcatataggacagagctaaaccaatgaatctattcacatatttgttatttagcagctgtcattaaaacaaaaaaatcttataacgtcatgtcctatttgcaactctttgttaatgattccatataggaatgtaataaagcaattgacatgatgatttggtttatatattacattataggtacctgatatctgttgttccctgacgttaaaattcgcaactcgttgacaaccaaatcaattctcatttatataaggttagttacacatcacctgtttcaagtttatatacattgttttccacgttttgatttgtttgcttgaaggtataattgaatatagctttcttgttttctcgttaatggaaatagctgatttatttgctgtctagaaatgaaatctgttatgaatgttgtctcgaaataaaaacatggttgtttgtaacaacaattgaaaacatcatatgaataaccaaagcaatgaaacgaattcctaaccccttatgttctgaaagatctctttgaaaacaacattcattgtttgactctgcgtgtttccttctttgtccacaatgagcactttcaatccttttttggaagtgactcttgataaggcaacatatagctggccatgagaaaatactggtttaggaagataaattccaacttctttgagtgattgtccttggcttttgtttattgtcatagcaaaagccacagctataggaaactgccttctcctcatccggaaaggcaattttgtatctgaaggtgaaatctgtgattttatgattatcaccttgtctccgactctatctccagtaataactctagcttctagtatatgattacccatctgcgttacttgcaatctagtaccattacataggccaccttttggatcaatattccttaataacataaccggtgtaccaatcttcagagtgagattgtgatttggcaaaccagaaagctttatactattgaggaaatcaggtgtcaagacgggattgttcaatgacgctgcatcttgaggatcaatactatccgcacttaaataagtaactaattcacctgtttgaaaacaattgttagaattcttacaacaaaatagtcataatacacgacaattttaaacttagcttaccattaagtttgtcgagcatgatgtcattgatggtgttaacatcagtattccgtggacacaatatagctctctgttggaaaaatttaggatcattattaggctgcaacaaatcaagatctccataaacagctttggtaatagcttcaataggatcattggcatctttaataagtaactcttcaggaatatcgatgagaacttcaccatcatttggctctgaaactcttccatctccaacggcaaggagccaattagagaattcttttatttcctctgcctcatctttatccaaatcattagacataagacgcatattctttgtcaaagtgagtaccttgcaatgttcccaaagataagatgaatttaaagcagctaaaacgatctctgccctaccagcaccatgtatcacaggaagtacttgtctgaaatctcctccgaagacaacgaccttcccaccaaatggctttccatcaatatttccaataacatcatttagacttctatccaatgattcaaaacagtaacgactcatcataggagcttcatcccatatgataagagatgcttcctttagcatattagcaaggtctgaattaggcactatatgacaggttgtgaaatcatcaggattaataggtataccaaacctagaatgagcagttctcccaccttgtaacaacaaagaagcaattccgctagacgcgacgttcacagaaattaaacctctcattctaactgcagcagataaagttttccacatgaaagttttactggttcctccaaaaccgtaaacaaaaaaaattccaccactgttttctaaaacagctttgatgatctcatcataaatccctttttgctcagaagtcatcttattaaaccaatcatcatgatcttctctcaatttttcgatgttgtaatttttctcttctgtaatgaaacggtttgaatgatcggtaccttctttagtaggtttaggcatgtctttgaagtcttgtagagtacttccattacacaacaacatatcttctatctctaaaagagcataatttcttctctcagcatcagttagtactaaatctgaaaatggagaagaatataatttaattagaacagaaaaaaaaaccaacgaactatagggaataaatgtatatcaacgaacctggattgtcgtactgttttcttttctttgtttcaatgtcttcgattaaaattcgagaacatttttcccacacatactctggtctagcaagacatttatccagaagcatcatagaaaataaattccgaagatgatccccaaaaaaatataaacttccttcgactatagtatcaatatatgcttgatcatctgtgagaataccacgtgccaaacatgcctccttgtatgtctcatacacaacatctttgtatgttctgatatcttcatcacttgttggaccacatacaatcccaagaagtatcctcatgtaatattctggatccatctttatggaggcgtagttcattcttcctatacagaaacctctttccctaagcttccactgcttattctgtccatcccatgtgaaatattgaggaatctctgtgtaagtgaactgtctagcaaactcacactcttgattcagtttcagaaaagccataaacatagaatcttcgtttgcttttctttccaaaagttcatctatattctgagtgtcttcaaaacatagtggttattttcctggtagatgatatgaaagcttcattataggtgtagttctatactgagtgggaaatttgaatatcctccaaactgcttcagaggctgacacatatctatttagtaagaaaaatataagtaaaactatccaagaaaacaattagagaacgatatattccaagttaaaaaagtatatcatacctgcaatcgaagtaatctttgatttcatctgtacttttttctttactgcgagtttctgagccagtctgcatattagatgtcttgtccttaggttcaacaacaatagctacacgatcttgtcctttattaatatacttaaataagtatttgatagaactggattggttacaccactcaacgtttatgtgagccctataacgcaatgataacagacgattataaggaacaacataagagttgtcacacttaataccccctttttcaacaaaatgttcagattctcgtcttctatatattggatacctgtctttaccaactgttgtttgctcaaccagtttctaaggaaaaaacttagaacacttaccatcaactatacatggtgactctttgttggcagcaccacatggaccatgtatcatacaatcctttacaacttcatataacttagggtccttagatttatctggaatctcagcagatattatgttgtcaatatcatcagacgttgggaatttgcaactcttatccatgaataagagtatatgagcatgtggtagtcctctcttctgaaactccactgtgtacatagctgcatattaaaaacgattttaagctctcttcattatagtcacagcgaatcaaataaacagaatctaaacttataaagaagatgagagaattaattaccagaaacagttttgcctagaagatgttcttctgttaaatctttcataagagagtcaagcttcatcttgaatatccaacacacaccatctggtctatcttcagcattaagtttacgctctttacaatatctagttatctctggccacttggggttacatgtaaatgtaataaaaaggtttgggaaaccatacattttagttatagccataacatcatagtaagagttcaacatatagcgaggtccaccagtaaaagattgtggaattcggattgatttcccttgttcactcatgtttgtgtttccaccttctctcgcagccttaacagtatcataattctcacatctgagattagattggttaaacttaatataggccaacctgttgtgtatccatctaccaagaattgttggaacaaacgcttcgaacgcagtagggtctgagcttcatctgatctctcttgtattctaaaagcataccattgcctcatacttatacacttgtttgcttgttttcctgttctgcctgtatatcccttctgtattcctggtctaaaaccatcttcaccataattaaatatgagaggatattgcattgggacataagaaggatgaacttcgcttattcttgatagatgtcctgttttcttatcttgaacgataatatcacgtgtaggcatttcaggacgaaagtctccaggaatcaaagctgtaacttcagacgttgtagggttacaataggttttgccatcctttcctaccctatcactaacaatctgcatatagaatggttccccattattactatccaacttatcttttgctagcctgaatttttcaacgtatggattggaagcatccaacattctgatgagcttttcaataagatcctttctcacttgatttttggctgttgctttcttcggattctttcccttgctaaacacagaattgttaacaaatcatattagtgaaaatacaataaacttcaatacacaaggaagaataatatgtaagaaaataaaatataaactttaccaccaagggaagtcatgctgaatagcatgttgtatgctctaagtggctcaactcgtcctcttctatcgagttggtttgatatgtcccctaaaaccctttcttagttctattcgtatttgaattcactttcagtgtatcaagtttagaaacctggttaatcgaatctaacaaaaaaaaagaacaaagttttaaagtgtaatttcatattagaattaagatgaataaaagcttaaagtcagaaactatataaaacagaaactcacgtttagtagcgtctcttcttatgtcggataagaaggtgtctgactcaagttgagaataagattggcttattctgatagtctttatatttggatgattttctgttgcaatgtatgctgaaaacatgattgaattatttatgttagaatgaaaaacaatagtatctacacaaaactcatatacaaaaactcatatatttcagttgctttgaattgacttcataaatgctagtgtagacaaattatgctcacatttgattgtttctgatctgattgaagttagaaagtcgttgctgccaagttctgaagttgactgtttaattggtatatcagataatattgatccatcagtggttaaacattcaagaggctctgcatacattgataaggatcgtttgaacataattcatgggttaaccaataaaaacaaaaaatataaatgagataaacataccagaagaatttatatattgactccattgagagacattagatggagtcacaggcacagagcataaagaatatggttcttgataagacaatgattgtctaacagaaacaagtgttagatatgagttctcatcaattgagcctgaaaaaaaaaaaaagacacaaacaaaattgatgaaaatatcaaaagtcaatactgtatagaactatttgttatactcttattcgagagaatgatttacttgtatcagtcactgatagatttttaactaaaggagaaagaaactcttccaaaaccactgaagtcgtttttgataggtttgatgtgggcggcgggcataaagagtattgttcttgcgaagacaatgattgtctaagacaaacaggtgttagataggtgttctcatcaactgaaaatttggaaaaaacatataagccattttgtacacataacaaagtagtgaagtcttaactacaggttcatatcaattagcatattgtagaatataatgatatacctgtataagattgtgctacaattttccctgtaggacaaagagactcttctaaaaccacgtgcttggatttagttatgtctgtaattaaccgagcaaatatagatttcagtggaacgacaaacccatttctagatgatttagctttgtgttgactatggtaactgtttttgctcgatgaacacttcctcttagcagatggagtgatgtggttttcacctttatcaaccaatgcacttcttttcttcatcaagctattgtttgttagacgatagaactgtaatttttctaaataatggagtctaaattaagagttaaggatgagtagtaactatataatcttttgttaagatatcgaattgatatgattgcaatcatatattattgttatatagattgctaaatcagaatatcattgttaagtatctattatattctctgcatctaataattttttttttttttttaatttcaggttaatttgtaggctatcatataatcaagatgtcaatctgacgaatgtggaacgattttaaaggttagttcttcatcttcataaaatcttgatttgatgctgtagagaatctagaggtattaagaacaactatataacttaggcaaatttagattcatttcgcattttatataaactttgacaattaaattatagaaaataacgtcacaaatgctagggtcatgctgttctccacaataaaccaacagagacaactgattccttatctgagagagattcatcaattacgaaaagaatttggaatctttatttgtttagataatgaaagctgataggagtttagtattatatgattttgagaaactaagaatattaaaactcaaaagggaaaccaattatcatttaaggaactgaaacaaatgtggaaacaacaaagaaaaccactgattaaaactaaaaaaactaagcagaaacaaatgcaacatatcaaactaatcttatgtttactccgtcggcttcacataactccattaacttcatctgcgtactccctcttctgcttaccattcagagaaatgagcttctcatcaacaactttagcttcattattcttttcaaccatctcctgttttatcttcacaatcttgattgagtcaaggcacagtttcttagttgatgaagaattatcagcaggtaaaatgcaagtttcaccactcctttttgaagatggagttgtagcctaagaaggctctttagagtaggttagcatgaggctaccctgagtctataagtcaattgacattagtgagtttttttactcataagtggcatttctttatgaaaaacaaacaatttaaaataatccatacctgatcaattgaatcatctggtatctcttcttctccaagaccaccataagcaagaactctagataccttataagtatcgagtccattccacacattctcattctcaacacagaccagatactgataagttttgccaattagattcttgattgaacctgggatgttgtctgggtcttcaatctcatcgaaagatccatcaagcaggttatttgctggacaaccaacaatctcagaagccatagcatcaaagagcatcaacttcatctcaccacttgaatccatcactttaacatgtagcttgtacctgtataggtcacaatatttaatccactaaataacagacaatctcatcttaacatttttcattaaatcaagattatgagacataccttgcaagcacattgtttactggtgctcggcaagtttcacaccagaactgtgctttcaaggaggtcgtgactaccttagtcacttttttattgcacttcttgcaggcaatatagtaccaagaccaatccctgtcaatgtcataaattgtacaaaggaccttcaccctaccaacctaagattagacaattataagtacgattaaaacaatgataagtctaaaccaacttcattagataaaggagcaggatattacatcaaacatctcagagacttctttaatggtctttttagcaaactgaagatagaaatccccagtaggtaactcagcaacttccgactttggtttagactcaatgagagtaagagcaagaccatcttttggtaaagcgtctttaaattccaggatctcagggatatcagtattgatcaagatctgagatgtattgaaagcattggagatactcctaacatctacaaaacaaaacaaaagtatccatgtcattatatccgtagaccaaaacatatataaactttgaaacatatctaagtcttgctatataacctttgtaagtcttgagcttggcaaatctgaccaaacatatgatcatttcaccattagcagtttcacaggcagtgaaaacttgttcagcaaatgaaccctagagagtacatggcaacctttcatccctatgttaataatagaattattagaaaaaaaatcaaacttaataatttgtattctattactcatatccaagtaaacttacgtttgatccctcagttcgaaatcaatcttctttgttggtttattgtggacatcaatagtctccatttctccaacattcacgatctgaccaaccacatctaatacaaaaacgaatcacagctcaaaaaaaaataatcacgtgaaagtttcttatttaaatggaaacgaaataagaagaaataaacataccaatcaggacgttttggttgagaccaccatttagaacatcattaaattagtcaaagagagaaaataagaatctgacaatggatcaattctcacaacacgggtttgagccatgaatcccattttgtaacgatgatcagttgctttgtattgacctgttgcataggtcaatccaaagttttcaatagccctccactctcctcgaacaatgggcctctcgaacctgttcaaatgctctctcttaactgaggcatggatcttctttccctttcatttaaaagcacaaaatattagtatagaatagacgttttcatttgggaatatggacaatttatatagaaataaaatgaatacttactctcacatctgacagaaccatgtcgaaagtctcaccaaactgcattgtgaacgttttccaggtatgaagaacacggacttgaactctccaatacgttttgtagggcttgatgtcatcaaggtaagcaattggttgagccattgtttttatttagttgctagtaaatgcggtatttgagtgatggattgtgatgagaatggctttgatatttatagtgagaaaggatgctagggttgctggatctaatatttcaaagatattcgtcagtatcttggagtataagttgcaaatcaaagatgggataatgactaatgattcgaaaatatgggataatgactaatgattcgaaaattgtttagttcataatgattggccatatatagataagtggttaatattgtttagttgattatggttatttctagatttaatcatataagtttacatgatttttgtaattgatggaatgtattatcgtcaatgtgtaggtagaagaaacgaatatgccgtttatgtggattttatactgattattgaggagaatgattatatgattaaagattctaacaatcgtaatcgaatatacagaagattataaaggaatatgcgtgtaacaatgtagatttcgttgagatatagaactaaacgtgttctgcctaagattttggtaagattgcaatcttcatggtccaccgaaaatgtagattttgctgtgatcgaaagcccattaaacgtaacccacccatctgaataaaacgcggatcctgtttacttaagtttttgtcttggacgattttaccctttagcatgaagaacaaaatccaaaattgaaatcaaaattggggacaaattagacaaaaattcaatttgtacttctcttttaataataagaggatttgatattattgttttattaagttattgttacaatgatactttatttaatgaggaaaatatataaaatatattttattaataaataattaaagtaaacaaatagaaaaagaagtaaaatccaaatcaaatagaatgttgtgaaatagaaataaaagccaaagccaaagtgttacgaagaaacaaaataaaaccatagtctaaagcatagcaatttcaattgcttgaagacgtttctcgatcgaggagtaaattctcatcacgactcttcttcaattcattttcaagttcatcaactcggtgggctaacgttcctacttcttcttcagtaggttgtggggaaaccgatgaaccattcaaatacacgaccttgttttgatattccaacaatctataaaaaaaaacacaagtacatatataatgagatgtattttaactcctcataaaatataatctataaatttgccttaagatagatttcgtttttctcctcttggctgagattatctactgtcaaaacttctccattgggagactccatttcagacaatcgctcttgcacaagttcatcaattttttccgcaactagccgggctctttcatcaacatacgtaccatcagatttttggtgttttttttttcatcacaacaatgaaggaagagtcttcattgtttgccacctataaggaaaacattagacaatgtaagaaatagtgttaatctttaaaaaacaaaaaattgttatcaataattttaaagaaaatatagaaacattaccaaggcatcttgcactttagcaaaagaacgtgaacctgattgataagtgtgtattttgcatgttttgagcatccatttgtcatcactttagcatcatatcatcacttttcatctccatctcttgaccaccactcgatcacatcactcgacccagaggtcgagtgtcttcatcctattgccagaccagtactcgacctcatcattctacctggaagtcgagtatcaccatcgccaccactcgaatgcatactcgatgacaagcttcagagccttcttcattccgcactgaaccagacactcgagcacaaggaagaaaagaagactccagctattcactcgacctcccactccaccacatgggtcgagtacagttcttaatccgtcccaatactgcgtcgttttgagtattagggtttcgggatatttggctataagtagtatgtacttcacattttcgcagacaagtttttatctagttttatttccgcagaccttgtgttctagaccttttgtaatctggatttctctttatctattcagtattcagtattcagcttttgttcttgatttcgtttactgttgttcattctgtcatcatcctgctgttacactgttgttatcatgttttcaacttgttcaacgtttatgctttctgttatgatgtctaagtagtgaataggtttctgaggatgggttagagtagtgtagaattctcagtatgctaggtgattgagtattgattgataaatcccttatggattagttgttctaaatgcctattgctttctgatcaactggaatttgagcccagacatttccgcgcccaaaaggtgttcgatgaaatgtctgaaccactaattccagagattcgtgaccctgtaccaaggtattggttgcaaggagcgttttggctttaacttgttgattcgtaatgcctgttaggttagctctcgtcaatggtgattgagtctgggactaggttaacttgagagtctctattgcggtggcacttagatttggttaatgaacttgttgtctagggttaatttattgagcatgttaatcacctgtaaactgaggaaacgaaactactcaattaccccatcctcgggaattctttatctgattgattttattgtttactctattgctgtttactgcatcctgtcatttgttgcttagtttctgcaattctttactgttactcgacctgatactcgaccacccagttgtctggcgacagactgtgcagtcgagtatacctgttacattatctgtctgttactcaacctgtcactcgacccacccagtgctctgcaacgagctgtgttagtcgagtgtttctttgtttctgcttgatgttctgttttctgcatgttcacttaggactgctagaacgcaccaaaacctgttattgcttggcttgacttagtgacttctgatcacatcttgattgttagcatcacacctatttggattgacaaccttcagtactaccacgacatgatagtgctttaggattaattgatcttaaaaacctattatcaatttggagctgttgcaaattgggtgtttgtttgttacatttgagatttcagacttgcttagatcaagttctttttcaattttcttttcggttactaactatgtgtttttctcgttgtcttcttgatccaggtacacctctactgtatacgaactcgatcaacaggcaatcagaacctccttttcaatgaaaacatcgaccgcatagctcgcaaactcaaagaaaggagaaacacagtcaaccttgtacctcagcaaccactcgaaatggctgaagaacagaatcaacaaaatggccctgccaacattggtgctggagatgcaccacgtcatcaccgtcagaggaaagaaattgcacctcctgctatccagaaaaacaacttcgagattaagagtggtctcatctcgatgattcaggggaacaaattccatggtctgccaatggaggatccactcgaccaccttgatgaattcgataggctctgcaacctgacaaagatcaatggtgtcagtgaaaacggattcaagctccgtttgtttccattctccttgggcgacaaagcactcatctgggagatgaatctgccccatgactcaatcaccacccgggatgattgcaagaaggcttttctatcaaagttcttctccaatgacagaactgcaagactcagaaatgagatttctggtttctcacagaagattggtgaaagcttctgtgaagcatgggagcgtttcaaggattacaccaaccaatgccctcatcatggctttactaaagcctctctactcagcactctctacagaggagtcctaccacgcatcagaatgcttctggataccgccagcaatgggaatttccagaacaaggatgttgaagaaggctgggaattggttgataacctcgctcaatcagatggcaattacaacgaggactgtgataggaccgtcagaggaacagctgactctgatgacaaacacaggaaggagatcaaagcgctgaatgacaagctggacaggattcttcttagccagcagaagcatgtggacttccttgttgatgacgagcagtatcaagtccaagatggggagggtaaccagttggaagaagtcagctacatcaacaacaaccagggtggctacaaaggatacaacaacttcaaaaccaacaaccccaacctctcataccgcagcaccaacgttgctaatcctcaggatcaggtgtatcctccacagcaacaacaaggtcagaacaaaccttttgttccctacaaccaaggtttcgttcctaagcagcaattccaggggaactaccagcaaccaccaccacctgggtttgcacctcagcaaaaccaaggtcctgctactcctgatgctgaaatgaaacagatggtccaacagctgctacagggacaagcatctagctcaatggaaattgctaagaaattatctgaattgcaccataagctggactgcagctacaatgacctgaatgccaaagtggaggcattgaataccaaagtcagatacttggaaggccaatcagcatctacctctgcacctaaagtcacaggacttcctgggaagtcaatatagaatccaaaagagtatgcaaccgctcacgccatcaccatctgccatgatcgagagttgccaactcgacctgtccctgatttcattactagggacagtgatgttcaagaaggggaggcttttactcaggttgaagtctctgttgttgaattcaaccactctgctggttctcgccatctcattcagtccacctcggaagagaaggccgccataatcgagagaatggtaaaacgattcaaacctactccactaccctcacgtgctctcccgtggacattcaggaaatcgtggatggagagatacaagtctgttgcagcgaagcagccagacgagattgaagcagtgatgccactaatggaagttctcaacctgattcctgatcctcacaaagatgtgagaaatttgatactggaaaggatcaagatgtatcacgattcagatgatgaaagtgatgccactccatctcgagctgctgataagaggattgttcaagagaagttagaagatccgggatctttctctctaccatgttccattggggaatttgctttcagcgattgtctgtgcgatctcggagcctttgtcagcttgatgccatgctctgtggcaagaaggttagagttcattcagtataaaccttgtgacctgactttgatccttgcggatcggtcttctagaaaacccttcggcatgctgaaagacctaccagtcatgattaatggagtagaagtgcctacagacttcgtggtgctggatatggaagtagagcataaggatcccttaatactgggaagacccttcttagcttcagtgggagcagtgatagatgtcagggaaggaaaaataggtctcaaccttggaaagcacattaagttgcagtttggcatcaacaaaactccacaagggtcaacagaagatggaaaaacctctggaaatgatagagtgatctcaggagaaggatatgagactgaaagagttaaagaacttaaaaagaggtctgataagcaagatgaaactatagagaagctagcccacactgttgaggaacttagaagtaagctgaatcagttgcagaaggaagctcaacctaaaggcgggatcgacactatcctgagaaagaagttcacttcaagatggtctgaagagatagattaccctccagaagagaaagaagcatattttgaagaaaggggaattgagtattctgctgcaggcctctccagggaggacgctgagtatgatgatggtatcagagaggattatgcagaccctctctacagttcattttcttcttgataagtgtgaggagtcaagctagagacttaaaacaagctcacttggaaggaagtcccatgattatccttgtaaataatttttactttctcgttattttttatttgttttagttgtgtttgtggtctcagaaaaaaaaaaaaaaaaaggagtacgtgaaggtagagtaaaaattcaaaacttttactctactgagggcctagagatcgactaacaggagctacagagtcttacagagagttcatcaagtttacagcaaattttaggatttcctgaaactttcctagtgaagatagagtaatgattcagaacaaagagacaagcgagggacccactgctgcaccctatgtctccccattcctaaccaacagacaagaaatccaactccttcttctcacacccactcgaccccctcaccttatcccatctctacactccactcgacctcgacgacatcaccctcctcacttatcacttactcgactttgttatctccacctcacctattaaactcgacccatcctcattcatcatcaccaacaaaacaactctcatactcccgatcactcgacctcctcaccatcctcttcatatactcgacctcatctttctctaaacaccaaacttttcgcaactctctcatctcccatcgtcgctcattggaattcaagtcctcaagtgttcgtcacaatcactcgacctctaccccaagaccatcactcgaccgccgcagctcacttcttcaccaaagccaccaccatcttcataaccgagtcactcgattcaacaaacgcactcgaccgcttcaccaccttctcctccgtccaagccgcaccactcggccgcttcatctctccagcccatacttcactcgaccacagtcccacttcaccacctctcattcatagccacttcactcgattcactgcatctctctcatcttcgctcattccaattctcaccaagtactcgatttcaaatcatcatcaacttcaccgctttacttcattcactcaacttcacggcaagagcacatccacttttcaagctcacatacatcactcgaccgctcctctcttgcctttcacagccactcgacctcgccaagacacaccgcctcaccatctctttaacactcgatcgcgagttcaccaaaccgaaaaaaaagaaaaaaaaattctttttttggtacactcgtgttcacttgattggtttgtatttttggtttgctgttactaacgtattaacgcttatttttgagtttcgtctgttttcaggtttcatcatgagtaactacagtggagaatcctctatggaccccgattacaatgtggatgaagctgagtcctggtccgctagacctagagagcaacatgtttaccagagcttcaaggataaattcgaacgctctacagcccgacgtaatcagagaagagctgaaatcgccaaaggaaagagggcgatgtcaagtagatatgagctgattgatgaggatatcgaaactgagtatgagccagagtcatgccgcaaggagacgaagctgctgaacaaacccgacgaggttacagtggaggagtatatcagattctttgagatgaatgacttctggggaacgaggtatccgtgctatgagactttagcccagctggggttactggaagacgtgcagcatctgttcgagaagtgtcatctggtgacactcatgtcttacccttaccctgcctataaggaggagacaatcgagtttctttccacgctgcaagtggagatgtatgaggcaatcacagactatgagctggataccatggggttaggcttcttgacgttcttagtgaatgaacaacggtatcagctttcgatcaagaagttggaagaactgtttggtttccctagtggaaagggaaccaaacccagatttgacagagaagagcttaaggatttatgggccactatagggaacaatctacctctaaactcggcgcgatccaagagcaaccaaatccggagtcctgtgactactttcagagatcggttgccaacgtcttttactctagggaatctacaggcaccgtgtctaacacggatatggagatgatagattatgcgcttacggggattctccgctggacgaagggaaagaatgtcttgagaggcgatctcaacaacgcaccaccagtaatgcctctgttgatccatctgtgtggatacaggaagtgggcgttgacgaacggaaagaagaaggtgagaggagcactatgcgtgggtggcgttgtgacgccaattctggaagcttgtggagtaccgctgaaggaaccagggttagcaccgaggatgatggacttggatcatttgtgcagatgtgagttcttggagtttgacatggctgacgactttcaccgctacaggtttgagcattcatcaattagaatcgccaacatttttctcccctacataaacgctactaggattctcgagggcaggaacattgacttcaagccggcgcttgaagatctttatttcgagggcagtccaccaactgaggagttctcagccaagaaagataaggtgatcgaaaggtcaaatcagagataccgaaggagctacaatagaagatgttgatgagacggatgatatagatgaggtggagtttgacacgagcatgtatcatttcagtgagcatatacctcccgcgagggaaaggaagagtttgagcgaagctcacagaaacaacagcaagctgcagaagtggtgcaagaaacaggacaagttactcgccaagtgcctcagggctatcaagtttctgaaggacaagatcagctgctcctcttccactacagctattccgcaaggacatctccctcaggacatgccttcgaggagatatgacgcgcccgagccaagtcggcgcaggcctgagcctagagagaaggagattccgcatgtccctgcgaggcattcatcattcgagcctcttgaatctgggaggaagaggaggaccacactcactcgatctagtagtaggagcagacaacttatgcagtctcatagtttacgcgaccgcggtgctgaccacagcagaaggagagaggtcgagtatcctcagagcggtgttggccgccacagagctgatgaggtcgagtacccacctgctggatactaggcagcaatcataggcagccattgacgagcaactatgttcattcttcgactgaggtaagcgcctcacttcaccattgtattacatcatctgttgtgatttgtttcttcattttttgtttctgtgattggatttgtcctgagtactctcttccaagtttattcacacagtggactgtgttgatttaagtttgggggagggctcaggaagtgtgtgttgcattgtgtatatttttgagtctgcattcatctaaggcatagaaaaaccaaaaaaaaattgaaaaatttcagaaaatgatttcacaaaaaaaaaagagtgttcatgtagtttcattacatttaggatcgaatctagagtgtttcatttaggattgttgcatatgcataggggatgatgatgagatagccttgtaagcattttgattcaccggataaactcagtgccctcgttgctagttgtctttgcgtagtcaatgaatttgaaataaaactgaaccatgcctagattgctctactcgaccacactgtcatgatttgataccattctctatcaatttgaacctgaatctgatctttaattatcatgtctgcatcaaatttgaactcatggataccctaaaatacttggattttcttattcattttgatcactcttgttaatccaagtagctgactctccttattagagcagttaacccaaacccaaacctagactttctttcaagccctatatcacttgtgagtgtttgtgaggtcttattccgattaagcttggtagaaagtgttaagttcgtaacgacagagatagtgtctcatgtagttctagttcgcatttttcggactagataggaataggtgggcgcttatactttgggttgggatgtgtttaaaagaaaaaagggttgattcattgataagaaaaggttaaagactctaggtgaagtaagctaaagaagctgaaaaaatctagtaaacgttttgggatttgtaaagaaaagaaagagttcttgttagctattgaagatgggcaaaagcccttggttttaaaatattaaaaacaggaaccttagttgttaaagaaatccaaatccgctagatgtatcaaagtgttgagaaagcttctcctagagttaagagaaaagaaaagaatgattagaaaaagggcttaaaagattcatgaatgcaaagggtagagttaaattcttatattgggattggagatgggattaccattagagtttcatttgatatactctgggtagatgggatcttatctctgtatgcatagcttgggacttacctttagcattctactaaagcttaatcattttttgagagatcccctgttactgaagcctattctgtaagggaccatctttgtctcttgaccttttaccttagccaaatgagttcattgatgatgcattgcttgattcacgttccagaactaatgaatgttaaagggattggtagatttgaaaacatgtgtaggtcgagcatatgagtcggattgattgataatgaggcatggctaacgtttttaagaattcgatcttgcagcttagaactttcaacttggacattgatttcatttggtttatctggtgctttggctctgagtccccgctttcaaacctcacctccagcttgttcttgattgtttgcttgagggcaagcaaagactaagtttgggggagttgataagtgtgtattttgcatgttttcagcatccatttgtcatcactttagcatcatatcatcactgttttataccatttcacatcatttgtcatcactttgcatgtttaggatagttttgcatgcatgttgcatatttgttttgttttcaggtgatttggagctgtcgacgagctaactggaagaagcggacctgatcatgacaaaccactcgacccagaggtcgagtaggagcttcaagatctcaagagaccactcgacccccaggtcgagtagaagacatcaccacttcacctcaccactcgaccaccaggtcgagtgtcttcatctccatctcctgaccaccactcgatcacatcactcgacccagaggtcgagtgtcttcatcccattgccagaccactactcgacctcatcactctacctggaagtcgagtatcaccatcgccaccactcgactgcatactcgatgacaagcttcagagccttcttcattccgcactgaaccagacactcgagcacaaggaagaaaagaagactccagctattcactcgacctcccactccaccacatgggtcgagtacagttcttaatccgtcccaatactgcgtcgttttgagtattagggtttcgggatatttggctataagtagtatgtacttcacattttcgcagacaagtttttatctagttttatttccgcagaccttgtgttctagaccttttgtaatccggatttctctttatctattcagtattcagtattcagcttttgttcttgattttgtttactgttgttcattctgtcatcatcctgctgttacactgttgttatcatgttttcaacttgttcaacgtttatgctttctgttatgatgtctaagtagtgaataggtttctgaggatgggttagagtagtgtagaattc

SEQ ID NO: 1330 - DNA, 95681 bp, Arabidopsis thaliana
gaattccgcgattctagacgattcgctagataccatcaacgagaggcgagatcgtgccttgatctgaattcaaaattatcaactagcaacagctcgatattacaattcaaaaatcaaaagcagatatttctttgtgggtgattatgttttgaaacgtgtcttcgataacaagaaggaggaaggagcaggcaagcttggcattaattgggaaggtccctacattgttaccgaggtggtccggaatggtgtttatagattgaaagatttagaagacagacaagtccaacgtccgtggaacgtggtgaacttaaagaaattttatgtttaaaaaagacacgcattttttgtacatgaactacggtgtggcttgatcccaaaatgggtacgtaggcagctcggaaacgaattcagctattaataaaatttgttttatttatttgaagaggagttcgactatacgaacaaacaaaggaaaggagttcgactgtgcaaacattcaaaacaggaagcaaggttacatttattcaaaggcgaaaacaataaaaagagtcaaaatcttaaacacacttcaaactaggaaatccttctcgtcttgcaaaacacttcgactccttcgttggcaagatcaaggatgggcatcatagagtccgagatgcgagcaaattcggcgattccatgttcgatccagtccccgatatgagagttgatggtgtgtagctcccttgatatcacggtgactctccgcagcatctggttgatttgctttcaaagtttcttcatttctgatgaacgcttttgatgttgagacgcgaaagctttgataaaggccattgcaatttctggatctctgcttgaaagatccttgattaatgcacatggggctcagatctgggatctgaagttgtgaagtgggaagcgtcctttgtccgacacgttcgggatatgctcatcaatcatccaaccctggcaaagtctggcatggactccgagcatcgaaggttaaaagccattactacacaaaaggaaaaacgaaggttagatgaagaataaacaaaacatagagaagcaatttatagaaggattcgtaactttcaaagatgcgattccattcaaggccggagtgattcgcggaagcattcacgtcgctcccatcgccgtgcattcaaagaatatctccaaaacgaatatttgtggaatcaaagaaaatagggaagcttccttaaataaaaatgggccgaaggccaaaaataagtccatacgaaaatagaaaaactttcaagttttgggggacatttagggaagaggctcgggaacaggctccttcactgctggttcaggattcgaggtggacccctcgttcttgacgtcaacctcggattcattcttgaggcccaaccgctgcctctcatcacataggcggcgatgcttgtcgacgacctagtacaagaaaccgtttagtatgggaaggagtcgtttggttaagaagaaaagtgaagaatcctaccttatccataaagtcgtacgcttcttttttctccttcgaagggaagtggaagacggcgtggggaaagagaacgccgacaggctcgaagccatcgccggagaggaacagaggactgccagggtcgagagggcagacggtagaggctccttcgttctccatccttgaggtgtttactaagtaaatttctaagatcatacttgaaaaatttgttgataggatgtattcctatttatagagaaacatgatcctccttggaaccctaagtttaataattgtggcgtgtccgagtggtttaaaccatttttggaaatcgaggaaaagtaattattgccttaaagacaaaaggttcattaaataaacgaaaaagtaattaaggcccaagcccaataaataagccgaatggattaatccgagttggggaattcgcgaaaataaaacgagttcagactcacattttaagagataggtctgatcacatggttaaacaaagaagctatttaaaagatggactttgcaaatccatacttaaatatagcgaaaaccctcttgggatcatagtcttaaaggtttaaaagcctcttgaggcaaacacttgttcagaaagtaaaaagcctacttaggcgatgagagtagactgagaaataaacttcaagttcataaagggacaacccccattaagtggacgcagccactacggatcctcagccacctcgaattcagtctgagttggctcaagatcgactgggtccacgactgggtctcagtctcatccgttacgtcagtgacgggctgttcagtaggaatcccagattccgaaccatcgtcatcctcgatgaccactgttacggtattcgtggatggaagaatttctggcggagtggctaccggttcaggagttaccaccgacatgataggtacttcgggttccacgggatcactgggacctgggataatcatctcgaatcagggaaacgtaagtataacttattttggtttggtgtcaaagtttgaggttttaaaacttactagtccaatctaaaccggattcgctcaaaggaggcgactcggtaaagaactcctcgaactgttgagggttgaatgacgaagagggaagagcggccaagcgacttcgcttctctgctaaaacggctttcaattcggacctttcttgctcctcggaaaaatcctcgtcatgggtttggtccagaaggaggaggttgctttcatattccttgatgtctgattccagctctgtcctagttttctcggtttggatgaaaacgatcgccccttgaatccattctatcccgtgaccttttacttctttcctggcttttgatgctgatctcgctaactcagcatctcaaagtttggcgattgctttgtacttggcctgcaatttggatagctggttggacaagtcgtaagcattggattcagattctgagagtctgccccgagcattcgagagttcctcctgaatcttgtcatacctctgatactgatcctgcaactcgccgtttgactgcatgagtttggaggaaagattttccaattgatcttccaatttttgcttgacttcagtggaagagcggagatcggactcaagagaagaagacttatccttccaggccataacgtcctgttccctgtcaagcaacaacctctcgtaatactgaatcatgtcattgagttcgctgtttgtctgaaccaagggttacaaaggtgagttagcgtataaacgaaagagtggagctaaaaggtcacaaataaagagaactaacccgagatgagtgatgggcgttgatatgactattgtcggacaagacttggaacttgaaccaatggagcagcttgtagccgaggagcagcttgtaacgtaggaagctttgttggaaccaaccggccctatgactcgttcgaagactaggcatctcaaccaagccgttaccggacttcttaaccacttgggcaagcatccaaatgaagtcatactaaccgtttggaactcgatagcaactcaagacgattggtaatgggctaagtgttactttggtactctttttcccttctaaggttttgtcccaatgagttttccttagtaggtttttaatgaggcttgagtaacacttccaaatcccccattatcaatctggcccaagcccactaagatgaccacgaatttggaaggccatgggtctatttttgttcaaattttcatttatgatttctccttttctgagttgccttggaacttgttccaagactaactcttccttttctcttcttctctatttaaactcttgtatttcctcattataaactcatatatctttttaatctcaaactcttttaagctagatcaaaggtaaatcaaaggccatccgcatcctttgtgtgaccattcgctccacatcctttggtttgagtgatctcatgatctcttagatgcaaagtctatcccctactcaacttcaagagtgtcgatcttagggaagtcatattaaatggtatcagagcacattctgaagttgagtactccatcctttcatcacttcatcatttcgttccattctattcatcatttcattttgcccattcatcttctcatctgtcttttcatcttcgctgtcatcttgatttaatttttataaataattagcttgcgataaaattacaaaatcaattggatctgaatctaggacgagtgtagtatcttataaaattatttttggaatttttgagcatgatttaataatttattatgttcgatcttctgcctctgtttttagtaaaacgtttagtattctccttgaactagtgactggtttgtgttgtttgttggcagaaaatggtgacaaccgaatcaagctcaaagaagagtgttaataaccaagccatcatcgatgctatcaccttacaaatggagaaaataattgatgccaaacttaagccaattaatgatcagcttagggcgaaagggaaagcacccggtgaacaagttatcatctcggaaggagagcaatcttgaaaggagatggatagtcgaatcaaggaccctaggaaggacctaattgacccaaacgctcaagaatactacagccatggtcactcatctcaccggagtaatcggagaccaagacgtgtgagagaagaaagagatcttatggttgagaatcttggtggctataagatgaaggttccacctttccatgggaagaatgatccggatgcctatttggattgggaaaagaaaatggaacttgtgttcaattgtcaaaactacgctgacgttaaccgcgtgaaggtcgccgcaactgaattctacgactatgctcttagttggtgggatcaaatcgtcactacaaggcggcgtaatggaaagcatcctattgaaacatgggaagggttgaagcttctcatgaggcgtaggtttgtgccaagccactatcatcgtgaacttcattccaagctttgaaagctcatccaaggtactcgatcggtggaagactattaccaagagatggaaactttgatattgcccgctaatataatggaggatcgtgaagcgactatgtcaaggttcttgggaggattgaatcaagaaattcaggaccgtgtcgagatgcaacattacaaagagttggaggagatgctacataaagatatcctagtggagcaacaggttaagagaaagggatcctcttgggtgaattatgattcaaaccgaccaagctattcaagagacgtcaagccagccttcattcctaagagtgagcctaaaataatgccgactatccaagagcgagacaagaccaagcccgatagtgcaccactactagaacccgtgatctttgatgcttcaagtcccatggacgtgggcactatgctaatgaatataccaacaagagagttatggtcataagggcgaatggtgagtttgagtccgaagacgagttcgtgctaaaacctgattcgtcgtccgaagagtgtattgctaagctggctaatgagaagcttttgatgtcgaggaaagtttctaaggattcggaagaggagcaagacgtgacttcatccccggatgagtatgaagaaaagttcggagaactttacgtggcaaggagaactttaagccttcaaacccgaaccgaagaagaagagcaaagagagaacctatttcatacgcggtgcatcgtcaatgagaaagtttgtagcttgatcattgatggaggaagctgtacaaatgtggcgagtgaaacaatggttcgaaagctcgatttgaagccgcaaaagcatcctaagccgtacaagttacaatggcttatcgatgatggagaaatgagtgtcaagaatcaagtggttgtacccttagcaattggaagctaccatgatcaaattctttgtgatgtgttgccaatggacgtcaaacatatccttttaggccgaccatggtaatcggatcggagagtgacccatgatggtttcacaaatcggtactccttcatgttcaaaggcaagaaaacgaccctcattccattgacaccacaagaggtatatgaggatcaaattcaactctcggccaaggaaaccaaagtccgtaagcaacccaatttctttattaaggctaacaaggttaagcaagctatgcactataaacgacccatcttattgtttatttttaaagaagcactaacgtctttgactaaccttgcaccggccgatccgagtgagttgacttctcttttacaggattataaagatgtgtttcccgaagtcagccccaacggcttaccacctatccggagaatcgaacatcaaatagactttgtcccgggatcaacacttcccaaccgtcctgcttatcgtaccaatctggtggaaaccaaggagttgcaacgaccagtcgacgaactcatggctaaagggcatatccgagagagcatgagtccatgtgccgttccggttctacttgttccaaagaaagatgggagttggtgtatgtgcgttgattgtcgtgcaatcaataatattacggtgaagtatcgccaccctattcctagacttgatgatatgcttgatgagttgcatggttcatgcattttctctaaaatagatttaaaaagtggttatcatcaaattaggatgaaagaagaagacgagtcaaaaactgcatttaaaacgaaacatgggttgtacgaatggttagttatgccattcgggttgacaaatgcacctagtacattcaggcgcttaatgaaccacattcttagagcattcataggtcatttcgttgtggtttatttcgatgacattttgggttatagcaagagcatggctgaacatattgatcatctagaatcggtcatgaaagtccttagggaagagaagctttttgcgaatcttaaaaagtgcaccttttgcacggataatcttgtttttctaggttttgttgtaagtgcagatggggttaaagtagacgaggagaaagtgaaggtaatcaaggagtggccttgtaacgcccgtgaaccggaaaatcggttagggtttgtttttaaatcatccggtttaattggttgggttaattggaaaccctagactgtgcctataaaagaaggaaactcgaaattagggctttggttagccacttttcgttttataaaggagaaaaagagagaaaaggagaaggagcaaaatcgttagggtttgggagaaatcggtttcgtcatatcaaatcgtggtaaacggtaacgaaatttggtagagttattcccaagtcctttatagttattctccagtttacagaattgtatttggattaaaattggttgagttattcgcagtttcgtgagacacgttttctcagacgcgaattgggaccagcggagattgaaactgagatcgtggtctcgtctgttttccgatcggcacgagattttgtgggcagctttttgacgtctgcagctaggatttcaccggagcgagtgaatagttaacggttagtttgtgttttagggtttcgtctttgagactgcttgtttctggtttttcctgtccagtttgcttcaaggttgcttttggttgtggacttgttgtaggacgtttctggactgtttcagacgcaaggagagactctcctgggtttaattgctattagaatcaatttgttaaggtgagtgcgtgaccatgagcttatctgggcgattgggttgtgtgatttgttttgtgtgatgatatgtaggtgtggtgaatgtgttttgggtgaattgttcaatgactggtttgtttgtattgtattcgtgattatacctttttatttgcttgtgtgtatagctcgtagatgggaggatcgcctcactaagtatttatgataatacttacgtatctcattgtgttgttgatgcaggtaaagataaagtctgatcgtggaatcatggcaaggaagagaggatgatctaggaactcgtttgttttatttttggtgtttttggttattaaaacccggttaggattgttagttattcttggttttgttggtcgaattatttatttattcataaaatagtatttttgacttgcggtttaattgttattttattggttgatttaattagatatttataggaatatttaattatatttttttttaaaaaaatgggtcgggttgtttcaggcctagccctaaaaccgttggagaagttctgagctttcatggccttgccggtttctatagacgctttgtcaaggattttagcaccttagctgcacccctcaccgaagtaatcaagaaagatgttggattcaaatgggaagaagctcaagagaaagcttttcaagcacttaaacagaagcttactaatgcccatattttgatcttacctgattttcttaaaacctttgaaatcgaatgtgatgcctccggcataggtattggagctgttttgatgcaggataagaagcccatagcctactttagtgagaagctcggtggtgccacattaaactatcggatttatgacaaagaactttacgctttggtccgcgccttacaaacgtggcatcactccttatggccgaaggagtttgtcacatgtaaaaaggctaagtccaaagtccaaccgaacgatgggaaaaagaaagcagaaatggtgcagcaaatccatgaggaagctaggaaaaatattgaggagaaaacaaagaagtatgtggaacaagcgaacaagggccggcgacgcatggtctttgaagaaggtgactaagtgtggattcacttaaggaaggaatgattcccagccgaaagacgtagcaaactgatgccaagaataaacgggccgttcaccattacaaaaaggatcaatgataactcttatcaaattgatttttgaggtaagcataatataagttcgagctttaatgtttctgatttatctccttttcttgtagatgaaacggatttgagggcaaatccttttcaagagggagggcatgatatgactattgccggacaagacttggaacttgaaccaatggagcagcttgtagccgaggagcagcttgtaacggaggaagctttggcggaaccaaccggccctatgactcgttcgaagactagacatctcaaccaagccgttaccggacttcttaaccacttgggcaagcatccaaatgaagtcatactaaccgtttggaactcgaaagcagcccaagacgattggtaataggctaagtgttacttgggtactctttttcccttctaaggttttgtcccaatgggttttccttagtaggtttttaatgaggcttgagtaacacttccaaatcccccattatcaatccggcctaagcccactaagatgaccacgaatttggaaggccatgggtctatttttgttcagattttcatttatgatttctccttttccgagtggccttggagcttattccaagactaactcttccttttctcttcttctctatttaaactcttgtatttcctcattgtaaactcatctatcctttcaatctcaaactcttttaagctagatcaaaggtaaatcaaaggccatctgcatcatttgtgtgaccattcgctccacatcctttggtttgagtgatctcatgatctcttagatgcaaagtctatcccctactcaacctcaagagtgtcgatcttagggaagtcatattaggcgcgaagtaggaatcgctcgcaaatcgcaggacgccacctgtcaaaggttggcaggattgtgtctttccgagtcttgaagcatcggaagacgtttccctctgtttccatcgctgtcaaagtaataaagagattcgaacccatgtatgggaagttaggccgatgaatcaaacaatatagcaagtaaagagattaaatggtaatttctaacctgtgagtgatttggtttgaggaaccagaacggccttagcttagggttggcatctcggggctcacactcttcttgtgaggatttgcactccgaccggtctttcaccccaagatctagaagaaggagatgcgatgactggaggagggggacccattgatcggggtaggggagatgatcgaggagaacgatcagttcgggctatagtcttatctctcttaggaaaggaactgctgcgagttggtctttctctctttttctgaagcaagtctgctatcagttcgctgcttaacctagtccgagaagcagtctgaggtgagtcacgacgtggtgattggtctctacgaggtgaccggccgccatgacctttacggtgaggtgtaggtctgaaggcaccggcagatctcgccccttcgtcgctaccatcgtcgaccagcagagttctactgtattctttcttgtcgacagcagactgaaggaatgacttgttcgcctcacaagcctttgtcattggcttggataacgtctttcaacgggaagcgatagccctagcagaagttccgtgaggtagaggtggaggtggtggaagttgggtagttgtccgggtggactcattctgagcttatgattggcctcaatgaaccgatcgagagtgaaagagttccagagggtctctccctcgataacaatcttgatgaattcaacaaattctatagttgggagagttggagcaatgaaagctccgaaatgaaaatcataaaatcgattaaataaaaaaagaggataagcaaaaaggcatatgtgacctaatttctaccaggtttcgaagaccacttcgatggaagcacatcgaaaaggtttccaatcgaggcaggggttttgttaatcaggaaccaaggatggcgccaattctcatccttgttcgggagattcgagatgagattcctgttggcgttcgggtacgctgaaaaatacccggttttcttcggcgaactcctaatactgagaagttcgttcaattccggaaccccgatgacaaaaccggctgtcgctgcgatggtaataatacacaggatggttcggaggaggttaggggttagttgaggtagggcgatttcaagagcagccaaatatcgaaccagagcttcgggaagagggaaggtcaatccgcaacctttgaagtagatttcctaaacgcaaaagaatctgggacggtggtcctctggcgattcagtgggctccggcatctgcgaatccctcataattttgggtgggattcggcaaagttctctcagtcggctgagggattgaagagtgcatgtggattgataatgtggaccggcgatatcattttgtcgggtgcaaatgtcattactagaaccaccgtcatcgaaagatggagattcaggcctttcgttttcagaattcatcataagaaaatgaacagtctgggggttcgagggagagaaagtgcagaaaggaagaagaaaagaactgtgttctagaggaaaagtaaagcgtgaaaaataataaggagagagtaaagtgaatttaccttacgcaagccagtgatgatgacggaaccgccttggaagtcatgggggaagtggaagagttttccccgctttaatagtaagtaattgatatacggtcataattgtgacagatgtcacgagagtaattatgggtgattccgaaatcataggaataacgtaattttggcgggaaatcagagagtcacttggcgcaatctttgcccattagagcattaaagtcttccaaattggagtatcacttcgaaagacttggggggctaattgttggtgtcggatcccgcaccatgggctcgggaccggtcaaagattgccacgtaagtaggagaggcccaagagaggaaaggcccacaggtttccttgagcaagaatataggtgaagtgtttaattcgcgaggtgaacgtgacatcgaagtccaagctacccggattggagactcgagtgggctggaaggtgaagcccaggaagtccggagtcaattcaaattcgaacgtttgaatagttaattcgaagaccgaaacagatacatttaagatagaataattgggtgtaaatgagaattaaatgtattctttgagtataaattatgggtcaaggaccatgtaaagagacacgcattttttgtgcaaacttactatacacattttcttacaaaactcatagttttctctataatcatcaatctattttctagtacatttgtcctcaagaataatccttctcactaaataaataaatacttgagtgtgtgaatccgacatccacaaccatctctaccagatttgaacagtctgtaagaaaaactacatcttggttgtgggcaccaatcatacacatcttggttgtcagaaaatttttcgttacctttccaagatccatctacaaaacaacgatatccagaataattattctctaaaggaaaatgccgcatcgattacgatctttcaaattgactgaaccaaaatttttgttgtgaagctcaagttgagtggacttccacgagtctgactcttttccgccatgtgtaagatctctagaggatctttatccacattctcaaagattttttcattctgtgctttccaaatataccaaattatccatggaaatacgcatcaaattccaaagatattcaccaaaataaatgatccaaatttgcatagatagatgcataaggatattttcctgggaccgtaggtatctttgaaaatgcccaaatctgacgagcaggatggcataagaaaaccgtgtggttaatgatttcttctagagcaccacatctgctacatcctatctcatagtttataccgtgttttcgtagattgtccgttactggtacacatcctattaaaattttccacaagaagtgacgtaacttgggcggacactgtactttcgatgacaatgcttttaagactttgatgtttgggccaataaaagaatagttatcatccaaagtctttaaccgcgtcgtatgatatccagatttaactgtatactttccagattttgtgaaatgccaacctagaatatcttccttagttgacgcacccaagtgcaaagcacttattagcgagacatcttccggatcaaaaagctcttgtaaaagatcaatattccagaaatttgtatgtgagtcaataagacttttcaccttaaagaaggatcaataggggaaccattttttactgttggtctcgagaattgagttggaatccacggatcctcccaaactgagatggattcttcagaaccgactcttttagtatgtcctttattaaccagagatctagctgagcaaatacttcttcatccataggatggagagtatgatcttatattatccaaagcgttacatttccgaaaaataacgtcctttaaaaacccgcgcaaagagtgaatctggaaccgtgattaaatgccataattgtttagctagaagagccgaattaaaatcgtctacattacaaaaacctaaacccccttctgatttgctataacacacctaatcacatgccatccaatgcatacctctagattcaccatttgaactcctgcagaattttgcgattgcagtcgtgagcttcgatgtgattgttttcggtagtctaaagcaagacataacataagttggtaatgccgtagataacgatttaatcatcacctcttttcctcctttcgataaaaacttagctggccatccattcatcctattttgtaatatatctctaacaaaagaatttttttttgttttagatccacctagactttctggtaaaccaagataggagcccataccaccaagattagtgattcccaatgttgattttatttctgccttaagtgaaccatctaccttatgaccaaactgtatcgaggactttgaaaaatttatttgttatcctgaaaccgcttcataatacttgaaaatttccaagattactccacaattctcattgctagctttgcaaaagaataaactatcatctgcaaataacagatgagttaccgaggggcttgccgtagctactttcataccagtaatcaattttcgttattcagctttccgaatattcgcaataagtacctccgtacatagaataaataggtaaggagatagcagatctccttatcttaaacctctcccgggtactatcaagcctctaggttgttcattaataagaacccgatattgaaaactgttgttatacaccacattatccatgaaatccacttttcgcagaaacccattttccttaataattcctcaatgaatttccattccaccatgtcgtaagctttactcataacagttttaatggccataaattttcctttacatgatgggttagtcctaagcccatgaaacatctcctgagctataagaatattatctgagattaggcgtccttccacaaaagcagattgtgtttccaaaataaggtttggcaaaaccgtttttaatctttgacaaaggatttttgaaataactttataaccaacattacaaagactaataggccgtaattcggtcatccgagtcgaatcgctccgttttgggaataagacatatatttgtcgtattcaaccgtttatcaaacattccgtctttgagaagtgagtttaccaaaaacatcggatcctctttaatggtaccccatgttttttaaaaaaacaaagctgtcataccgtctgggcctggtgcttttttcggatgcatcataaatagagccgttctaatctcaatctctatcgtgggttttgttagaaatacatttatctgatccgttattgaaatttgaatttctgccaaagaatcctccaccacttgaggatttgtcgttgtgaacaaattctcaaaatacgacaccgctatcttttgaagatttgtctcctctacagaccatattccattttcatcatggaggccggttattcggttcatagcacctctctgttttactagagcgtggaagtatttcgaattttgatctccttctttcatccaagactctgacttttttgataccaatataactcttcatcccgatatgcctcttttaaccacatgtttaaatccgttatttcttccggtgttctgagatcatccctctgtgctgccgctaactctgacttcaaattctctattgtttttcgtccataaggtgataatttcttccaccattgggaaatagaacgtctacaaactcgtcaatttgtccacaaaattaccctcccttaatccattttctatattctacccatctgcaattgcctctaataacccttctttaccaatccatcttttgtcaaacctataactttgttttccccatggtatcttatctgttaaagttgcaatgaccagtgattgatcggaggccatcactgttaaatattcaatgaaagaattgcaaaatatatcaggccaatccttattagctaaagcccgatccaaacggcaccagattggtttcttatcccgccatcctcgccatgataaccagtaacctaaatatgaaaaatccaatagatcgcaatcttggatcattgtattgaaagggatgaaagaagacacatgtcttaaatttccaccacttttctcatgatttccggttagctcattaaaatcggaaaaaacccgaaaaaaactccatttatttttaatttgccggtttaatacctaagttaatttctatgtcctttaagaacttttattctttaaattttggtaaaatcagacatcctaattaacggccgttaatagtggtaacggaatcgctaaccgcggttaaaacttaatcttatgatgtttactatttatatacgtttataatcgggatacacctatccttccccatgaaaatcgcctatgaaaaaccatggtgcattacgagacacacctatccttgttaaacgttcccaaacttgatctcttttatttggaaccggatcaccgtaaacaaacgagagatgaattattttggctttgtaaaccgcatctaaatctattagacgattacttgcaaaatttattgaaacattaaaatcattattataaaaaagagctagaccaccactacaaccaatggggtcaaccgtttttaaattgttacatgtaaatcaatttacgttgtaatatatatgttcattcatcataatcatatcagcaatatataattaagcatacattagttaattatattcagttttaattttggtacttcatccgtttaaaaaaatgttataataaagtccaaaaattaaaatatcagagaccatttctcatttattaatgtttgggcctcggaaatggagagtaaataggccgccaatcccatgttccaattaatacatatattctctatggtagttttggacctttggtatctttcatttcagtttcgatgattccaaataggttctgctcaagaatataatatatgggggtggttgttaacagacatgcaaatgtctagctgttattatgtataaagaaaattagtgatcgtattcgtatgtcatttttcttgtctcataattccatgagtattaattaaatctttaatggctggtaagatttgtctcttattcgaaaaaagtttcggttctgataaattttactagaggattaactctatttcattttattaatattattctttatttttatttaaatttttaactaaaaaataagcagttacagtggaggtccatttgtttcaatagataaccaaaagtttattaatacttctatacctaggtttggagttcaattcctagaaaacaaagcactttctttcatattaatggtgcaaaccttatcggaggtccagagtgcgcatgaagagcatgtccatcacatggatctcgtacatgcatgaccttccgttgaaggtccaagtgtgtcaaggagagctgcgccgtgaaaccattgttcggagaagctgttcataataattgcatatgttacaagtagttaaatatcatcataatatgattagattaaatatcactagtaatgttgtaataacatgacaaaaagaaaatgcagacaataagcttttgaaatgcgtaaatataatatttcatactaaagcagagtaattcaagagaccattttaacaacaaataatacttcaaaattacaaaatggttccaataaaaacagaggattagagtactttaatgttgacaaaataaaacaagagaaatttaacaaacagtgaagctttaaatgctatatttgtattttaaaagtatttataatcttaaaaacgatgttactaatcaataaagcttcgacttttaaattaaggacgtttaaatcttcaacttttaaaaatatcattaaatgcctaacaattcgctaacttcatgattaaatggttaacttattacaagtatgctattaaaacgtctacaatttgaaagctggctttttctatttttttctatttttataaatattaggttaaaacccacgttgtatcataggttattaataaaataaaatattttatttttaaacaccataaaataaaatattaatagaattaatttttatccaaaattataaaattaatgtcatatcatctaataattaatagtcaattgagaaggtaagggtaaatttggaattttctttttgttgtcagatgtgagtgtgaaaataacaacatttaagattttgaatattaaattgcaaagttttattatttcgtgtatttttcttccaaacaaaaaataattgaatattaacgtccaaataaaaattagttaagtttttttgcgggtttttcctttaattaatatgagcctacgttatattgttatgggggcatctaatagctctttctaacgagtatatgaggaacacatttttttttaggaacatatattcaacgttaaccatacaaataatacaatgacaaaactaatccaattatctatcaaccggcacatcggttttataattatcacaagtttctacattcctttactatacttgtaccattacaaactttcaaattaaggaaactaaatataataaaatgtttagctttcatccgcctaataagtttttatttaatatttttcttctttacatgtaaatcaatttacgttgtaatatatacgttcatttatcataatcatatcagcagtgtataattaagcatacactagttaataatattcagttttaatttttgtacttcatccgtttaacaagatattttagataaagtctaaaaattaaaatatcagagaccatttctcatatattaatgtttgggcctcggaaatggagagtaaataggctaccaatcccatgttccaattcatacatatattctatgtggtagttttagacctttgctatctttcatttcagtttcgatgattccatataggttctgatcaaaaatataatacagggggtggttgttaacagatatctaaatgtctcgctgttattatgtataaagaaagttagtgattgtattcgtatggcatttttcttgtcccataattccattagtattaattaaatctttaatggttggtaagatttgtctcttactctgaaaaagtttcgtttctaattaattttacttacttacttacaaagttacaatcatcctatacattttcgagttcaacaggggattaactctatttcattttattagtattattttttattttttatttaaatttttaacaaaaaaataagcagctatagtggaggtccatttgtttcaatagttaactaaaagtttattaatacttctacacctaggtttcgagttcaattcctagaaaacaaagcactttctttcatattaatggtgcaaaccttatcggaggtccagagtgcgcatgaagagcatgtccatcacatggatctcgtacatgcatgaccttccgttgaaggtccaagtgtgtcaaggagagctgcgccgtgaaaccattgttcggagaagctgttcatcataattgcatatgttacaagtagttaaatatcatcataatatgaatagattaaatatccctagtaatgttataataacatgacaaaaagaaaatgcagacaataagcttttgaaatgcataaataaaatatttcatactaaagcagagtaattcaagagtccattttaacaacaaataataattcagaattacaaaatggttccaataaaaacagaggattagagtactttagtgttgacaaaataaaacaagagaaatttaacaaagagtgaagctttaaatgctctatttgtattttaaaagtatttatagtcttaaaaacgatgttactaatcaataaagcttcgacttttaaattaaggacgtttaaatcttcaacttttcaaaatatcattaatagcctaacaattcgctgacttcatgattaaatggttaacttataacgactatgctattaaaacgtctacaatttgaaagttggctttttctattttttctatttttatatatattaggttaaaacccacgttgtatcataggttattaataaaataaaatattttatttttagacaccataaaataaatattaatagaattaatttttatccataattataaaattaatttcatatcatctaataattaatagttaattgagaaggtaagggtaaatttggaattttattttggttgtcagatgtgagtgtgaaaataacaacatttaatattttgaatattaaattgcacagtgttattacttcgtgtatttttcttccaaacaaaaataattgaatattaacgtccaaataaaaattagttgaagtttttttttgagtttttcccttaattaatatgagcctacgctatattgttataggggcatctaatagctctttccaacgagtataataggaacgcattttgttttttttaggaacatatattcaacgttaactatacaaataatacaatgacaaaactaatccaatgatctatcaaccggcacatcggttttataattatcacaagtttctacattcctttactatacttgtaccattacaaattttcaaattaaggaaactatatataataaaatgtttagctttcatccgcctaataagttttttttatatttttcttctttacatataaatcaatttacgttgtaatatatacgttcattaattataatcatatcagcagtgtataattaagcaaacactagttaattatattcagttttattttttgtacttcatccgtttaaaaacatattttagataaagtccaaaaattaaaatatcagagaccatttctcatatattaatgcttgggcctcggaaatgaagagtaaatagggcaccaatcccatgttccaattcatacatatattctctgtggaagtttttgacttttggtatctttcatttcagttttgatgattccatataggttttgatcaaaaatataatacagggtgtggttgttaacagacatccaaatttttagttgttattatgtataaagaaagttagtgattgtattcgtatatcatttttcttgtcccataattccattagtattgattaaatctttaatggatggtaagatttgtctcttattctaaaaaaaagtttcggttctaattaattttacttacttacttacaaagttacaatcatcctatacattttcgagttaaacaggggattaactctatttcattttattaggattattttttatttaaatttttaactaaaaagtaagcagatatagtggaggtccatttgtttaaataggtaaccaaaaatttattaatatttctacacctaggtttggacttcaagtcccagaaaacaaagcagtttctttcatattaatggtgcaaaccttatcggaggtccagagtgcgcatgaagagcatgtccatcacatggatgtcgtacatgcatgaccttccgttaaaggtccaagtgtgtcaaggaaagctacgcgtgaaaccattgtttggaaaagctgttcatcataattgcatatgttacaattagttaaatatcatcataagatgattagattaaatatcactagtaataatgtaataacatgacaaaaaagaatgcagacaataagcttttgaaatgcataaataaaatatttcatactaaagcagagtaattcaagagtccattttaacaacaaataatacttcagaattacaaaatggttccaataaaaatagaggattagagtactttagtgttgacgaaataaaacaagagaaatttaacaaagagtgaagctttaaatgctctatttgtattttaaaagtatttatagtcttaaaaacgatgttactaatcaataaagcttcgacttttaaattaaggacgtttaaatcttcaacttttcaaaatatcattaatagcctaacaattcgctgacttcatgattaaatggttaacttataacgagtatgctattaaaacgtctacaatttgaaagttggctttttctattttttctatttttatatatattaggttaaaacccacgttgtatcataggttattaataaaataaaatattttatttttagacaccataaaataaatattaatagaattaatttttatccataattataaaattaatttcatatcatctaataattaatagttaattgagaaggtaagggtaaatttggaattttatttttgttgtcagatgtgagtgtgaaaataacaacatttaatattttgaatattaaattgcacactgttattacttcgtgtatttttcttccaaacaaaaataattgaatattaacgtccaaataaaaattagttgaagtttttttttgagtttttcccttaattaatatgagcctacgctatattgttataggggcatctaatagctctttccaacgagtatattaggaacgcattttgttttttttaggaacatatattcaacgttaactatacaaataatacaatgacaaaactaatccaatgatctatcaaccggcacatcggttttataattatcacaagtttctacattcctttactatacttgtaccattacaaattttcaaattaaggaaactatatataataaaatgtttagctttcatccgcctaataagtttttttatatatttttcttctttacatataaatcaatttacgttgtaatatatactttcattaattataatcatatcagtagtgtataattaagcaaacactagttaattatattcagttttatttttcgtacttcatccgtttaaaaacatattttagataaagtccaaaaattaaaatatcagagaccatttctcatatattaatgcttgggcctcggaaatgaagagtaaatagggcaccaatcccatgttccaattcatacatatattctctgtggtagtttttgacttttggtatctttcatttcagtttcgatgattccatataggttttgatcaaaaatataatacagggtgtggttgttaacagacatccaaatttttagctgttattatgtataaagaaagttagtgattgtattcgtatatcatttttcttgtcccataattccattagtattgattaaatctttaatggatggtaagatttgtctcttattctaaaaaaaagtttcggttctaattaattttacttacttacttacaaagttacaatcatcctatacattttcgagttaaacaggggattaactctatttcattttattaggattattttttatttaaatttttaactaaaaagtaagcagatatagtggaggtccatttgtttaaataggtaaccaaaaatttattaatatttctacacctaggtttggacttcaagtcccagaaaacaaagcagtttctttcatattaatggtgcaaaccttatcggaggtccagagtgcgcatgaagagcatgtccatcacatggatgtcgtacatgcatgaccttccgttgaaggtccaagtgtgtcaaggaaagctacgcgtgaaaccattgtttggaaaagctgttcatcataattgcatatgttacaattagttaaatatcatcataagatgattagattaaatatcactagtaataatgtaataacatgacaaaaaaaagaatgcagacaataagtttttgaaatgcataaatataatatttcaatactaaagcatagtaatttaagagaccattttaaccacaaataatacttcagaaatacaaaatgattctaataaaaacaaagggtttgagtactttaattttaacaaaataaaacatgagaaatttaacaaatagtgaacctttaaatgctatatttgtattttaaaagtttctacagtcttaaaaacgattttacaaatcaataaagcttcgactttaaattaaggacgtttaaatctttaaattttaaaaatgtcattaaattcctaacaattcgctgacttcatgattaaatgatttacttatgacgagtatgctatttaaacgtctacaaattgaaagttggttttttctattttttccatttttatatatattaggttaaaacccacattgtatcgtaggttatcgaaacaatccgcttcatttttaaaagaaatcataattaatattctcatatttacttaaaccaaccaataaaacaacattaaattgcaagttaaaaatactattttatgaataaataaattattcgaccaacataaccaagaatgactaacaatcctaacacaaacctaacaggattccaataaccataataaaaaaatagagcacaaccaaacgagttcctagatcatcatctcttgcttgccatgattttacgatcacactttatctttacctgcaccaaaaagaaggagatgcgtaagtattatcacaaatacttagtgaggcgatcctcctatctacgagctatacacacaagcaaataaaagggtataatcacaaatacaacacaaaacaaaccagtaattgaccaattcatccaaaaacacatatcaccacacctacatatcatcatacaaaacaagtcatacaacccaatcgctcagataagctcatgatcacgcattcaccttaacaagttgattctaacatcaattataactaggagagactctccttgcgtctgaaacagtccagatacgtcctacaacaagtcacacaaccaaaagtaaccttgaagctaactggacacaaaaataaaaaataaacagtctcaaagacgaaatcctaaaatataaaagcaaccgttaactatcaaatccctccggtgaaatgctagccttagacgttacaaagcttgccacataatctcgtgtcgatcagaaaccagacgagaccacgatctcagttacaatctctgctagtccttattcgcgtctgagaaatcgtgtctcacaaaactgcgaataactcaacgaatttaaatctaaatccacttctgtaaaatagaaataactctatcaaattttgttacctttgacaactatgtgatatgtcgaaactatttcccctcaaaccctaacgattctggtccttctccttctctctcttgttctcttttacaaaacgaaaagtgactaactaaagccctaatttcgagtttccttttttataggcacactctagggtttccattaacccaaccgattaaaccgggcgatttaaatacaaaacctaaccgattttccggtcacgggagttacaattcgcccccactaacataggttcgttctcgaatctagcttcacctttccactccaaagaaattcgtgcaaccgtcattacagtccgcactccctccaacccgaacccctctaggtctctctatccagtcgatatagtcatgatttactagtcattgttgctcacaactcactctccactctcagaccgcaaacttcgagcataaaccatcactctcaggcctcggcctatggtatcacacgtattatcttccccattcaaattcaaaccctgagttgtgctagctcactctcagccacaaagtcatcgagttacgacacttggagaaaacaattcctcaaaactcgctctcgggtcgtcaccctaagtgcgctctcggatcgtcacccgaagccactgtacccctcgcactctaaagacgccaagttgatagtaggatttttactcaattaatccctaaaacactatcttgttgttgtagtattttaggatgtcaatccaatccggtgtgatgcaaacatatgagatatgatcaaaaagctctaagtcaagccaagcagatagttggttggttctaacagtcctagtatgcaatgacagaaatgaaataaaactaaaagcagaaatggcaatagcaagcaagtgaatgacaaagcagaaatgataacaggcaatcaaatggataaacgattcctaaggatggggtaatcgaatagtgtggtctacttaatttattcaggcggttgacaaaacttcacagaagctatccctagacaacaagttcaacaacagattaattcactcccgtgatagaaatcctcaagcaaagctagacactgacctaaatccctttagcgatctctaactaagcaggcattatcgaatcaacatgttaaagtcaataccctctctacagccaatcccttggggtagagtcagatatctctggaattaataggatccaacgcccattaaacgccttctgagcgctggacatctggactcatactccacattagccagtgaaataagcaataagcgcaactaatccagaagggattctagtattctaaactcaaccaccaagtaaaccacaactattctatcccatcctcagaaatacaattcactactcagacataatcaaagacaataacaaagcaacaattgaaaacatgataacagaaatgacgaaagacttaaacgaaaactgaatatcaaatacttgaaggcgaaactacaaagtcgcaggagaaacactgcggctatcaaagttgcaaaaatgtaaaagcgagataacaacggataatagcggatgccctagggaaaaccctaagaggtagtttatataagcgaaaaatgaaacaaataaagaaactaaatataaagcgaatcttaacgtcatgaccccgcgaccgaatgtgtcattgacatctgacgggctgaaatgagcttcctagtgatcgagtatgtcattgatcaaactgggcttcaggggctccgtcttgcgatcgagtgagatgcagtgaagtcaagattgaatggtccagtgaccctgtgatcgagtgcgatcgagtggatgtcatgaggtggtgatcgagtggtttcttcggcttctcttctcttctttgttctcagcttgtctggttgagtgcagaatgagcagataggcttcctggtgatcgagtggtgatcgagtggttccgatggggtgattcctccggcttcgcgattgagtgaaacttaggtgcttgcttctccggggttgcgatagagtgatttgccctggcagggctccgaggctgcgatagagtacttttgctgaaggcgtcattgggcattctggcttcatgttctgtttttcctctgtttgaactccaaaagcatccaaagtacctgaaaacaaccaaatatgccatgcacatgcaatcgtcctaagtatgtaaaacacactaaaacgactcctaatgagatgaaatgtggatgaaacaatgacaaagtggtgaagaatgaatgcctaaatcatgcaaattatagacatatcaagtccctcgaacttagtctttccttgccctcaagcaaacaagaagacataagcggaaagagaggtttgaagttggggattcagaaccaaagcatgagatatgacaattaagatcaatgtaccagctatcagttctaagatgcgaggtgatcgacttctactcaaaaactttagtcatgctctgttatgatctaaacctacactgaaatgcacaatgcgtcaagatcaaccaatccctttaacattcattaagttcaaaaacatgaatcaagatatgcatcgctagtgaactcatttggctaatgacaggttatgagacaaagatggtccctttttagtggttcagattttaatagcagggaactctcaatgaaaaaggactgagctttagaagaatgctaaaggtaagtgccaacctatgcatacaagaatagcaccccatctacccaatgacataaaccgtgaataacaagtagatggtcctatctctaaacccaatgatgatcttaagtctacccttttgcactaaaggcatgtttcgattttttcttggatcaatgtttccttttcttttctttggctcttgttcttaaggagaagcttttcttaaactctatgagtctagtctagtgaattgggtttttcttaaactcttatggctcttatcattttttttctttttctgtttttgttgccatctattttttttagagcatatcttaacaattctatgcttcccaaacattcgctagaccacaataagattttcagcttccttctcctaaagactctaacccatttttttttctttctttttcttttcacactcaatctcaatccccaaataagttcccacctagtcctaccaagtccgaaaacgcggattggaactacatgagatactactcttgtcggctcaaacctaacacgttctaccaagctcaatcctgaaaataggcctcacatgctctcacaaaataacatggcttgaaagaagggttggttaagggtggggaaactactccaataatagaagcagctacttggattaacaagagtggtgaacaagtgaaagaaaatccaaatatgtattctatccacgagttcaaaaacgatgcaaacatgataattataagtcaaattcaagttcaaattgacagggaaaggtgtcatgacatacatcgagtggtttctatagaacatggtgcggttttacttcaaagtcattcaaatgcctcagagaactaattactcattttagtgaatcatcatgcttacaaggctatttcctcattatcccctatgcatatgcaacaatcctatatgaaacactctagactcgattctaaatgtaatgcaactaaatgatcactctgtttttgtggaattcattttcaaaaaaattcaatttttttttgtttttttctatgacttagatgatatgcagactcaaatgatattcacaaaaaacaagtcaaatatgtcttgaaccctcccccaaacttaaattacacagtcccttgtgtaatcaaaatttgtgaaagaattcaagataaacacagaaacaaaaacaaaagcgatatttacaaagggttttggtgtgttacctcagtagaatgtcctggagatgttgtcatccatatctgcttgagtgtactcagctggcatgaccggttcttgatgtggctccgccatctcctcgtcattgtgctcgattgcaaccccagcaggttgttcagcacgacgctcacgtgttctccaccccaacattatctgacccttgcttgatgatcgaaccatcctagcgctcttccgcctcttgtgctccctgacctcgtgagacgagtgtcgtgcgggttcttgcgggacagcgcgttctctctgttgataagcagattggcttggcggggcaatgtcatgacgcctggatggcatgtcttctggcgggttgtctctggtgatcgcactagtggatgtggtgcaactgattgccttctgcatgttgtcaatggccttgacacacttatggatgatcttgtcttgaaacttgcaccacctttgggttagactgagcttccggtgtgcttcagcgagactcttgctttctcgtgaagggggcttgtgttcttcaaagtggtagcggctcgtgtcatagttctcccaattggtctcctcattgtcactctaaccttctacttctttagcattccgggacgcggatcctccaatcacagcatggaggatttcttgtggtggcgagaagtcgatgttatctctcactgtgatggttgtcatttcattgaatgggagaagaatagttgcttcgcctgttgacgggtgatcaaacttgaaagcgtacctcccgtcatagaccttatgctcgatcacatgagcaagcttgagatgggcgatatccatccaacgtggttggattggatccggtcgcagcgggacgtcgcacgataggagaattggtgtgaccactcctccaatgcaaagggctcctttcgcgttcttcttgtcattggccatcgtccaccctctgtagctgcataagtgattgaggagatacattgacggaggtgtgtcattggtatctcccttcatcgttttcccgtcgttggtgtaacggagaaaacttagcagcgccaggtctaacgtctccatgtcttggttcgtcacagtggcggatatctccctagcataagggacattggccatggctctctggaaatagcgaatggcgggattgcaaatggagttactcttggatcttgcggagttaaagctggtggtgtctccgatcgtgttccacaaagatttcaattcctctcgggcaaacttcggtttcattcccgtgccactgggaaacccaaacatggatttcagcgtcttgatcgccatgatatagtcgcggtcgtcgatggtgaagcttaagtaaccaagcccttcttctcttaactcagcagctgacaacccctcaaacaattccacttgaagtgatgaaaggaattgaagtgtctcatcctcataggtaggatagggatgagacatgagtgttatcatgtggcatttctcgaacaagagttgaacgtcttccaagatgcctaactccgccattgtctccgggtgaggatatcttgtttcccaaaacggatttcttttgagagccttgtagtagtctcccggggtcagcttgtcttctttcattagggacttggtggtcttgcgggtttgctccggaatgtactccgcatcatcttctatctcttcatcaattagctcataattttccgtcactattagctcattgacctcttccctctggctatctcttctcttctcctgtcattggcgactgctcgctctgtttcctctacaaatcgcctatactcatctgcttctctctctagcctagttgaccaagattcagcatcatcaacactgtagtcagcatccatagatgattcgtagctgtgtgaactcatcttgaagctgaaatcgatttgaaactcacaactaaagctcagtaggttagtgagaaacaaacaaagacaatgaaagaaatgacttcttgttgatatagagttgtgatcgagtagaatttgatagtgagagctcaggtcgcgatcgagtgaagcaagcaaatgagagacagggttgcgatagagtagtttctgagagcgtttttggtagtgaagtagagaaataaacaagagagatgttttgaaatctcaagtgatgaagaaaagtgaagagtagtgacacttatctcccttcgcgatttgaatgagtggaggaggtgtgttgcttttaaacggacggataggatgcaatgcccgttatgatgtcggcaaagtgataaggtgacaaagcatggtgctttatgtcggcaggatggggttccttcaggtcacgcgccttgtgatcgagtatgggctgttgatcctttaatttcgtgtcatgggctacaagtggacacaacatgtgctttttggagtttcggtggaaattgaaatccagtaggcttaatgggactaaggtttgacattgacgttttgtggacactttcactcctccttgcgatctagtagaaaattgttatcccgaatctgctagatcgcactgctgagctttcactcctatgttgtgatcgagtatttgtaaaaattttggaaatttttcattttaacactcgatcacatccttgttgattactccagctgttattcatttcctgagattcaaagacacaaccaaaacgaatcaaaagtaacaaataaataaaaagtatatacagggatagtcatgggacttcctcccaagtgagcttgtttaaagtctctagcttgactcctcacactaatcaagtggagaaaatgtgacagagggaacttgagaagtcctcctcttcactgatatcatcatcatactcagcatcctcccttgacagttgcacagctgagtactcaattcttctttcctcatagtaggctgcttcctcctctggaggatagtctttctcttctgaccaatcccaagtgatctcctttcttgaaatcgtgtcatggttgagctggggttgaacctccttttgcattcgacttagtttgtctctaaacatcctgaacgtccatggaagagcaatgagaccgcttttgatctcaaagttgttgttctgtactggaggtggaacaattccatgacactggttatggttgtgagggaagtcaccagctccaatgttggtaggttgctcttgctcatctacaacgtcagccattgtgtcggtttctgtctgttctcttagttggcgagcaatacggtcgatgttatcgttgaatagaaggttctgatttccttgtgaccgtgtatgcatgcaacagatagcagccgggctataacagacaaatcacagatgcgtctggaaagcgggttgcaaggtacctgaaacacaaagacagaaaaggcacaatgttagtaacttgtgtaacaaaaacgaacttgatcttaatgtttctaatgatctcaaatatagcaaacaaacaccaaactggcaacggcgccaaattgatagtaggatttttctcaattaatccctaaaacactatcttgtcgttgtagtattttaggatgtcaatccaatccggtgtgatgcaaacagatgagatatgatcagaaagctctaagtcaagccaagcagatagttggttggttctaacagtcctagtatgcaatgacataaatgaaatgaaactaaaagcagaaatggcaataacaggcaagtgaatgacaaagcagaaatgataacaggcaatcaaatggataaaagattcctaaggatggggtaatcgaatagtgtggtctacttaatttattcaggcggttgacaaaacttcacagaagctatccctagacaacaagttcaacaacagattaattcactcccgtgatagaaatcctcaagcaaagctagacactgacctaaatccctttagcgatctctaactaagcaggcattatcgaatcaacatgttaaagtcaataccctctctacagccaatcccttggggtagagtcagatatctctggatttaataggatccaacgcccattaaacgccttctgagcgctggacatctggactcatactccacattagccagtgaaataagcaataagcgcaactaatccagaagggattctagtattctaaactcaaccacctaaaacgaccaagtaaaccacaactattctatcccatcctcagaaatacagttcactactcagacataatcaaagacaataacaaagcaacaattgaaaacatgataacagaaatgacgaaagacttaaacgaaaactgaatatctaatacttgaaggcgaaactacaaagtcgcaggagaaacactgcggctatcaaagttgcgaaaatgtaaaagcgagatagaaacggataatagcggatgccctagggaaaaccctaagaggtagtttatataagcgaaaaatgaaacaaataaggaaactaaatataaagcgaatcttcacgtcatgaccccgcgaccgaatgtgtcattgacatctgacgggctgaaatgagcttcctagtgatcgagtatgtcattgatcaaactgggcttcaggggctccgtcttgcgatcgagtgagatgcagtgaagtcaagattgaatggtccagtgaccctgtgatcgagtgcgatcgagtggatgtcatgaggtggtgatcgagtggtttcttcggcttctcttctcttctttgttctcagcttgtctggttgagtgcagaatgagcagataggcttcctggtgatcgagtggtgatcgagtggttccgatggggtgattcctccagcttcgcgattgagtgaaactgagctgcttgcttctccggggttgcaatagagtgatttgccctggcagggctccgaggctgcgatagagtacttttgctgaaggcgtcattgggcattctgacttcatgttctgtttttcttctgtttgaactccaaaagcatacaaagtacctgaaaacaaccaaatatgccatgcacatgcaatcgtcctaagtatgtaaaacacactaaaacgactcctaatgagatgaaatgtggatgaaacaatgacaaagtggtgaagaatgaatgcctaaatcatgcaaattatagacatatcacaagtccctcgagttaccggtacctcagaagcataccctgctcctcacaagttgttgggaccctcatgtccctcgagcaaacaatactaaacgcttccgagcatatctccagactctctcatggattcgcgtaagacacctttatgcctcaccgtccatcatatcttctcgggaatatccttatgaccaactcctggccatctcgtaaacacatcctcttttaggttgtttactcaaactttccaaaaataggcaagtcctttctcggaaactttccatttttggaaactgcacaacacattcttaaatattacaactcaagtcaaatccaagaaaaaatactcatcttattaatcatcaaaggtcatgatcgttacaactccaaaggaaaatacaaatgaaagagaaataagaacaataactcaaaagctcaaaaactcaacaacactgaaactggaaaccaaggataggcaaactcatgcaacaacatgcttctcgaaccactttttgaacgttgccttcatcctcgcctctggctcccaagtctcctttgtcacaccatcgcagttccacatgactttgatcaaaggaatcttcttccaccgaagttccttgatcctcctctcgagaaccattacttgtctcgcctccaaagtcatgttgggctgaaaatcctctggaatcttagccaacacctcatcatccttgtgaagacactttctcagcatctatacatgaaagaccttgtgaaacgcacgcataacatctagcaactctaacttgtatgtcattggtcccaccctctcaacaatcctgaatggacccatgtacctcggactcaacttagtctctaagataaacctcttcggacctcgcaacatttccatcttgagatacactcggtccccaacctcaaactcaagctctctcttcctcttgtcagcatagctccactgtcgatcatgagcttccttcatgttcagcttaagaactcggatcctctccgtggtctcatgaacataatttgcaccatatatgctcctctcccccacttgggtccagcataatggtgtcctacatggcctcccgtccagcccaatactctcctgatagttgttgttataagcaaactctaccagactcaagttatccgctcaatgacctccccaatccaagatacacatccgcaacatattctcaattgtttagatagtcttctcaaatttctcatctgtctgaggatgataagtcgttctcatctgcaccttagtgcccatctttgcctgaaaagctctccaaaacgcagaagtaaacttggaatccttgtctgacacaatactcacaggtactccatgcaacttcacgatctcactcacatatttcttagccaacaccgccgctccatcggtttttctgatggcctgaaaatctgctgagttcgttagacggtccacgatcacccaaatagcatctttggtccgcgacataggcaacccaactacgaaatccatcgtgataaaatcccacttttactcaggaatgggtaaactctgcaacagggcacccgacaactgatgctcagccttaactaactggcaaacatcgcactctgcgatcgagttagctacatccctcttcatcccgacccagtgatagtaccgcttgaggtctcgatacatcttagtcgctcctggatgaatggaaaacatgctcgcatgaacctcactcaagatctcccgccgcaacttctcatccttaggcacacaaactcgcgcatgcacaaggatagtaccattagctgcgaactgatacttagagccgtctgccttagaagccgcaataaacccctcatccttctcttgagcaaaccgaactctactcagaagatctgctcgacccacaacctccaatctcaatggctcccgtgccacaacacacaaccgcaaagcactaatctcactcaacaaggcctcaacactctgccttgagccgcacccacgcgcttatggttcaacgcgtctgcaaccacattagctttaccaggatggtaggctatctccagaccataatcagccaccagctccatccatcgcctctgcctcaggttcagctcttgctgagtgaacatatacttcagactcttatgatccgtgaacacctgcactttttcgccatagataagacctccaaatcttcaaggcaaagatcatcgcagccatctccaaatcgtgagtaataaccttcccacagtacatcaaaacataacccaaaccaactctcgaggcatcagtatacaccatgtaaggctctccatgctcttgtaatgctaacactggtgtactcgtcaacatctccttcaggcttacgaaactctcctcgcactccaatgaccacccaaaaggaacatccttccctgttgatatgttgcgtttttggtgtcttaagtcccttagttttgagtcgtttgtcgtgtcatagtccgtcttttgcgtcttttcggctgtgtcttgagtcatttgcaggttttaggtgtttaaacgggacgcgaatgctttcgggacttatcaggctcatttggaccagaaacgacgatggaatcgagaaaccgggatcatgaactctagatcgatcacctaggatcgatcgatcccaggtggggatcgatcgatccagaagtcatctacctaacaaaacccatccgtcagggagggatcgatcgatccaccctctcgacgaccagaccggttttccttaaccggatttatctgttttttctgtaattggatataataacctcagaaacataattttatttcgacgttttcttttacgcttctttttctgcaactttttgagagctttcctttgtaagcacatttgggattagagattcatacactttgacactttggagaagatttatgaacctttatctcatttattcaatttgaattatgatttctttcatatctctttgtgttgttcattttgctatgagtgagtagtctctcaattgggttttagggttctaagtaggggattcaatgaattcatggtttgattgttgtttggagttcttgatctttaagttttttaattcacatattgttaatgctagaataggattgatcaccctgttttagattctaggtttttctatgcataaaaagtgttcgatagaatgccagaaccaatgtgaattgagctatgtatttctagccaacgagagttgatgttagaatgcgttgtgaacctaatgaacctaattctaatgcgaatttgactaggaaattacaaatgaaagtttagtagttaagtagtcaaatttagtgattaatgtcttgagagagaattaatctaaacttgttctttatgctgaatttcttgtttattattttcattaatcattgatctctgaaataccctatggcccaatgctttttatcatataagtttaatcgttcatttatttgcattttaatttacaaaatccaaaaacccaaacaaacaacctcttactacaagaaaacatgcgatttgcgagggaaatttgcaatggaaaatatccctcgcaaattgctacagaattgcaagacgtttgcgatgaaagagaacaacctcgctactccgtcgcaaaatttgcaacgaacatttctctcgcaaatttgtgagacgtttgcgaggaaattgcgtggaaaccatgattcctcgcaaaaacgtcgcaaatttgcgagggagttgcaagtaacagaaatctcttgcagattgcgacgcacttgcgacgcgcaactattctatagcaaatttcgcgacggatttgcgagtcttcgcgggttaggtgaccacattttaaattatcttaccgaactggttggtaggtaggattccctcgcaaattcctagcaaaaaaacttttttcctagcaaatccgtcgcaaacagtcttgcagttccctcgcaatatatttttggatatctataaatagcctacgtaacgtctaagaaatcataactcaaatcacaacatttacttacaaacaaaaaaaatattttcaaaaaacaaaacttctttcaaaaattataatgtcttggggtggagaacatgaaatttacacattacgaagttggatgtacaatcatagagatcaagcgaccgatgaggtgacgagagagtattatgacggactgcgcagtttcatgtatcaagcgacaaacgaaccatttgctcgtgagaacggtacaatattctgtccatgtcgtaagtgactcaatgagatatatttggaatttaatgtagtcaagaagcatctttataatagaggatttatgtcaaactactatgtctggttacgtcatggagagggttgtagagatagcgcataaactagtaatacaaattatggtgtcgagcaacctagtaattttaataatgatgcgaattatggtcagcatgtacctgatcaatttgattatgggcataatcaggaaaatagatttcataatatggttacagatgcatttcatgaaactattgcttcatttcctgaaaatataagtgaagaacccaacgtagatgctcaacatttttacgatatgttagatgctgcaaatcaaccaatctacgagggatgtagagaagggcattctaagttatctttggcatctaggatgatgactattaaagctgataataacttaagtgaaaattgtatggattcatgggcagaattaattaaggaatatttgtcatcggacaatatatcggctgagagttattatgaaatacagaagttggtttcgagtcttggattaccatcagaaatgattgatgtatgcattgactattgcatgattttctggggagatgatgtaaatctgcaggaatgtcggttttgcggaaagccgaaatatcagactactagcagaaggacgcgagtgccatataaacggatgtggtacttgccaataagtgatagattgaaacgcttatatcaatcagaaagaactgcggcgaaaatgagatggcatgctcaacatacaactgcagaaggagaaataacgcacccatcagttgcaaaggcgtggaaacactttcaaacggtatatcctgactttgctaacgagtgtaggaatgtgtatcttggcttatgtacagatggatttagtccattcggattgtctgggcgacaatattctctttggcctgttatcttgaccccatacaatcttcctccagatatgtgtatgtaaagcaaatttctgttcttaactattttagtgcctgggccaaagcatccgaaacgagcgcttgatgtcttcttgcaaccgctgattcatgaactcaagaagttgtggtatgaaggtgttcatacgtttgattactcgagcaaacaaaatttcaatatgcgggcagtgctaatgtggacgattagtgacttcccgacatatggaatgttatcggggtggacaacgcatagaagattatcttgtccttactgtatgggtcgtacagatgcgtttcagctaaagaaaggcagaaaaccatgttggtttgattgtcaccgtcggtttctttccctgcatcatccgtatcggaggaacaaaaaagtttttaggaagaataaagtagttcgtcttcctccgccatcttatgtttctggaactgatttgtttgaacagattgattattatggtgctcagaaaacctgcaaacgtgggggtaattggcacaccacggcgaatatgcctgatgaatatggaagttctcacaattggcacaaacaaagtatcttttggcaactcccatattggaaggatctcctcttgcgccataaccttgacgtgatgcacatctagaaaaacttttttgataatttcatgaatacgcttttgaatgtgcagggcaaaacaaaagatagtttgaaatcaagattggacttggcggaaatatgcagcagacctgagttgcatgttacacgagtaccagtttcaaaattccgcttgtctaatgaagcaaagaaggcgttgttcgagtgggttgttgctgaagtgaagttcccagatggatatgtgtcaaaattttcaagatgcatagagcaaagccaaaagttttctggtatgaaaagtcatgattgtcatgtattcatgcaacgattactgccatttgtattagtagagttgctaccggcaaatattcatgaggcaattgcaggtaataaataaatatatatatacatattgtatgttttgttttactcaactataacttggtcattattaacttacattaattaaatacatgataggcatcagagtatttttcaaggacctatgtacaagaacactgacaacagataccatagaacaattagacaagaatatcccagtgttgctctgtaacttagagaaaatatttccccctgccttttttggtgtgatggaacatttgccaattcatctgccacatgaagctgctcttggtgggccagtacaattcagatggatgtatcattttgagcgattcatgaaatctcttaaaggaaaggcaaaaaatctggctagagttgagaggttgatagtcgcaggaagtttaaccgaggaaacgtctcacttcacgtcgtattactttagtccaagcgttaaaaccaaaaagactcgtcctcgacgctatgacgatggaggtgttgcacatacatataacattcctgatgttccagatactttttctcaaataggaagactggcagggaagttgaaagaagtttggtgggacgaccatgcgctttctcgagcagctcacaattacatactccgaaatgttgattacattcaaaaatttgagaggtataaagtcattcagttttattcataattttttatatttaataattaattattgagatactaattaaggaagctaagcatctacgttaatttgtaggttatttgattcacaaatctgtgaagcatgtcctggattagaagaaaaagaatatgaaacttacaaagatcgggattttgctggatggttaaaatactatgtcagtatatgaataattggaaaattcgtttacttatttacttataaaaaatgataattaaacttaacattttctttgtgtaggttacaaacggatgtggaaacaaaccattaccactttggttgcatgagctcgttcaagaaccaagatctaagatcacaactgctctgatgtacttcactcgcggttatactttccatacgtatccatatggaagtcgaagggcaactacaaattatggaatccatgtggaaggtgaaactgagttttatgggattctacaacaaattctagaagtcgaatatccgagacttttgaatttgaaatgcgtccttttcaagtgtgattggtttgatccggtgataggtcgaggggtacgagtaaataacttaggcgtggtcgatgtcaatgcaaacaagaattatgccaagttcgaaccatttattctagcataacaagcagggctagtaagctttctaccttatccgcgtgtgaggtcacggcgtgaagtgtggttatcagttattaaagttaatccgcgaggtcgtatagtcggcctagttgatgatgttgttatgcaacaagatagtgtccgagaagtttctataccagacataacaaaagaagatgttatccacgttgatctacaaaacagagaattcgaagatatcactcatgaaggttctgaagaagaagaacgatcagatgaattcgacgaatctgatgaagacattgagtcagaaaacgattgtaatgattcagaaaatgaatcataataaatgttattatatatatgttgtttactgtgaatgtttttaccaaatatattataaataaacgaataaattcattaaatgattttaaaaattgaaagttataatttcctaattttaaagtttataataataattttgcattttaaagttattattttcataatatctttattttatttttaaacataatcctagcaaatccatagcaatttgcaagggacgtacgactatgtctcgcaattcactcgcagaccctaatccagcattccttgcaaagtggtcgcgatttgtgagggatttacaacaaccgctcgcaactccctcgtagaataagccgcgaaaccctaattgtgtaaccctaattttgcgaggaatttgcgagggtcctcgcaattccctcgcagaataagccgcgaaaccctaattgtataaccctaagtttgcgaggaatttgcgagggtcctcgcaattccctcgcagagtaagccgcgaaaccctaattatgtaaccccaattttgcgaggcatttgcgagggtcttcgcaattccctcgcaatgtaatccagacaaaccctaattctaattttgcgaggaatttgcgagggtcctcgcacttctgttgcagaataagccgcgaaaccctaattgtgtaaccctaattttgcgaggcatttgcgagggtcctcgcaattccctcgcatagtaatctagacaaaccctaattataattttgcgaggactttgcgagggtcctcgcatttctgtcgcaaaaatgaagcgattctattggttctgtcgcaaaaaagttacgacggatttgcgaggcaatttatttctatatatacaaagcgaagccagtttgagcaaaactcaaaccaagccgcctccagacaaaccctaattttttttttctctctcgttttctctcgcgtctccgacgccgtgtcttcttctccggcagacctccttttctccagcggacctcctcttctccgtctgctgttcttcttctcctttgctgtcttctccgttcttctttgccgtcttgttctagtaaaccctaatcgagtcttttctcttctccggcgagttgccgatctccgccgtgtcttcttcccaccgtcggtttctaaccaaacaaggtaatgtctcttacctctcagatcttcattcggtttcttttgtggtaattagggtttcattcatagatctatttagggtttcgatttatttttccttctagatctatttagggtttcgggtttgcttatccatttgactaacacaatgatttcttcattgcaagatgtcgttcacttgaaatgactactcgaggtttaacagcagcgtggaaaccctcatagcagtgaagggaacacttctgcggttcatggaactggccaaaactccagacctcagacgcctatcaaccaagcaagcggtgcctctcctcagcagggaaatcagtcacccaacggttctgtcaatcatgctaatcctctagcttctcggctcaacgacatgactctggatgagttgcttgatagtcatggtcgtgctgggttaccgagattagaccctaaccgtcctcccggaactttctggtaagccacttttgtaaacatattccttaagcgttcatagtgctagtctcagttatcagtttattgcctaatggaaccttgtgtttgtaggtttgaggatgacccttcagttgcagctactgtctggagcatctttgaaagagatttcaaggagcctcatgctaactagtcaatgacaccccaacatgtggttgatcgctggtttgaaacctttgctgtaagtccactaaattatgttttgttgtgtaaagctttttagttgctgtaatattaagtctaatttttgctgtcacttgtgtctgttttgtagcatatgtataattgggataaagcaataaacaagagagttaagactgagtttgaagcaaagctgaaggagaggatgactgatcaagtttgtcggtggaagggaaagttgagagagaagggagatgcagcaatgcctcgctggtttgatcctgcagtgtgggccggtcttgttagtttttggcgagatcctaagtcagaactgaagagtatcaatagtaggaatgcaagattacatgatccggatggcctcgggattcataaacacaggtctggccagacctcttacaaagcccgtgccagaaaacgtgtaagttattttactctcttacttagtcaattttgttacttactcaaagaactaaccaagatttgtttctgttgtagtgtgaactcacaggagaaactactccagattttcttgtgctcttagatgagacacatagaaaacctgatggtagtttcattgatggaaaatcagaggagatctacaatgaagtgtcatctaggattcaagaggagtcgtcttagctgtgttccgacaacacaacggagagcacaacttcaggcggtttatctgttcaggccaagaacaagatatatgcttcggtaaatttctttctctctctctctctctcttctatatagtctcagctgtgttttgtcctgatttgtttgaataaatgttgatccgttgacttggctatgtgacttggctttgatgatgttagtaattttctgccttgtttgtgtgttttgtcaacacacttactatagtgacttggctttgtgtttgtcagtttttttctgcctttgtttgtgttttgtcatgaattggtttttgtttgttgtggttgtattcgtcttggcattgttactaagcttagtgtcgatggtttcatatgtaattggattcattattgtcttgatttgtttgtctcagtttaggttgcattatgaaatagtgacttggtttttgttttggttttgagtttctcttaggtggctccaaagaagaaagggaggatatatggattgcgcgggttcatgtaccaagcaacaaatgaatcatttgctcgtgcaaatggttcaatattctgcccatgtcgtaagtgtctcaacgataaatatttggaatttaatctagtgaagaagcatctatataatagaggatttatgtcgaactattatttatggttgcgtcatggggaaggttgtagagatagtgcgggcagtagtaatatgaattatggtgttgttgaacctacaaattattatgaaaattatggtcatcatcaagaatctgatcaagggtataaccatgaaaatagatttcatgatatggttacagatgcatttcatgaaactactgctgcatttcatgaaaatattatcgaagaacccaacgtagatgcacaacgcttttatgatatgttagatgctgctaataaacctatctacgaggaatgtagagaagggcaatctaagttatctttggcatctaggatgatgacaattaaagctgataataacttaagtgaaaattgcatggattcttgggctgaacttattaaagaatatttaatagcagataatatatcggctgagagttactatgaaatacagaagttggtttcaagtctcgggttaccatcagaaatgattgatgtatgcattgactattgcatgattttctggaaagatgatgaaaatctgcaggaatgtcggttttgcgggaagccgagatatcagcctactggtcgaaggacgcgagtaccatataaacgtatgtggtacttgccaataacagatagactgaaacgcttataccaatcagaaagaactgcagcaaaaatgagatggcatgctgaacattcaacagtaaatggtgaagttactcacccatctgatgcaaaggcgtggaaacactttcaaacggtatatcctgactttgctagcgagtgtagaaatgtgtatcttggcttatgtacagatggatttagtccatttggtatgtctgggaggcaatattctttatggaaccatacaatcttcctccaaatatgtgtatgcaaagcgaatttctgttcttaagtattctagtgccaggcccgaagcatccgaagcgagcactcgatgttttcttgcaaccgttgattcatgagctgaagaatttgtggtacgaaggtgtccagacgtttgattactcgagcaagcagaatttcaatatgcgagcaatgctaatgtggacgattagtgactttcctgcatatggaatgttatctgggtggacaacacatggaagattatcgtgtccatattgtatggatcggactgacgcgtttcagctaaagcatgggcggaaatcatgttggtttgattgtcatcgtcggtttcttttcatgcatcatccgtatcggaagaacaaaaaattatttaggaagaataaagttgtgcgtcttcccccaccagtttatctttctggaaatgatttgtttgaaaatattgattattatggttctcaggaaacatgtaaacgtgggggtaactggcacactccggcgaatatgccagacggatatggaagtgcccacaattggcacaaacagagtatcttctggcaactcccatattggaaagatctcctcttgcgccataaccttgatgtgatgcacatcgagaaaaatttcttcgataattttatgcatacgcttctgaatgtgtagggaaaaactaaagatagtatgaaatcaaggttggatttggcggagatatgcaacagacctgacttgcatataacacgagatggaaaattaccggttccgaagtttcgattgactacagagggaaaaaaagcgttgttcgaatgggttaaagctgaagtgaagttcccagatggatatttgtcaaaattttctagatgtgtagagcaaggccaaaagttctcgggtatgaagagccacgattgtcatgtcttcatacaacggttacttccatttgtatttcttgagctgttgccggcaaatgttcatgacgccattgaaggtctgataatttaattactcagttcttttattatacgtatattaaccaataattaggttaacaattataaattctatttgtaggcataggggcattttttagggacctctgcacaagaacattaacaaccgacggcatacaacagttagacgagaatatcccgatgttactttgtaatttggagaaagtctttccgcctactttttttgacgtgatggaacatttatcgattcatctaccacatgaagcagctctaggaggaccagtgcaatttcgatggatgtatccttttgagcggttcatgaaaactctaaaaggaaaggccaagaatcttgctagagtcgagggatcaatagttgccggaagtttaacagaagaaacaacccactttacatcgtattactttagtcctaccgtgagaacaaagaaaacccgtccaagacgatatgatgatggaggcgttgcaccttcatataatgttccggatgtcccagatattttttcccagataggaagacttgcgggaaagttgaaggaagtttggtgggaagaccatacctatttacgagccgctcacaattatatcttgcggaatttagattacattcaaccgctcgaaaggtatatatgctttcttaaattttaaattctaattaagttgttttttctatttattaattatggaaactagctaataaacttttttttataggatattcgatacccagattcgtgaagcatatcctgatttagaagaaaaagattatgaaacttataaagaccgggattttgctggatggttaaaatattatgtaagtatttcatatactcagttacgataatatttatacacatatcgccttaaacattatgatatgtgcgtataggttgaaaatggatgtggaaatgaacccttacctctttggttacatgagcttgttcaagaaccaagaggaaagataaccactgctccgatgtatttcactcctggatatacatttcatacgtattctcatggaagtcgaagagctacaacaaattacggaatctatgttccatcgggtgatagcgatttctatggcgttttacaacaaattatagaagttgaatatccaggactcctgaatttaaagtgcatacttttcaagtgtgattggtacgatccaataatatggcggggtgtccgagtaaataacttgggagttgtcgatgttaatgcgaacagaagatatgggaaatttgaaccttatgtcttagcatcacaagcagagcaagtgagttttcttccatatcctcatttacgtgtaagacgtgaaatatggttatcagttgtcaaatttaatccgagaggtcgtataatctgggtagttgatgatctcgtgatgcaacaagaaagagtcggggaagttttcattccaaacatttcaaccgaagatgtttcccatatagatccacaaaatagacaacttgaacaggtccaagatgtctctgacgaagaggttgagataaacgaattcgaagaatctgatgacggagaagattctaatgacggagattctaatgaggatgaaaattctcatgaagaagattatgaatccgattgaattgtattactaattcaatattgtataatttaagtaaatttatttgcttcttcacaaaaaaaaattaaaacacaagaaaaattatttgcaagggttttgcgacggaatagcagaattaataaataggttaagtaaaccatagcatttccgtcgcaaagtcaacgatggaattgcgaggaaataaatatatatatatacaacagacctaatttgagctctgctcaaaccctattcgcagccgtttcctccagaaaccctaatctctccttctctcccccgcgtcttcccttctcttctccggcgaatccaaacgcttctccggtggatccaatctcttctcccctcctttatcatcgaaaccctggttctctcctccttgctcaaacccaaatcgcagccctaatctctccttctcttctctgcgccttcccttcccttctccggcgaatccaaacgcttctccggtggatccaatctcttctcccctcctttatcatcgaaaccctggttctctcctccttgctcaaaccccaatcgcagccgtttcctaacgaaaccctaatctctccttctcttctccgacgaatcccttctattctcttgcgaatccaaacgctttcaacatagatctgaggtttctccactcaatcgacatttttctcaacccaatcgaaagatttgaaaggtaatagcttctttggttcaaatccttcttctttggtttataggttcttgtctgaatgtgtatttcgatttgttgttttctttgtctaatccgatttatgttttcgttgaagatgtttgggggaaacgattatacccgatggctctctcagacaagtggttcaaatcctgtgggtggtgatgctacttctccaggtaacacatcggcggtccaagataatcgccaagcccaccctcgccattcccgtcgacactccggttcgcctgctatgtccaccggttcgcctgctcaatccaccggttcgcctgctcaatccaccggttcacctgctcttttcagtggttctccgtcgtcaccagccacaggatctccttctacaccagccagtggttcacattcttcaccggccaatcaaacgtctcagccaccatcttcacggctcaacaatctaaccttggatgagttactcgttagtcctgttcgtgagcatttaaaaaaactgcatccaaagcgtcctccaggcactctttggtaagatattaacttctatttttagtaaatgcttgttaaactagttaagtttaaacttgtttgttgagctagttaagtttgttgaatgcttggtcagatgttagttttgtctgtctctgtcagtaaatgattgttatgcttgtttgttgaatgcttgttaaactcaatgttacaactagggctgtaaaatattattgtagatgtaaagctataaatactcatcttattgttttgagaaaggtagtcgtttttgtataagttgataaagaggtttttctaaactgcagatttacttagaatactaaaacacttagaatgctcaagtttctctaaccttcaattaaagctgtgaacctcaagaacttttatatgctaattgtattgttgatttctttctaggtttggcgaagatggggaagtggctgccacagttcgcagcatttttgaaaaagatttcaaagagcctcatgccaattggacacagacccctagtaaagtgatagacagatggtttgaaacctttgcggtaagtcactagtcatttgtgtcttttctctttgtcttgctttgacacagtctaagtaattttctttttttttaagcaaacatacaactggggcagatctataaatgcaagagttagaagtgagtttgatagcaagctgaagtctaggatgtgtgatcaagtgtgtcgctggaagggaaagtggagggaaataggtgatgatgcaaagccgaagtggatagatcctgaggtatgggctgcacttgttaagttttggctcgatcccaaatcagaagcaaagagtatcaacagtcgtaaagcgaggtatcatgatcctgatggtaccggcatatctaaacaccgctcagggcaaacatcttttaaagctcgtgcccggaaacatgtaagttgtttcagttactttttcagacaatgaacttatgtccactaatgttgactgattaactctgaactctcttttgcagtctgaaaaaaccggtgaactaactcctgatttccttcaagtcgtagaggagactcatagaaagcctgatggttcttttactgatggaaagtcggagtccatatacaaggaagtctcatcaaggatacaagagctggaatctgagctttgtgctggggagaatgaaagtagtgggtctggtgggctgtcgattcatacaaagaacaagatctacacagaggtaaaatttaaagttaagattatggctgttctttgagtctttgttgtctggctggaataactattgttgctgttctttgagtcttgttttgtttctggaaaaacagcttgagctttgagtcttgttgtgtctgaaaatagttgtaagtagttgtgttcttctgtctcgcatatagagattgttattgctagttgtgtctgaaaaacagttgttctttgagtctttgttgtgtctgaaaactagtgtaagtagctgtgttgacctgacttgcatatatagattattattgctagttagttcacagatttttattgcccttcatatttaattggctgattttgatgatgatgatgcaaatagttaggatgtatgcttagcagtttacttgttgtaatgctccatcgatttaaagattgttagttttgaatcaaagcttacacatggattgttttgttggcaggttgctccgagaaagaaaaatagaatttatggtgttggttctttgcagcaagaagcagcctctgcccatagcggtcctccacctccagctgaagatcatgttctacttgcggagaagcttgcacacgctgaagcagctcttcaagctcaggcgacacaactacaaaagagtgccgagaagatgcaccaagtctttgagtaccttgccaagaaagatcttgtgtttgctgcaatgtttgagtctgaaaacgagtcaagggccaccaacacagaagctaaccgagttagcactcctcagactacaccggtgacacctttgacgggagaaaacatgggagacaaccccggtaatggtaccgcaacctcaaccgcctctttatctaagtccttttaaacaatgtcactctttcttaacttgtttccttgtaaccaactttctaagacttttgaatttcagtttttgtatccaacatttgaattttcaatttcaatttcaattccagttcaatttcttctcagcttttgaattgttttctcaacaaaatcaaattaccaaataagagaaacagactgtaacagttcagcttggtcttgcatattcgttgcaaacacatgctacgagattacaatagaaaacaaaaacctagcaaatgcctcgcaatatttgcgacggacgtacgacactataattagcaatgacattgcaagtaatatgtccgtcgcaacaaaagcaatgtcgcaaatgcctcgcaatatttgcgacggatgtacgacacaataattagcaatgctattgcaagtaatatgttcgtcgcaaaatacgaggcgtttgcgacgaagattcttccttgcacaatttgcaatgaaaagttttcgtcgcaagcgttgcgacggattagcaacgtatcccgatttgcgagaagcgtattgcgacgaatagtctgtctttgcaattcccttgcgaatgacgttttgcgagggattacctacatattcttccattgcaaaacggttgttttcttgtagtgaaatgccacaggaactgttgttgttgaagctgaaccaattagagctgaggaggcagttgagactgaggcaaataacactggatcctctccatctcttgctttctaaaaaatttgcaacactctattttatttctctcatctaaacctaaaacttgttatatttattttgtaagctttcttattttatttgaacaccaaagtttcagtattaataatatgtgtttaggctatcaattaagtttctaattcagtgctaataccaaacattaagattagattaacctaagattaaccaaaaattaagatttgattaagctaaacagaacagtactcacgttaatctaataattaagaacgttgcaaaaacctagcaagtccatcgcaaacattgcgagggatttgctactacgaacgctggaacttgcaactccctcgcaggtttgctacagaaatattcattgcaaatccctcgcaaattttgcgaggaattagcgagacagctcatttgcagtgaatttgcgacatttaatatcccttgcaaattgcgagagtttagcaagacaattattccgtcgcaaattttgcgagggaattgcggctgtttctgatttgcgatgcgcgttttgcgaggaagtgttgttcgtcgcaatttcctcgctaatagcgatttgcgagggattagctacggttttgtccctcgcaaatgacctgttttcttgtagtttcgctttagctaagaacaagtctcggaaatccttagagtatctttggtctttgaggatcgacctcgaatattctacttaacggttagatattttgggtaattactccagcaatcaagttggcgccgttgccggggaccaattgtgttacctaaggatttaggattagtttctagtctaaaacatttttatttactgttactgatattcatttccgtattttctttggtgttttcaggtgtatgacccgtagcaaaggctcatcacatctagtacactaccacaaagatatcggaaggtttgaaagagagaacaagaaaaagaagcagttagcgtttcagagagaagctgagatggctgcccgtgacgctgctagaaattttgtgaatgatgatggacacccatttgaagaagaacatcatggagtgtttcaggatccaccacctcctgaagcaaatcttcctgctgatggtggaaacgctgcccatgcaccagctgccaacgctgcctgtttagctgctgctaatgctgctcgtttagccgcgttgaatactaggcatgcgcatgctcaacaaactctaagagatcatgatgctcccaatattgaatttttcagagacaggaaccaacaggtccctatcaacatgaatgattttgagatcaagattgtgttgttggctcttgtgaagcagaatcagttttacggtcattcctctgagaatcctgtctatcacttggataatcttaaagatatttgtgggacaacgagaatgaatggagtgccaaatgatcttatcaaatgcagattgtttatattctctttggcagacaaagctcaccgctggtttaagtcgctggatcctgccaatctgagaaattaagaagactacaaagttgcatttttgggacagtattttacacagtgtcggacagctattctgaggaataagatcagtagcttccaacagagaggcacatagtcattccatgaagcttgggagaggtttaaggactactacagggagtgtcctcatcatggatttccacgggctacattgatcagcactttctatcggggagttgacaaggcctacaagatggcattagacactgctagcaatgaggaattcatgaccaagactgaaactgaggctacagagctaattgagaaccttgcagctagcaacagcaaccacaatgttgactatgacaggtcgaatagaggtggaggaggagaatccaaacagcttgctgaactgtcagctaaggttgagcaacttctgaggagagataaaaaatctgtcaatttttgtgaggattccagcaaaggtatggtgcatcaagagttcagcggagatggttttgaagatctacaggcagagatgaactttgtgaatgggtatgggaactatcagaacagagggttcaacctgaactccaggaaccatcccaacctttcttacaggagtactaatgttgaaaatcctcaggatcaggtgtatgcaactcaggctggctcacaaggttacaaatttcagccctacggttttcagaataaagggaactatcagggacaattccaacctccagcaggtactggtcatgcgtcttcatctggagataatgagagaaattgatgatgcagaaggttcttaatgatcagaaaaagaatgttgctgacatcaatgtaaaggtggatagcatgtacaatgatctcaatggaaagttcgcaacgctatcctcacatgtcaagactcttgagaatcaagtctcacagattgtttccgcctctatgagaccagctggtgctcattctggaaaagaacaatgttatgctattatgatccaggaagagcttagagagattcttgtcgccaaacaggtggaaactaatgttgttgttgttgagacacttgtggaggacaagattgtagaggatgatgaacctttatctgtggagccgccaccttatgttcgtaagttgccatttccaggctgcgagagacagattcagaggcagaatgagtatgcacgttttgatgagatcatgaaacaattttatgttagactccctttcttacaattggttcttcatgttccaagctacagaagttacttgaaagatattttgtccaacaagacgagcattgaggaaggggttaaactgatttccaaaggagaagagtacgctcaactagtggagtctcagagacaacagaagaaagctcagctcactaatgtagtagaaatgttagcagggaaagagatggtcagcacttgtagtgccatccctccagctactattcccgagaaactcggtgatcgagagagttttgttttaccttgccggattggaaagtctgtgtttgagagatgtctttgtgatttgggagctgagttaatttgatgcctctttctgtgtcaaattgcgtaggcatcaccaatttcaagccgtcaaggatctctttgattctagcagatcgctctgtgcgatttccaatgggtttggcggagaatgtgcatgctaagttggaaatttctatatttccactaattttgttgtccttgaacttgataaggaaccacatgatcctcttatttttggtaggccattcctaaacactgttggagctataattgatgtaagaagaagcacaatcaacctacagattggggactatgctttggagtttgacataaaagggatatggaaaaatcccaccattgaagatcatgcattttctgtaaacacaaatgatgagcctggtgcttaatgtgcaaaggattgcaatgagttgagtgatgtcgaggaagtcctggatggagacacaaaagatgctcatgtaatcttgataccactgcagcgtgtagaagacaccatcgagtataaggtgcagtgtaagggaacctcgaaaccattctccaaagctaggagcattctcacttcggagtggaaagagaaaggtaaaaaagctgtgaaaagagttggtggtaaggttctaaggatgaagttgactgattggggaccttgtttcagagcaagttcccgcacttgtgcctattgattcacaagaatcctgtcaagctagttatacctcagacctatacgatgttgtcaatcgttcgatatttaataaatttgctatatcataaacaatgacttctatctcatacgagtatgatgtttgtgttcaagcaaaataatgttatctcatgtgcttacacgataatttgacttctacaaaaatttggattggccgtgaatatgcactaaaataatatgactctataccaagttatcgaaaacgctattatcctgaagatccttgcatattaacttggaacggtttttatcgtaaatgccaccatgttgtaatcggtttaatcttattattatcgtaatcgccacgatgttgtactcggtttaatctacgatcgacatataaaacataatgttcattatttatttcttattattatgtctattatgtctgtctagttgaaagtattcatattctatatatttaagaccaaaatgttaaatattaaacttattgataatgattatagatatttacctttatcactaataccgaaaatctataataaagttaattttacattttcgataactcttcaaataaactatatatatatatatagagagagagaaagacgttcgcttatttctcaaggttttatttttaaaacgtcatctttgacttctctcctgcgatggctcatctaatttaccatgctcttataaagaaaattggtaagagggagtgatgtttcttctctaaatccttatgttcatgagtggaaattaaagtaaaaattttaagaaagttcacctcttctatctctggacagaagacgctgaatttgatattagttgatgacaaggtaatgtaaatcttatatatctcatgcttttagaaaattttctttaataatgatatatatgtagggtcaaaaaatacttgccgttatgagtattgaatttggagacatcttctcgatgagacttatggaaggagcatggataagtttgtcgagtttctctctcagccgcgtggttggaacttttaggcctactggtcatcgttttatgatacatcccatctatgagtagcgacaatttcttcacttttgcctcttttgaagatattaaaagcggttctctagacacaaatatatgcgtcggtacaaagacataccgtaccgaactcatttacaaatatcatcgaaggaaattttaaaatttttgtatctaactgaaaaaatctatatacagatctgattgggagagtcgtggccgtaagaaatcagaatgatgagggacctcctgacaatgagtggaatgagatttttttttatatgaaaacgttcagtacgttgttcatttttttttagttgcttcgttatagaaacaggctgtttaagatgtaatatttccttcaggggtgataaattgacatgccgtcttcccaaagcatatgcaaacgacttctttgacaattggcggcactgtgttgacaagatcataatatgtgtaatgagatttgcgaagttggaagtggatcaaggtattcttatatatatccaattattattttgtatatactataaaaatttgtgtatgtatcccaaaaatattatgtcctattttgtagaggattagcgagccacgacggtgcacgattgtacaacagttttattgaactctccatgtgccgaagttagtcgggtcgagtccattttttgccaaggctgaagacgagtttccgtggtgataacacgtgttttcccttaggaattaggtttactataacagcatgcttggttttattatatttgcgtttacatctttgaaatctctatcctgtgttacgttagcattcatgatctcttactttttattgataacaatgctgcttacaattatatccttttcatcgtgaaactttttaacaaactatgaacaattagacctattgaatacaatcgatagaactgccccatgcagatttaatattctgttagatatatattttaatgaactttttaaatacatttataaatattaatacgtttaacagaaaataaacctttcgagatttagaaattttataaattcctttcgatagcttcatctccccaatcaaaatgcagaaaatctaatgtaataagttaaaattccatgtcgatttgccatatgataatattaaatctctcttacgaatgtggtacagttaattacgttcttatcttccatatattatacgttattatcttccatatatttccaaatattcagaaattttcatttttacctttttacgagagttatttatattttcctgaattatattagtgcataaaaatgttaatcgttcatatagttttccttttatcattttttttttaatatattaacattaagatatagatattatacattctcaataaatacaaatcttagtataatattatgtagttggttagctcgatactatatatagagattgtttaatcaattatcgaaatactcatacattctaaaaatcttccatacttattgttatattgatcatggcgtctactcttctgaattcttttgtttatctgagggagattaatcctgctctagaacaatacaagattaaaaaacgcgtggttaggctttggagattgtttaaatctatagagatggttctggtggatggagaggtattgttgtattttttcttttaaattatttgtcgttataatgttcatggtgtttttttattgtaatttattcaatatttgcatcattagggaacaagaatccatgcgtccatcgaagagggattggttaagaggtttcagcaccagcttgttaatggtgaaagtagaattatcgacactttcagttttgttgattatgacggtgactataagacgagtagtttaggtttcaaaatagtcttctatagaactactacggtgaaaccctgtgacaattttccctctcaattttgctgaaattttgtctcggacattagacaggcagatattgattggtttgtattataaaatttatttttctaatttcgctaaactatagttattttctaaagtttttctttatttgtgttgctagatgtacttggacaaatcgttgatgtgtgggaagtcaatagcgttaaagcgaaaggcaaagatactgttaaattgagtttcgaattacaggatttggggtaaaacattttgggtttgcattcacgttccctttatgattttaataaaaattcttctttcttatgttattttgtttttttataataaaaagtggatagcgattggcgtgtactatatggggtgattttgcaacaaatttctcttcatattttaagaataacaatggcagttattgtgtgtgtcgttagatttgcgtgcatcaaagagtggagaggtagaatcatcaaaattataaagtatatcaagttatttggaaatattgtcatctttctctttttttctaggtgctatcagtatatctaattcattcggttcaacggatatcctcttcaatccttctattccttaagtccaaaaattcagatgtatatgttcctttcttattctctaatatgttagtttcatgttgttagtacacgttatacatcacaagttatgttatttgttctgttttataggttaccgcctggacgtgaggatttgatccatgtagactgtgaagttaaaacgaacaggctgcggttactctatacgagaagttctttcaactgaacaaaaataaatctgttgatgatattgtgtatgcatgtgatgtaagtgtcttattacatgtttacgtttatgtttcatttggaatgatacttgacgtaatcaagcctgtatttatgttctaccttgattaggtgtccacatgtgtcacaatagccagaatctgtttcgtcgaggctatgcctaaatggtactatattgcatacaaagtatgtggtaagaaggttcagccgtatccacagggttctcatggcgacgctagtcctatctacagttgtggtgtatgcgattgtgacgttactaacgttaattataggttcgtatgcgctttaaatatcataattagatggtttgttcatcagcaatgttttagcttcattttttgtaaataacgttgtctctcaatctatataggtataagctcattctgcgtgcttcttatggagcttcgcctgaggttaaattgctcatctttgatgggttggctcaacgtcttattggtaaaacgactgctatgctgtttgccgaagttccagaggtacgtagaggagttttcattgttttcatgtttttaaatttctgaaaacttataaattgggcaataaagactaaaaaaaacttgctgatatacaaattattctatttgttcgagcagtcggacccttctattttatccgacgttcttgctgatttaatgggaaaaatccatgttattcaagatatccattggtgctgataatttgaacagcatgaaggctgcgtatgttgtcgagaaattttgggaaaaacatatatggttgaaaaattcgcaaaggttctcttttattttcatattcttttaaattgttattaatgttatgccttctttcttttgttaatattttatgttctttggattcgtaggagatgatcgttgtgagtaatagtgtatgtgatatcatcaagtcgaacattgagatgatagagtcgtccactgtggatgtcagtctttctacagataaaagggtctttgatgacttgaaaccgaaaccggacacgggtaaaaaggtgtttacaagaaagaagcccaaactcgagaagcttacttaatcctggcgttcagttctccttttattattgtttttcttttaaaaatatcttgcttagtcttttcagacaatttggccttttataatatttattgttttgctctctattaatgttctgatttaaattctaaaatacattacgttttaacagaataaacaaattactcggaaaagtttacttattttaattaacgttattctcaattattaagaaataaattatatagatttgtaaaaccgaagatttgtaatacacaaatgacagtattctgatatgcatgtctgcttttgtatttttttaatgattatatgcggacagtcattatcactttaataaacagtatttaaacgcaataattattatattatttagaatatttttaggatattaattactgattatagatatcatttcaaattctctcactatagatattgtcagtttccgtatattacgattggacgtgaaccatcatgaatttttttggggaaccgacgtaactaatacgcttgccttatcatcattactttatatatatatatatatataaccgacttgattatcgtcttcaaagaaattaaaagaaggcaaaaaaaagtgtttaccctaaagttctctccgcaagtttaccgccggaaaacaatgaagttctttcacgattttgagttgataaatccctccataaccggatggtatgtccgtctcagggttgtgaggtccttagtggttcatctcaatgctttgtctaagatagtcggcttggttttggcagacgaacatgtaagctaattgaattatcgtgtattctttgtctagatcttttattttcagaactgtattgaacaattgttgcatgtgtacttcctagggtgtgatggttgacgctatgatcgaaaaagaatttgccgactactataataaatttattgatgctggcgattggataaccatcatgcgttttggagtttatccgaacttgaatcccgttagggtaacatctcataagtttaaaatttgtttcttcaaagacaccgttgttaggaagacaactgctgtggttgcgaatcctcattacgctttgacatatttctcttcgattatcgatgatgagatcgatacgtcggttctaatcggtaagaccctttttattttgtgttaacttatgttcttcgaaaatcaactaatcgatatgaataaatttcaatcatatttagtgatgttttgttttaaaaaaaactgtattctagacttggttggggcgattcatgatgtaggagaggtggagaatactaggcgtacacaaaacgttgtcaatgatttaaggatttgtttcaaactcaagaacaaaatgtgagattattttataaatataatcaaactcaatttttctttttttatatgtagcaactgtgtgttggaatgcttggcttcgggaaaacaagctcttgatttcagtcagaattatcacagccttggtggtggtgttattgtggccgtgcttggatggtggaaattggaccattattttgatggtccaaaaaatgtgcagatttgaacatattcatttaactttatgaaaatcgcgaaaagaaacacgtggttttttatgacctactatataaacatatatagttaaaaataataataatctacaaacactaaaaaaaataaaggtaaattataaatataacctttttattcaaaacaaatatagaaatttgattaatagtatccaatatttgaatatattttgtatatgaaaaatattctttgatcgtaaagatatattttggttatcaccacgtacaaaagaatgtcaaatagtttgggtttcttctattttcatttagcacgagtaaatgtaatattgccttttgttgtaattttatgtataaaaaaatgttaggatagaacctagcaaatatttgggtataatcttgattgattattatgtcatattctaatatatcggactaatatatatatatgtttcctgacttgtaacaaagaatattcaatcggaacgtggtttgggtctaaggatattgattgttttattatcttcgtgagacaacaagttgttaactggtccgtgtttttaatttgattcgatatattgcttgctgtaatatacaatactgaaaagttatcaatcaccagtaaggatgtacatgtatatatatttgtttatacaaactgaattatgtgttgtgtattattacaagattttgatggcaccaataactccaagcggtttggcaaggctgaacaggatgcagattttgaaaactataagagaaagtaagcgcaaaagaggtgaagtgtttgttattgataaatgacggtttggctaatacaatgatagtactaattttaatcttaaatatcataaataatatgtttttacgtgtcgtttacgatgatttcgtgtgcttagttgccactgattcagagtcggaagggggagaagatgatgacaatttttctaaagagtcggacgcagtggaaatttgtgacgatcttgaggatctaaagcccgacatgattacaaagaaaattaaagtcaaaattgttcgaaggttcgtatgcaaggcgttacgcgatagggtggtggaatttatctttgcatattcaaaggtaacaattattaattatcgtaaatttgttatgctataaggattcaacctgattttaaaatcttaaacaacatcgaaagatacatgccctaattcatgtagacatggctcgatgattctcatctatcctcatagaaggacattgcattctcttatcagagtttaatgtcgatattgtacgaggatgttttagaccagctaggcacaattttttcatacgttcgaatgcccttagttcagttactttaataaggtccttcttataaagtaattgtttcacttctgtcaagtttcgtgacgtcaaccaaggtctcctagatcctaattactgtgtgggtaagtgatatgttttacctttgttatagattatttttaaaattgtttattaagtcgtatctattcaaatttatagatctgattgggaggcttgttcgtactatcgatttaagagcgtttgattcgcttggctttaatcatcgtttttatttccagatagaagacaaaaggtaattctttattttatttacagattttgataatataacaatttgtttctctttacttttctgtaaaacatagcaccatactaacttgatgaattccttgatgcagtgggttacgtatatcatgtcaattgccaaacttctgtattaatagatttataaaccgctgtgcaaattgtgttaatgatgttaaaatcatcataatcagatttgctaaattggagctctttgaaggtacatcaaatattatcacagattattggattttaacaattcatccgctattgtaacgattctaaaattttgtatttataggaaaaatccatgttacagcaactgaacagtgtacacagttcttatccaatcatgattatcgcaaggtttggaacatgagtatattctttgctgggcgataaaaactataaaaacattttgggttattacaaattataaaaatatttaattctaatgatggtattcgttttctaaggatggtttgagttttaaaatttaattatccgttttgaatctaaacattatatcacacatgcctttgataccggtcaatacgtctaaatataggtgttgttatatccatataaaatatagttcttgaaggactctaacttattaatacttctacacctatgtttggagttcaagtcccataaaacaaagcagattcttttatattaatggtgcaaaccttatcggaggttcagagtgcgcatgaagagcatgtccttcacatggatgtcatacatgcatgaccttctgttgaaggtccaagtgtgtcaaggagagctgtgccgtgaaaccattgttcggagaatttgttcatcataattgcatatgttacaagtagttaaatatcatcataatatgattagattaacacaagtttctacatttttctaatatacttgtaccattacaaattttcaaataaaggaatcttaatataataaaatgtttagcattcatctgcctaataagtttttttatatttttcttctttacatgtaaatcagtttacgttgtaatatatatgttcattaatcataatcatatcagcagtgtataattaagcatacactaggtaattatattgagttttaattttcgtacttcatccgcttaaaaaaatgttttagataaagtccaaaaattaaaatatcagagaccatttctcatatattaatgcttggtccccggaaatggagagtaaatagactaccaatccaatgttccaattcatacgtatatttttctgtggtagttttgaacctttggtatctttcatttcagttttgatgattccaaataggttataatcaagaatataatatagggggaggttgttaacagatatgcaaatgtctggctgttattatgtataaaaaattagtgatcatattcgtatgtcatttttcttgtctcataattccattaatattaattaaatctttaatggtttgtaagataggtctcttattcgaaaaaagttttggttctgattaattttagttagtaacttacaaagttacaatcatcctatacattttcaagttaaagaggggattaacactatttcgttttattagtattattttttatttttatttaaaattttaactaaaaagtaagcagatatagtggaagtccatttgtttcaattgttaaccaaaagtttattaatacttctacacctatgtttggagttcaagtcccataaaacaaaacagtttcctttatattaatggtgcaaaccttatcggaggttcagagtgcgcatgaagagcatgtctttcacatggatgtcatacatgcatgaccttctgttgaaggtccgagtgtgtcaaggagagttgtgccgtgaaaccattgttcggagaatttgttcatcataattgcatatgttacaagtagttaaatatcatcataatatgattagattaaatatcacaagtaataatgtaataacatgacaaaaaaaaaagaatgctgagaataagcttttaaaatgcataaatataataattctatactaaagcagagtaattcaagagaccattttaacaacaaataatacgtcaaaaatacaaaatgattccaataaaaacagagaattagagtactttaattttggcaaaataaaacatgagaaatttaacaaacaatgaagctttaaatgctatatttgtattttaaaagttttacattcttaaaaacgatgttactaatcaataaagcttcgactttaaaaaatgtcattaaatgcctaactattcacttatttcatgattaaatggttaaattatgacgagtatgctatttaaacgtctacaaatttgaaagttggctttttctatttttttcatttttatatatattaggttaaaattcatgttgtatcgtaagttattaataaaagaaaatattttatttttagacaccataaaataaaatattaataaaattaattttttccaaaattataaaattaatgtcatatcatctaataattaattgttaattgagatggtaaggataaaatttgaattttatttttgttgtcagatgtaagtttgaaaataacaacatttaatattttggatattaaattacaaagttttattactttgtgtatttttcttccaaacaaaataattggatattaaacgtccaaataaaaattatttgaggttttgttttgggttttatcccttaattaatatgaacctaaattatattgttatgagagcatctaatagctctttccaacgagtatattaggaacacattttattttttttcggaacataaattcaacgttaaccataaaaataatccaatgacaaaactaatccaatgatctatcagctggcacatcagttttataattaacacaagtttctacatttttttactatacttgtaccattaaaaattttcaaataaaggaatcttaatataataaaatgtttagcattcatctgcctaataagtttttttatatttttcttctttacatgtaaatcagtttacgttgtaatatatatgttcattaatcataatcatatcagcagtgtataattaaacatacactaggtaattatattcaattttaattttcgtacttcatccgtttaaaaaaatattttagttaaagtctaaaaattaaaatataagagaccatttctcatatattaatgcttggtccccggaaatggagagtaaataggctaccaatcccatgttccaattcatacatatattctctgtggtagttttggacctttggtatctttcatttcagttttgatgattccaaataagttataatcaagaatataatatagggggaggttgttaacagatatgcaaatgtctagctgttgttatgtataaaaacattagtgatcatattcgtatgtcatttctcttgtcccataattccattaatattaattaaatctttaatggcttgtaagatatgtcttttattcgaaaaaagttttggttctgattaattttagttagtaacttacaaagttacaatcatcctatacattttcgagttaaacaggggattaacactatttccttttattagtattattttttattttttatttaaatttttaactaaaaagtaagcagatatagtggaagtccatttgttttaattgttaaccaaaagtttattaatacttctacacctatgtttggagttcaagtcctaaaaaacaaagcagtttcttttatattaatggtgcaaaccttatcgaaggtccagagtgcgcatgaagagcatgtccttcacatggatgtcgtacatgcatgaccttctgttgaaggtctgagtgtgtcaaagagaactgtgccgtgaaaccattgttcggagaagttgttcgtcataattgcatatgttacaagtagttaaatatcatcataatatgattagattaaatatcacaagtaataatgtaataacatgacaagaaaagagaatgcagacaataagcttttgaaatgcataaatataatatttctatactaaagtagagtaagtcaagagactattttaacaacaaataatacttcaaaaatacaaaatgattccaataaaaacagaggattagagtactttaattttgacaaaataaaacatgagaaatttaaaaaacaatgaagctttaaatgctatatttgtatttgaaaagtatttacagtcttaaaaacgatgttactgatcaataaagcttcgacttttaatttatggacgtttaaatcttcagttttttaaaaatgttattaaatgcctaactattcactgacatcatgattaaatggttaacttatgacgagtatgctatttaaacgtctacaatttgaaagttggctttttctatttttccatttttatatatactagcttaaaacccacgatgtatcgtaggttattaataaaataaaatattttatttttagacaccataaaataaaatattaataaaagtaatatttatttaaaattataaaatttatgtcttatcatctaataattaatagttaattgagatattaacaacatttttgttgtcacatgtgagtgtgaaaataacaacatttaatattttggatattaaattgcaaagttttattattttgtgtatttttcttccaaccgaaaataattaggcattaaacgtcgaaataaaaattaatggaggttttttgtggtgttttcccttaattaatatgaacctatgttatattgttatgggggcatctaatagctctttccagcgagtatattaggaacacctttaatttttgtaggaacatatattcaacgttaaccatacaaataatacaatgataaaactaatccaatgatcaatatgttggcacatgggttttataattatcacaaatttctacatttctttactatacttgtacaattacaaattttcaaattaaggaaactgaatttaataaaatgtttagcattcatccgcctaataggtttttttatattcttcttctttacatgtaaatcaatttacatcgtaaaatatatgttcattaatcataatcatatcagcagtgtataattaagcatatactacttaattatattcagttttaatattcgtacttcatccgtttaaaaaagtattttagataaagttcaaaaattaaaatatcataaatcatttctcatatattaatgcttgagcctcggaaatggagagtaaataggccaccaatcccatattccaattcatacatatattctttgtggtagttttggacctttgttatctttcatttcagtttcgatgattccaaataggttctgatcaagaaaataatatagggggaggttgttaacagacatgcaaatgtctagctgttattctgtataaagaaagtttgtgatcatattcgtatgtcatttttcatgtcccataatttcatgagtattaattaaatctttaatggctggtacgataggtctcttattcgaaaaaaaatttagttctgattaattttacttacttacaaagttacaattatcctatacattttcgagttaaacaggggattaactctattttcttttgttagtattattttttattttttatttaaatttttaactaaaaagtaagcagatatagtggaggtccatttgtttcaatagttaaccaaaagtttattaatagttctacacctaggtttagagttcaagtcccagaaaataaagcagtttcttatatattaatggtgcaaaccttatcggaggtccagagtgcgcatgaagaatatgtccatcacatgaatgtcgtacatgtaagaccttctgttgaaggtccgaatgtgtcaaggagagctgtgccgtgaaaccattgtttggagaagctgttcatcataattgcatatgttacaagtagttaaatatcatatgattagattaaatatcactagtaataatatattaacatgacaaaaaatgaatgcacacaataagcttttgaaatgcataaatataatatttcaatattaaagcagagtaattcaagagaccattttaacaacaaataatacttcagcaatacaaaatgattccaataaaaacagagcattagagtactttaattttgacaaaataaaacatgagaaatttaacaaagagtgaagctttaaatgctatatttatattttaaaagtatttaagtcttaaaaacgatgttactaatcaataaaacttcgacttctaaattaaggacgtttaaatcttcaacatttaaaaatgtcattaaatgcctaactattcgttgacttcatgattaaatggttaacttatagcgagtatgcattttaaacatctacaatttgaaagttgtctttctctatttttccatttttatatatactaggttaaaacccacgttgtattgtaggttattaataaaataaaatattttctgttgagacaccataaaatgaaatattaataaatttaatttttatccaaaattataatattaatgtcatatcatgtaataattaatagttacttgagatgataagggtaaaattggaattttatttttgttgtcaaatgtgatgtgaaaataacaacaattaatattttggatattaaattgcaaagttttactacttcgtgtatttttcttccaaacaaaaataattggatattaaacgtctaaataaaaattagttcaggttttatttgggtttttccttaattaatattagcctactttagattgttatgggtgcatctaatagccctttctaacgagtatattaggaacacattttgtttttttaagaacatatattcaacgttaaccatacaaataatacaatgacaaaactaatccaatgatctatcagctggcatatatccaaggcttttcgcaacggattgttaccctgatgctcgtctcaatatcttctccagattcgacattctcactgtaatatgtgacgttttgaaaggtaccaaggaaatggaaaccatcttcgactcttgtttttgtctttgttttaagggttagcgaatgtctaatcttttgcaaactagttcatgctttgttatgtagacagttggttacaaaacagaaatacgaactgtggactaattttggtggacagccacttatattctctttagttgagtttggttctgtaactggtttgccgtgtggtgaatttccggaggagtatgaacctgacttcttccctaaacatgtcaatgggacgaatgattactgggatgttttgatagggaaagataagaatacaacactagccgatgttttttctaagttccaagctttaaaagggattgaggaccttttaaaactcccctagcacttcttttgattgttgacggagtccttattgctaataacaagactcatcgtccaacattcaagtatgttaagaggttagaggacattgactcattccttgctttcccatgggggagagaatcatttttgaagactattcaaatcatgaggcctgttagaaataaaccctcaatggctgattcgaagagaaaaaggttacgtcctggattcaagctagaagatcccatccaacaattcacaaatcagatgcaacaacatagtatagctatttatggttttcctttagccctgcaatttcttgcttataggaacatttctggtctactggacaagattccttgtttagtagatgagagaacctttttggaatggcattcaattgggattccgaaaaacaatcttactatcaacgatgttcatctccttgaacgtgttcctgatgtaagtaattgtaaacattgttgtggtatctttttctttcatgtgctctcatttcttttttgatttggtctcatgtttcttcagttgactattaccccgatgctgtttgtaaactccaatgaggatggttggggagagtgggatgatgaagtgagagaaaagaaggttctttatttgattgtacagataagcaaatgccataatttaaccaaaaagaaatggcctggtggctatgctgatctaccgctcatttttgtcaatgaaaaggagcatgtaactgaacacaagaaatatatagttatcaggaaaaggaaactttcgccaacttcttcttctaagggaactctatcaaaaactaaagtgagtacttccacgagaggcaggaagcgtaagtttgaattggttgatgatgatgaagcagaagataatgatgatgaagcaacatataatgatgatgaagcagaagacataaaattgtgggtgaagtcgcagttgtcttccataagacatgaatttgcggagagtgttaagaagttaagatctcagaatttaaatcttctgaaaaagatcaaggtcctgcaatctgtcaagtcttacaggtccagactgtcaactcgtcatccatccaagaaagtacgcttagcacctaacctctccacatcgtctgaatctcctgtcaaccatgttgcagatgcgacaaacatcacaaatcccccttcataaccattaacttcattgcaagggggagacaatgttttatcagattcagtgcatgatggagacgaagcagtttcaggaaattctgaaaagattgttgatgatctgatatggcgtgagtttaaaacagataaggtctgccgcaattgattcatgttcttatacattcgtagatattagtgaataatttactttagacaaacatcacaactcccccttcagaaccattaacttcattgcaagggggagacaatgttttatctgattcaatgcatgatggagacgaagcagtttcaggaaattctaaaaagattgttgatgatctgataaggcgtgagtttaagacaaataaggtttgccgcaattgattcatgttcttatacatttgtagatattagtcaataatttactttaacttctttatactacacaggatgagatatccatggagacctgcaatactaaaatcttcatttttccttgaggtgatacaaccataacacttgaagatgttatgttgcttttagatttatctgttttgggttcacctggtttgctattctagatagctcatgagagattatcagggagaagctaaagatagaatgacagacgattaaacagaaaggtaaagtcagttttgtaacactagtggcatggatggatacattcatgaacactaaagatgagcttgagcatgttgctttccttgtcttgtggctaagatactttgtgtttccatcaggcttccattatctctatgtaactatgtttccaattgctattcatctttcaagtggtactaagactgctcttgttgttcttgctcatttgtctatagagctaagtctcgatgtaatgattttcatataacttttacacaaaggatgataaaatgccaattgctgaaaactcatttttaagaaacgcgcaattttattaagttgagagtctctaaagatgagtaactagcattttccttctcatttgcataagatttatataaagcctcatcacatcgagatactcaactttctatgcaacaacttagttgttgaaaaccccaatggatgcattcttgctcaagctcgtggacctgaaaagacgtatttgatgatcaacttcatatatggttaccttgaaaagcacccaaatagcaaacatgtatttgtgcttccaaaatgaatgtttaactattggaaatatagtttgatgaaaaggtcataactttaaatggaaaaatgacatcatgttgcttgacttctactcagccaaggtatatactcatctcagcaattagaggttttaaagctatgaatcacaaggtggggtttttttcttgggggcaagcaattccccaacatggtatttgattccaatgtaatagaagtataaatgattgtaaggacattctcttaaatgttccttcactagttatctttgatagtggaactagtccgaggagcaagatgacgatctttcctaagattgttgcttgtaacaagatgacataaaatgttttacactcgcttggatattataccaagaaaacataggggatgtttattaacatttttatttatttccacgactttttggagtatatcctagctggaaaaaaacatcaaaaaattcttgaatgttgatgcaaacactagtggaccttcaacgaatttgaagacgcctttgtttgttaaagtggaagaagtttttcttagccaaaattctaatcatagagacaagattggttattgaaacaaactaagaatgttagcaaacaaggttatttataatcaccaagaaaagtttcttcttgaagtcgcaggattgatgtacttcatggtggtctacaatactcaacgagtgcaaacaaagttatctacaatattttaaactagaggtcaacatgtgagattaaattaatctcgagaggaaagagtttcataaacatagtctaatttgagcaaaataacgcatcacgacttatgagccactatgtattttttcaactttggtaaaacctagtctaatttgagcagtatcaagtttcagtcaaatatattttatgaaatattgtaactatcatgggaaaagtttgaattttactataaattttaaatatatatatatatacatttatttatttatttatttttatagtggatcaaatatcctaattttagcggatatgcggatgtcaaatatcaaataaaaagcatagtggatacagatcagaaaatatcaatatttgtatggaattgatcacgaataccatatacggtaaatcttagatatccacttcatgtgcagtcttaatatattttttaaagcttatatacactaattcaaaagtattggctattgaaagaaaataagaataacattttcttttgatatataaaatttaagattccacatttctgattgaaggaaaaaaaaaaactattttgccaaaactacaatacactattttaaaaagacaaaaaatataataaaattttaaattgattgataagttgcatcaattttctggcgactattttggcgcaattgttttctaaagtagtgaatatgaaatatttaaaaatttaattaattgacaatttcttagcttgatcgatttatctaattaaaaagtctataactgttcacacaccgatttaaaataacccagtttacgataaaaaaatcaacaatttaaattatgtacctttagagtatgatatcgatgttacccctcatattggactctatctgatgacatgggctgtgtttcccgtcaaacaaaatatcggaaactacctgtttagcgacggtaatgcaatattccttttcaagagtcgtcacaaacttatagagtatttttttgctctcgactaatacatcatctcaatttttttttcgggcactacgactccccttaatgaaacgttgagaactctttaatacatcctttgacggagaaaaagaagatttgttttagttgttatctatatcgtatagaatgtatttatatgaagaacgttaaacggaaaaaaaggtataaattgtagaaaagggcaatttttctgaaattgaggaaataaatcattttgttatatcgggtataaattttatgctttaaattaaattcttattttttcttggtatttgtttaagattgtagatgagagttaagtacttacggtttagagttttgggttccatatttgactatttaaatttaatttttgaatatataacctattttgttaacttactataaaacatgacatattttcttaagagtctctgtatataattaagttgtagatctaatatcataaacctacaaatttaaatttaggtttttattttcttaaccaataaagaaactttattatcagtctctatatttaaattgattacacatccattgcaatcaacaaattataataggaattagtaatttttgttctttatttgttgaccagcaaaaatgaactattttttagagtgaaaataattttaaaatatattttatcaaaatttaaattttgttttcacttctaactaataaaacctcactaggaaaaaaactttaatatgatgtttttgttattatttttttagttattcatatgtgtcatataagaatccataatcagtttaaagtttgaatttgtatagaaaaagttctggacaatagcacatacattgtttatgccagctaatgactaatgcattagccgttttataaaaattgtaattaaatttatatttttataagcatccaattttgtcttcatactctgtttatagtagcaaattacaacatgcattgggttgtctaaaaaaagagataaaacagtattaaatgttagataagcgttaaattttgtcttcttttataaagataaaattgtaattaaatgttccaattgtgttaagcgttagattttggtttcacttcttttcttctaactgccaagccaagtagtcaacatagacacttttatttccttgtataataataattatttttaaacagtttatgtttataatttctagattctttaacaacaaggaaacaaatcctaaatgtacttattacactatcaacataatctcttaaaatttaatatttactttttaattatgtttgggtccaaaatgaattgtgagtagacccaaatttaaatttgatttacattaaaaataatctcaaaatttttcattcaactagacattcaaaaataagtattattaacggaatttcaaatattcgcgctttaaaaagtacttataacaaacaaagttagctttgtaaaaaacacatttagtcataatataaatatatgaattgttaggggaactaatacaatactaactacatttcaaatgttgcgcgccactttttcagatttacacatatatatatattgataaaaattgtcttttacttttttgtatatatttatatattgattgtaacaaaatagaaacaaaaagtggcttaaacataaaatctaggttaaaatatacccttagttacattttcatgatactttttacttactcatcatgaacaacaaagtattgttataaaaactaaagggacaactttatattttatattttatttgtcactattggttttaaaaaactattttttcatattcttttttctctctctatatatatatatatatgtaaatgaatttagaggatgaaattcagtttacatgcatatcgtaaatttttgttttgtttaaatcttcttcataagaaaactgaggaactatagtttgagctctaattctccataacttttcaattgatgcaaagaggaaatgattgatttataagaggagattgtgaggataaccataccttcctccagtgaaaagaactttaactagaattataattttatgattttatgatatttcaaattttacttatatatatatgtttaacggatgaataataatgtgataattactctattttatattttcagacctgtatcaaaacgacgataaaaggaaaaaggtcgtggcactagaaaatcaagaagctggtggaagttgtgtcgatggaaatgtggctcattggttttcgaaaactaagttcaatggattagtggacgtaccaattgtgtatttggccttggaagaaaatgtagttaagaatgatcttacattgagaagctcacttaaacatgtcatcattggcggtagcagcggaggcagtaacagtggtaaagggctagccaatgatttgtacttagatgtaagtgtacatatcaaataagaaatgtgtggtagtaaaatttttatgtttgttgttgttatgattcgatcaaacatatattcttgatgagttaaactttaataattttaggtaaatgaattggtcgaagttcaagtgagaagtgataaagaaatcaatatgatgaaagacaaaggaaaaacaatattcgactttaacgaagctatttggccaaaagatgaaccaatatcaaacacatttgaggttaccatttgtcactgacaaattttttaggtaaacacataggggaagattgttactaatgagttttgtgaccttttactagaaaagtggagcaacactgacaaattgtgagcattcttggatatggaagcaaggtcttggtcatacttgttggatatgtggtatcattgacaaggtcagtgattatttaattacgttgtaaattaaaatattttcttacacaataatgtaaaaactgatccggaggcaacgtgacaaaaacttggaccttggttcaatctagttttaccggaacaaaccggattaaaagaaatttttttatataaaatagttatatttattatacatgattgataaaattaagctaaacataaccttcaaaaataacttgtaatctaacaaatcataaatatcaaatatcataataaattaatactaattgatcatcaactaaaataaaaattgagatatgatatacttttattttattttacatattatttttttataagttatatcaaataaatatttgaaaaataccataataactattgtttaatactttactatcaaagtattcttagtagttcattgtttttaattaaaagtgttatcgattaaaatatatttaattggataactaattaaaaaaaataaaatatttaagcaaaggccacccggttaacgttcatatagagtagacaactagcttggtccacgtttaaaatattttgttcactctcaatctgttatatgattaggatcatccgttgccacccggattcggatcgaatatctgcaaagatatcaagatgagagttcctaaagatggcttttcaggaactggcatttttccacatcctttgcatagaatgattatgaaaccacatcacttcgagatactcaattttctctacaagaacttggttgtggaaaactcaaatggatgcatcatagctcaaactccattatctgagaagaccttcttgatgatcagtttcatctatggttacttagaaaagcacccaaatagtaaatctctatttgtgcttcctaagtgggtgttgaacgtttagaaaaaaaagtttggtgaattgaaggtcaatgaccttgtgttgctagacttctactcggcaaatgcgagtacctgatctcagcaattagagggtttaaagcgatggatcaaaacccggagtattatcttcttaggtgccaaacaattctccaacatagtatctgataacagtggtgcagaagcttcagattcttgtagggatattctcttaaatattctttcggttgttgttttcgacagaggaactgatccgaggaacgagatgatgtgctttcttaaggttgtttctcgtattaagacgccacataaggttctactcactggctcactgtacaaaaacaacattaaggaggttttcaacatctttgatgttgctttccctaatttctgaagcataaccaaattggtaaaaatttcagaaaattccttaatgttgaagctgatggacctcaacgaatttgaagatgcccttgtttgataaattggaagaagctttgcttagtcaagattctgatcatggagacaagatttgttacttaaccgaactaaagatgttgacaaacaaggttatctacaatcgcaaaggagagtgtgttggggtcggattccacccaggtaagagagccaaccatgtttcaacgcctcgggagacgtcgaagagttatctcgaaccgggccacaaaacacctcggagatcgcatcaagaatccataccgaggcgatatcgagaacgcttcggagcgttctcgtgaaatggtcccccgacccgacctcggaacgcctccgacataaaacctcgcaattgatcccgaggcgggctccaagaggcctcgggaacgcatcctcgaatatcacggtccgagccgcccgagcacgacccgaggtctgctaaattccggctcggaggaacttcgggtgagatgagaaaaccttcaaaaaaggacttagccaatataagatcaaacatatcatttccgaaatcccggaagagataatcttcaaagatatcaccgaatacagaaattcccagaatcttcggaagataaggacaatctccttcaccaacttaaagataaagagaaatcttccgagaatatcgcgagaggcgatattccaaagctctataaaaagcacctcgaaggacaaacaaaggggacacgcacaataacgctctcaacttcaggctatcaaaaacgctctgactttgaaggcaaaaacacttattttcatattctagaacacttgtacgatcaaatcattactttctcattaatacaatcaagaacaccatccgcggtaattgagaattctgttgttctttgagaatctcacaaagattcgttctttgaagaaacccttaaaacaatttctattgtgcgagttttgactctcacaatttggcgctagaaggaggacacttgagatttctcttactcccggaacacagaaccaaccacccaatccacaatggtcaacaatcaaatccccggtaacacagttgatgcagaggggaacccaatccctccaatccagacagacgttcctgaagtcgttgctcccgcaaccctagcagaactaagaagtatgatggctcaacttcagaagaaggtgaacgatcaagaacaggcaaattgatccttggcgcaacaactcgaagcagctacctcccaaggacagatcaggactactcgttttggcgcgaggcatcttcaggatcgacgagcagcagcagatctcaaccccacacggctcgtgttccacacgcctggcaatactacaaggcccgtccgcagaaccgcaccggaaatcggaagagaccgaaccgagccagcgatcttgaggaaatcggacagaaagaaacgaaccgcagctccctcctccccgagcagaagttgccgaggccgatcagatcggggtctcggacgatgaagattcagaagagaacattagatgggctgaagaatacgccagagaacaggaaataagcgccatcaagctctccctagccaaggcagaaaacgagatgaagctcgtaagatcccaaatgcataacgcagtctcctcggccccaaacatcgaccgcattctggaagagtcccacaacacaccgttcacacacatgatctccaacgcgataatctcagatccaggaaaactaagaatcgagtacttcaacggatcttccgacccgaaaggacacttgaagtcattcatcatctccgtggcccgagccaaattcagacaagaagaaagagacgccggtctctgtcacctgttcgtcgatcacttgtaagggccagctctggattggttttcgagactcgaaggaaattctgtggacagttttcaggagctatcgacactcttcctgaagcaatattcggtgctaatcgatctcggcacatcagacgccgacctatggtcactatctcagcagcctaatgagccacttcgagacttcctcgcaaaattccgatctaccctagccaaagtcgaaggaatcaacgacgtagcagctctctctgctctgaagaaagcactgtggtacaaatccgaatttcgaaaggaattaaatttgtccaaaccactgacaatccgagacgccttgcaccgagcctcggattacgtatcccatgaagaagaaatggaactagtagccaaaagacacgaaccctccaagcaaacgcctcgcatcgataaatcccaacacagtgctccgaatcacaaaaagggtgctcaaggctggacatttgttcaccatgaagggcgaaatttctccggagcccataattacaaggctgatacaccccgaggcgaagccgcccgaggccgaggacgaggtcgcggtcgaggacgcggtcgagaatcctacacttggacaaaggatcaacccgcaggaaacgagcaggaatattgcgagttgcataagagttacggccatcatacttccagatgtcgtagcctcggagcaaagttggtagcaaaattcctagccggagaaatcggtggaggtttgaccatcgaagacttagaagcggaaaaaggtaaaaccgagcaggtcaacgctgtggccaatcccgagcaggcagcccccgcggcgaaccccgaaagacccaaaagaggccgaggtaatcgcgaagcagacgacgatgagccagaagctgctcgaggaaggatttttacaattttaggggattcggctttctgtcaagacacggcgccatcaatcaaggcttatcaaaggaaggccgacgcgaatcgtaactgggcgcggccatttaatgggccaaatgacgaagtaacctttcacgaaagggataccaacggtttagaccgtccgcacaacgatcctttagtcattacactgaccatcggtgatttcaacgtcgaacgagtcctagtcgacacgggaagcacactggacatcatttttcttacaactctgcgagaaatgaagatcgacatgacgcaaatcgtaccaaccccacgacctgtgctcggattctctgggaaaccactatgactctcgggaccatcaaattaccagtccgagccaaaggggtaacaaaaagagaatattacgtgattagacactttttaaaaagtttgtccgtaattaggcacttaaaaattattaggcactttgaataactaaaattacttgttcaccctcatatcgtcggttttccaataaccaaacaaatcaaacccattttcattaaaccaatttaggtttacggagcccacgattttgtagttacctttgtgatttcgatttttttttccagaatcgtaaaaaatccaaatccaatacaaaaattctaaactttagtttctcgaaaaggggactccggcgacgggatatccatctcctccgtcactgtctaccaccactgcttttcacactacactctcgtttgctctttccaccgtaaaacaccaaacccaattctcttgtcatttcctccaaatctctgcaatttcttaaatcgatttggatttactttgcatttaaaacccttaactcgtactgtccaaactcaaattcaacttcaattgaggttacttcgagaaaagttcaagaatttcggaacaactaaggtaaatttttgtcatgttgacttcggagatcttgttcgtaattctgtgataatgtttgataacttctctgcccagtttgtttgaaattcagtacttgatgttctctattggacagaagatgaacatatggactacgacacttggacaatccgtaatggacaaccacacattttgtttgcagcgtatgtgtcgttacaaaattgaaaatcattgtccacgactatacatgactgcacagcttggtgtttgataattcaatgaaaaagccacataaaggctctatttcttaatcttacattttggaaaaaatcaaatccttgatttaagaaataatatgtaagcttggatgctagagctttgggtgatcctttggacagattaggatattgatttaactttgttcttactgctactcaacattgcttgtctggtattaagctgtaaaagagtaatttgacttatccttttgtgttgatataattggtcattataatgtgattagtcaataaaaaaccttaagagtacataataacaaacttttaactttgttaatttctttaggctagtgggtgaatacatcagttggacttgcttttgcacctcatgtgatcatcgttgttaatgtcatccaaagaaatctgtccattcatacgtaaacatgaaggtactgttgtttggacactccttactttaaaaccccaccttagtttgcaagtcattacttgactagtttactttaaaaacgaaatttaggttaggaacattgtgtcagatcctattttcgatacaagtgggaatatccaagtcaacaaacctacaatggggtaccatattttattaatcgtctgctccttgttacgttgaacatgattttttggatactttcttacattttctccttattgaaggtcatgtttcttatggtttttctgaccatcttcatttctacttcaactcaatcaggacattttggagaggcttcctgcatcccaatcattgaaagatccccaaactgatctaaaaaattctaatgaacaaatgaaggtctacatgtacactaaattatctttatggtttacagtccttgtaatattggacaatatgttttggatagatatttaaataatcttcttattggagacatcactttttgttggcgatctagtatttgattccagttccaaacctgaccaatatactcaatcatctcccacacataattccaaagttgggttatctccaatggaagtatttcttatcatctacaactgtctatcgatgcactctatctatcatttgtaaatatgtcttagtaaagtataataatttcacatcatcattattatatctttcagtataaaatctctctctatcaagatatggatccacacgatgttgtggataatcaggtagacataaaactaaataactagaacatgtatatttattattactgaaaagcagtcaatttttactacaacattcttagttctattattaattatttacagaaaacataagattgctatcgaagtcttgttagtcatgttgtgaagccaatctctaaagatctaacataacgcaagttagttatgtttgcagacaaatccatcttctcgttcgtttaattgttatttgatcggacggtcattatttctcactaacttctatttaaaccgcaaatcttaacacgttcattttatccgaattaacccattattctacatgtgtttggtacacacaattacaaaccaaaaccaacgaccggttattcttcttttcgtgattcagtttatttggggtataatggtctatttttactccaaaaacaaggaaaagtgtctcaaccttggaaagtgcctgttttgtctaaacttttttctcaaagtgccttattacggaacattccctaacaaaaatcgtcgatttctctgttaccgaccagccgaccgtgtacaacgcgattatcggcacaccatggttaaatcaattccgagctgttgactcgacgtatcatctctgcctgaaatttcccaccagcgacggcgtgaaaaccatctggggaaatcagaaaaatgctcgcatctgcttcatggcagcacacaagctcaggaaccccgtcactgaatcgacagccgacgcgagtcataagaaggccaagcttggccgagctgaagagaagtcaatttctgagcagttataacagctaaggatcgaggaggctcgggaatctacaacaccaactccgaatccggtagtcttaatctgccttgacgacgaagcccgagcgatgcgtaatcggcggagatctaggagaagaactaacagctgaactcaccgccttcctcaaagaaaacgtcaatacattcgcctggtcctcagaagatttacccggagtaagtgttgacatcgtatcgcacgagctcaacatcgatccgactttcaaacccatcaagcagaagaggagaaaattgggtcgggagcgagaagaagccgtgaaagccgaggtagagaaattattgaggatcggatccatcaccgaggcgaaatatcccgattggatcgcgaacccggtcgtagtaaaaaagaaaaacggtaaatggagagtctgcgtagatttcacagaccttaataaagcctgcccaaaagacagcttcccattaccacacatcgatcgcctcgtagagtcaacttctggaaacaagctactgtcattcatagacgctttcgttggttacaaccagatcatgatgaaccccgaagatcaagaaaaaaccgctttttacacagaacaaggcatcttttgttaccgagtgatgcccttcggactcaagaacgccggggcaacctatcaacgcttcgtcaacaaaatcttcgcattacagatcaggaagacaatggaagtttacatcgacgacatgttggtgaaatccatgacagagaaagatcacatatcccatttacgcgaatgtttcaagcagcttaacctctacaacgtcaaactcaatcctgcaaagtgccgctttggagtaagatccgacgagttcctcggatacctagtcacgcaccgcggcagcgaggcaaatccgaagcaaatcgaggcattgttgggaatggggtcacctcagaacaagcaagaagtgtagcgcctaaccggaagagttgcggcccttaaccgtttcatctctcgctcaaccgacaaatgcttagccttttatgatgtgcttcggggaaataaaaagtttgaatggacgacccgatgcgaagaagctttttcaggaactcaagaagtacctggcaactccacccatcctcgcgaaacccgtaatcggagaaccactatacttgtacattgccgtataggatactgcagtcagtagagtgttagtccgagaagacagaggcgagcagaaaccaattttttacgtctcgcagactttcaccggcgcggaatctcgctatccgcaaatggaaaaacttgctttagcagtcgtaatgtcggctcggaagctgcgacactacttccaatcccattccatcatagtaatgggatccatgccactctgcgccatgttacacagtccaagccaatcaggacgtctggctaaatgggcaatcgagctcagtgaatacgacatcgagtatcggaacaaaacatgtgcaaagtcgcaggtcctagccgattttattgtcgaactgcccaccaaggaggcccgggaaaacccactcgacacaacttggcttctacacgtagacggctcgtcatcgaagtaaggctcgggtgtaggaatccgcctcacctcgccaacaggagaggtcctcgagcagtcattcagattaaacttcgaagctacaaacaatgtggccgagtacgaagcgctcgttgccggacttaatctagctcggggactaaagataggaaaaatctgagctttttgcgattctcagctcgttgcgaatcaattcaacggagaatacacggctcgggacgaaaagatggaagcctacctgattcatgttcaaaatctagcgaagaatttcgacgaattcgagttgacaaggattccacgaggagaaaatacatcggctgacgccctagctgctctagccttgacaactgacccgagcctgagaagagtcatcccagtggaattcattgagaagccaagtattgagctcggcgaagaagaacacgtcctcccaatacaaatcagcgcggatcaagacgacccagatgactgcagctcagtatggatggaacccatcataagctatatatccgaagggaaattgccctctgacaaatggaaagctcggaaactcaaagctcaggctgcacgtttcgttctagtagatgaaaaactttacaagtggcgattatccggacccttgatgacatgcgtggaaggagaagcgatttgcaagatcatgaaggaaattcacggtggctcgtgcggaaatcattccgggggaagggctttagccattaaaataaagcgccacggattcttctggccgacaatgatcaaagactgcgaaagtttttcaaaacgatgcaaaaaatgtcaaaggcacgcgccaacaatccatcagccagccgagctcttgtcatcaattgcctcgccatatccattcatgcgatggtcaatggatataattggacctatgcatccctcgaagcagaaaaaattagttctcgtcctgaccgactatttctctaagtggatagaggccgaatcttacgccagcataaaggacgctcaagtcgagaacttcgtgtggaaacatatcctatgtcgtcacgggataccttatgagattgtcacggataacggctcgcagtttatatcaacccgcttccaaggcttctgtgataagtggggaattcgacttagcaagtcaacaccacgatatccccaaggaaacggccaagccgaagccgctaacaaaataatcctcgacggattgaagaaacggctcgatgctaaaaagggctcgtggtccgacgaactcgaaggtgtacttttgtcgcgtcggacaactcctcgccgagccacaggagaaacccctttcgccctagtctacggaacggaatgcgtaattccaaccgaaatgatagtaccgagcttacgccggagtctatctcccgagaacgatcctgataacactcaaaggctcctcaacaaactcaatctgatcgatgaacgaagagcatccgcttcggccaacctgttgaacgcctccatgttgttcctaacggtcgaatcgtacgagtgcaccattcggttcatcgaggcaacagcctagaaaacagaaaaaaatacagatcggagatccagacgcgatgaatgaaaaagttgaataggcacttacccgcaggaagtgggaagccgtttcagcatacttccgcgactccagaagagtatccggaggaggaagcaaaggaccgacaccccccccgaggaggtttgcagaggctacccggtcctcaaagatggggagctcttttcccgcctcggcactcgaggccttcttcttcttgcttttcttcttaagcgatgaatcatccgtccgaacacgcttacccgccgcgttgtcgctcgcaggcagcgcaacaaccgcctcgggcaaaggagcagcagcagtaggatcgacctcttgagctttataaggcgtcgggtcaaccggggccgcaacttcgggagcaacatcccggttttgagtcgcatcgggagaggctacccgcggtgaaatcaatcctgcatccgcgaggcgtttctcttccgccaagcgtctctctttatcttcttttttcttcgcgtacacctccctcaaagtgagcttagttgactgcatatcgacgaagaattgagttcggtggtccgaagattctgaactggtaggacaggaaacaccgtgaagaagacggagtgctcgttcgactcgatcccgagagaagtgtttcgaccaatcacacttccgaactgataacgcgtgataagccgagaggaaatcgtcaggaatcaactcgagaaacttgagagtgcgttctgcaacaaaggaaaactagttagaaaaagaaacaaaatatataaatcgtgtcggacgtaaacatatcgctaactacaactacccaaagttctccatctcgttagaaccgtcctgagaagatcatcgtgaacagcatctccgagagccacgtagaagaagtggtcggtatacgaatcgtccttgctcgggaacccgtcaataatcttcttacccttagcaggagatatataataccgatccacttcggattttggaacccgccggatctcgagaaaattcctcagatgagcgagcgtaatttcagtttcggattcataactccgaatcaaaatcccgagcaaatgtctcaaagatcgcatcgtgatctgggaaagggcaatctgatatgatttcacatactccaagaccagcctctggattggcagccataagaagcaaccataaaagaacccctcatacaaggtatagaaacccgcagggggattgtcggctcgctcgtcagggctcggcacacgcaaggttacagcgccaagaccaaatcgagccctaaggtccgagagagaccgctcggtgcacaatgttgagccgggaggatctggcattatcacctttttgttcttcctcttcttcttctcagccttttcgaaagctttctgctcattaagacgcaagatatcttctgtcttgtttgggccaaaataaagaaaatcctcaatcttaaccgtcggcatgaagggctcgggcaaatttcgccaattggatgtcccggcttcgtcagccatcgggacaaaagacctgcgaacaagaggcggctcgggatcatcggacaatccagttcccgagcgatatcggcattggtatcttcccgagccgtgaagggagtcgtctgctcgggggcacccgaagaagatacagcatcctcttcagaagacgtccaaattgctctccgtttgtagatcgggggaagatcatctcggtgatttgagtcgctagaatcgacaagagaagcgctcggggacgatagacgagaagggaaacaaccagaaaacaagaatttctatcccggaaaaatcaaaaataacaaaaagaacgacggagcttcgccggaaaagaaaaaacgatagaaatatcaagatcagagagaaggaagcaaaccttgtttattttcttcgaaaacttcaaatgaaatctcgaaggagtggctcgccatatataaaaagttttcaagggcgcgtccggtccgcagcaaacatttaaaacgcgttcaagcgcgtgggctcggcagaaggaaaagatctgcgtgatccttgggaataagcgagaaacgtttccacttctcaagaatagtcggcgacacgcgacagaagtttgaccgtccgagaagatgaagcgacagaactagaagacgaacagtctgctcgggaatccattcatgatgctcatcgtctctctactaagtcaatgagctggggggcaaactgttggggtcggattccacccaggtaagcgagccaaccatgtttcaacgcctcaggagacgtcgaagagttatcccgaaccgggccacaaaacacctcggagatcgcatcaagaatccatacctaggcgatatcgagaacgcttcggagcgttctcgtgaaatggtccccgacccaacctcggaacgcctcggacataaaacctggcaattcatcccgaggcgggctccaagatgcctcgggaacgcatcctcgaatatcacggtctgagccgcccgagcacgacccgaggtcagctaaattccggctcggaggaacttcgggttagatgagaaaaccttcaaaaaaggacttagccaatataagatcaaacatatcatttccgaaaaccccggaagagataatcttcaaagatatcaccgaatacagaaattcccagaatcttcggaagataaggacaatctccttcaccaacttaaagataaagagaaatcttccgagaatattgcgagaggcgatattccaaagctctataaaaagcacctcgaaggacaaacaaaggggacacgcacaaaaacgctctcaacttcaggctatcaaaaacgctctgactttgaaggcaaaaacacttattttcatattctagaacacttgtacgatcaaatcattactttctcattaatacaatcaagaacatcgtccacggtaattgagaattctgttgttctttgagaatctcacaaagattcaatctttgaagaaacccttaaaacaatttctattgtgcgagttttgactctcacagagtgtctccttgaagtcccgggattgatggacttcacggtggtcttaaaaccgacatcaagccaaaagtcagcatgggaggttgaaagaaagtccaaaggctaaggtttcaaaacgtactctacctaaagcgaaatcatgcttcacccactgctatctgctttctcagaccgggcaaaaggtcttcctgcccccaacgaggataagatggatgagatgtaggtctctctattttagggttttatgatcaaaggtatatatcacaaacgttgctattatatcatatatatagccaaacgtttaaccctaactaattaaggttaataatggaccaaagcatagtaactctttttcttcccttttttttgtccagtctgcttaggtgtgtgaccctgtaggtttgtataatattagcaatgagttctgactcatagattataagcggtctctagcaaaacataataaccacctaatattatacaaatgtcaaacctcgacattacaactttaactagagtaaagtacaactttaacaatctcccacttgtatgggaatcatctattcccataatccctttgcctctatatctcgatctcagcataaggcaagaaattgtcatccttattcagttagaccatgtttatcgaactccgatttatactgataaaacaaacgactgacattcacctcgtttgagcgcggctacgcattttctcagtatcaaatcttcgataggcccaaagatatttatctcccgttatatgggagggacaaatcccatcttgttccatccctgttccttaaacaattcataatgcgcccaatcactgtctttataatcaccttttacggctgacgtttgacagagtcaaagcgaactaatccatgaataagaaatcatgacgaactcaggtcaaaggactatactctatagttgttatgaaaaactcttatgaccctcatataacaataacaatcttgtagagttctcataacgggtcagtccaatattgtgttctctaacacatatctatgtgattgactttaatactacatattaatgactccatgaaacttagtcatcagtcacctcacatactagtcattctcagttattaatgtcccattttaataaccttgactagggacttcaataatttatgtcattttccacttacaaagtttcatgatcaagtcacgtacttgatgacctataagaatgatataaattatttgggactattatttaattatcaaataaataaataataccgaaacaaatttttattaatatgaaaataaatccaaatgtattttaacatgaacatcatatcataaaagaaaaaacctcccactagaaataagatcacatctttataaatctaatgccaatcgcagcagtatgactctcatgcttcagctgcggaagaggtatagtaaaaggatcagcaacatttgcatccgttgaaactctgctagtcttcacatcacctctatcaataatctcacgaatgaggtgatattgcctttgtatgtgtttggatttctggtgtgatctaggttcttttgcttgcgccatggcaccattgttatcacagtaaagatcaatggggtcagaaatactaggaaccacaccaagttcagtaatgaacttcctaatccaaacagcctccttagccgcttcagaagcagctatatactcagcttcaattgtagagtctgccatagtgctctgtttggaactcttccaactctcttccaactcactgctccttcgttgggacaaaagacaaatcctgattgagatcagaaatcatctttgtctgtctgaacgatggcatcagtataaccactcacaacaagttcctctcttcctccatagaccaaaaacttatccttcgttcttctcaagtacttaaggatgttcttgactactatctagtgactttcacctggatcagattggtatctgctcgtcatgctcaaagcacatgcaacatctgggcgagtccagagcatagcatacatgatagatcctatagcagaagcatatggaatcttactcatccgctctcgctcatcatgcgtcgaaggacactgagtcttgctaagagttatgccatgagacattggtattaagcctttcttagaatcatgcatattgaacctgtgcaagaccttatcaatataagtatcctgacttagtccaattattttgtttaatctatctttatagattcttattccaagaatataggcagcttcacgcatgtctttcatcgagaaacaaattccaagccaagtcttaacagactgaagcaaaggaatgtcatttccaaggagcagtatgtcatctacatacaataccagaaatgcgactgcgctcccactagtcttcttgtaaacacaaggttcttcttcgtttctaatgaaatcaaactctttgattgcctcattaaaacgaagattccaactccgagatgcttgcttcaatccataaatggaacgatgaagcttgcataccttcctagcagcctcaggaacagtaaaaccttcaggttgggtcatgtacacatcctcttctagatttccattaaggaaagctgttttcacatccatttgccaaatctcataatctaatgagcagcagttgctagaagaatccgaatggacttaagcattgcgactacaataccatgaatttgcttgtaacctttcgcaaccagtctagctttgtatatatgtatattaccatccatgtcaattttcttcttgaatagccatttacactctatggcttttacaccatcaggtaaatcaaccaaagtccatactttgttttgtgacatggattccatttcggatttcgcggcctctaaccaattatcggaatcggggcccatcagtgcttcttcgtatgacgtaggttcatgactttctataataaatatagcatgatcatccatcacccaatctctgaatctatcgggttcgtgacagctcctttcggacctacgtacctcaggttccacaggtataggttctacgactcttcgtagatccaactcatgttcttcctgagaagttggaacatcaccctgtggttctcgaacttcttcgagtaatactttactcccactagttccttttgaaagaaactctctttccaaaaaggcaccatttcgagcaacaaacactttgttgtcaattaggtggtaaaagtaataacttttggtctctttcggataacctacgaagtagcacttatcatatttgggtccaagcttatcagtaatcaatcgtctgacataagcttcaaaacccaaattttcagaaaagacaaattaggaaccttttgatggacatctgttgagcataaacgcacacgtctctagagcatatccccaaaaggatggtggaagatctgtgtgactcatcatagatcgaaccatatccaataaagttcgatttctccttttagacacactattccattgtggtgttcccggaggagtgagctgtgaaacaattccacactctctaagatgattactaaaaacttggctcaaataatatcctccacgatctgatcgaagagccttaattgatttgccaagttgattttgtacttcattctggaactccttaaacttttcaaaggattccgatttatgtttcattagataaacataactatatctactgaagtcatcagtaaatgtaatcaagtaatgatagtttcctctagcacttgtactcattggcccacatacatctgtatgtacaaggcccaataagtcatcagccctctcactgtgtccagtaaacggggctttagtcatttttcccaacaaacaagattcacatgtctcataagattcataatcaaatgagttcaaaagtccatcactatgaagcttttgaatgcgtttctcgtttatatggcccgaacgacactgccagagaaaagttggattcaagtcattagacctaaatctttttgtacgaatgttatagactggcatgctttggtttagaacatagagcccattctctaatggagcgctaccataaaatatatcatctcgatcaaatgaacaacatttgttcttgatcgaaaaatgaaaaccttccatgtccaaacatgaaacggagacgatattcttgtttatagcaggaacatagtagcagttcttaagctccaaaaccatgcctgaaggtaaagacaacgaatatgttcccacggaaaatgtagagacttttgctccattagccacacgtaggtccacttgtccttcctccaaagttctattgttgtttaggccatgcacatttacacaaatgtgagcaccacaaccggtatccaatacccaaggagtagaaccagatgtagtaacatttacttctataacatagatacccgaagaagatatattgaatgttttcttcttctccagatcttccaagtattcaggaaggtttgattcattcaatttgtccttctcaaggacatctcgaactgaataggaactttgagtggttgacataactgtcgaaaaagaaaagcagatattaatatgatgttcataaattttagaattc

SEQ ID NO: 1331 - DNA, 12521 bp, Arabidopsis thaliana
acattgttgatttctccatgcttatctttagccctgaatatttagagaaattatcaaaaacgttgacaatgctctcgatagaacgaactttaccatctgagagcaccattaggtcatcagcgaaacacaaatgtgtaaaaacctcaactttaacaaccacagtgagctaagcaatcaaaaacgcaaacggatttagctctagtaatctgtggaaatacatatattcatcaaacatcaaaaaccaatttgagtaaaattgattcatatacacaaaaggtaaaagctttagacaacctttggcagcaaagcctcggagctgaaacgatgttccaaccacacttcttctaagtaactgcaaaaccccatgaaaccctatacaaccagcacttgttaaaatcaattacagtctaacagaacatgcaccataagaaaaactttttcattgagaagcgcaaagagaggttaagattataccgtaggagaagaagagactatttgaaccgtaaaagactcttccctggatcatttgcaagtatatgatgaaaaactgctagagattctatatcatccacagaagaacaacgatcatacaaccatcataaaaaaactcgagaatcagccaacatttacgaagctggaggtcttatccgaaccctctccgccgcaactataaactgaaacccatgaatgaaacaaaaaaatcatctaaaaaaagaaaaattacaatggaaaagaataagaacaacaacaacaattgaattgatttctgctagggaaagaagaaaaaagagacgcgggagagatagagacagaggccaagagaaaatattaaatattagggtaaaagaaagggatcaatgtgtgtttttacgggtcggattagtgatcggatcagatcaacttcgtaggagaggtaagtttgcgattttaccctttaaatttattttttataaacacaagaaaaaagaaattaaccgtttttggtaaaaatagctcaaatggcttgctaaaatgctggaactcgttatctcttaatagtatagattattaaccagcgaagaaaaaaactcagaacgacgtcgcttcaacttgatccacttcgactgaacaaaagataaaattctctctcaaactcagccgcccagatcaaaaacaacaatgcaactctcactggttcaagtctcttcagtgtccaacttcagatcccaatcaacgattcctactctctccaactcaaacccatcttgtttacttcttcaaaagtccatctttcctgggtccaagttaaccctccatcgaatttttcgttatccgaagaaaatctcaaatggctctactcgtgcttcactgcttgagacccctatcttatgggctggtcggatttgtgtcttctacgctctcgtgaaagctggctttgctggatccaagtctaaccctatcgtttctggttcggttaatttaacgacttctctagttttttttttttttttttgtaatggttcgtttttattgttattgatttttgttgttatttggataatcttaggtttggatactggtggtgttgatgttgaatatgatgatggtgctgatcttggtttctcaaagtggcttcagaacattaagggcaacaaaccaggtttttgtttctactacttatgacttatctgtctataggattgtgtgtccatgtctagaggtttaatccaattccagacatactcttgttttgtctgctgattctgctatagatccattttcattatttcatacaaaggtctgcttcaatgttgagtatgagaaaaaaaaaagtttactttgtatggttagataaggatgcagctgataagaggaagctagtgagcaaatggcacccaacgacaaagggaacacttagaaggaactacaggataccttcgaaagccgaaggaaaccgtttgcttaaagccattgcgtctcttctctcagatgatgatcattttagagatgcaacatctcacaaggtaacataacaagtctatagttaacacttaacagtccttgtgaaaatacctaactgagacactattgcagggttgtcaaatacggagggagagtgcgcacggtcaaagcgtatgttgcaacaatgtgagagctctgtttgatgagttaccgacgccacatttggtggtggagatcacaccttttccagccggaccgctcacagagaatgattaccttaaggctgagaagctggagaggattcttaggtctggcgccaacatttgaaccctcttggcagtgttttactatgtgtcaaaatctagaacctgtacatactctacgatgtcttatgatgcagaatgttcaaatgtttagactctatgaaactgttagttttttgtgaagttaaattatcaaaatcgttgcgaggtatgtagttgcattaggattggataagatagtcaataatttcatcatgccatctcaatttatgcaagaaccatcacatcacaaacaaaaaaggtaccgaatataggtttctcaggccatcataaaagtgattaacaattgcatttatacattgtaaattacataaaccgattaagtaacttgtaacagaagggacagtccctattgcagaaacatggctattgaaaacacaatactgaattaaccatcactaggtgaaaaagggtcatatacttgatggacaccagagttgaaccgttggcgaatctgtggctggccacgcggtatcaggttatcatgatgaaacactggtcttggagggaaatgagcagaatgctgcgggaattgagctccagggaagtttctaggcatcatctgagacaatggaggtccgacgtttgatctcgcgttaccatgaaatggtgcagatgggtggctcaagggttgatccatctgcctgtcgaagtgctgcgatcttgtgaaattttgcccaaaatgttgagaggcttgaaatggcagatgagggagatgagctgattgtgagttgggtctaggggatatatgtggtgtggtaataatgtttgattgttgtggtatgtaaccgaaatccccgtgaaacggcctagaagcagtatttgtgggaggataagccggaacaagaccagcaggcctactagcaatatgtggtgacactgacatgggacgcagagaactaccagaaccatattctgctattagactgctagccgagggaaaaggaattgatggtatttcagtacctggctgatgagctacaggatgtggactgaagttaggagccaaaggccgtactgattggtctatgtctggtaacagtgttggtctatgtacaggatggaaagtaaatagggtcgacggcctcacagtagaacgtggtcctattggttgtatctgactgccagaatatggaggcaaagtcacagaataggtccttggtgtgttggaaaggctaaaagggaacgaatccggtggtcgagggacgtgagaaccaggaggtaatgatgtgtcatgaggaactggaagtagttgctgagcaaaaagaggattgagattcatagaatttttaggcagttcttgctcctggatattataaccaagacctgaaacaaagtgttcaagaggtggatgaagtggagcttgatttgaagacaaatgaaatgaggaaccatgctgtaggacttggctatggtcagttgtccgttcagaggtcggggctgtagcagttgcgatgctgttgcctggaatagttgaaataatttcagatatggaagatggaggagcagcaccagctcctgtatttccctacaaggaaaaatgacataatctgagaatcattcgaaaatttgagacttataatactagatgcatatcatacttataactctcttagagaagatttaggaactcacagacactgaagacataagtagctcaactacagcaatagctgcatccactttttcgtaagtgtcagatgatatctgaaaatataactcttgccatgacttctggatctcattttcatccgaaggagagagttcaacctgcacgaagaaaacttcgattcataaaccctcgcaaatacgaatattgagactttttagagaccagtatggagaagcagcacaataatgacagttccaaaatttaccttctctcctcctgttttagtaccgaaaatttgtactttagctccagtctcctgttcccataatgaaaatagtaagcaggtctcaagagtcaaattgaatgataacaacaaggaagacatatcataggtgacttactttttcgagccgcttttgagtatcaccttgggaaccaaatatgagacttagaaagctgaaatcagaatgttctttaacctgcaaaagctcaggtccatacaatatcagctgcaaaattcttagttatcacataacttaggaaacagatatgaatatgaactatcctttcgtttacactcaatactctcccaagatatgacatgagcatctttcttccaaacaaatgaggtcgtaaggtaacacttcacatgagagaacttacatcgatcggcaatctagcttctttcagcaatggcttataatcaggtggagccttgtacctcggattcaactcgagtatctcccctagaagttaagaaactatatatcatttgaaggaaagcgaattgtacagattaaacgaggaaaattttaccaattgcttcgcgtttttcaaactccagctgttgagtaataataatctatcaatgagttaacatggctaaaagaagcacaaataaagaagagaaaaaagaaaaaaaaaaacttacgtcagttctattagtctccacttcaagagttccagattccaatcgctgtgtaatttgatccacgcgtttctgctcaaaatttggtcaccaatcacttgcatggatttttcaattttgagcaatttaaaaggaagacaatttgaatacctggtaagctaaaaatcgacatttcttgactgcaatatcttgtgacaaatcaggagcccatttagtctttcttttcttccccagcttcgacggaggtccagtgtctgaatcggcacttcctagggttttgtttccacgttgaaaaattgggatcaatgatccagatagtttgtttttagggataacgaatccagatttggcaccaaacattgagatcttcgcagcggaagtagaagtcatctcttcgactaaacgtagcggcggagttttccgttcgacctaagaattacgtcgtcgattagcgacggctctcgtcgttaagggtttgagagaaataccgtagagctttttgttttttttcctctgttacccctttttttctattcgattttacgctgaacaaaatgatgtgaaacgatgttagacttcttactttgttagtggtccctaccttaaatactcataaaattccaatggcacttatatctgagacgaatttgatctgaaatccacatttgaatgtcgtttaggttctattcgattgattctttctgttttataattaagtatttggaaaaatgtcaaaacaatcaccaactttcaaatttggggcaatttaatcttgaatttgaaatatattcggttatgattttcttggttttaaagtttagtatctatttaagtattttattcagatacttcaactattttagagtacttttttgtatattttcggttactttttagtatttttggtaatttttaaatatttttggatatttttgattattcagtctaagaatctaaataggaggattgacacaaatgacactaaaaaagttttttattctaaaaatggcatttacgtttgaaacttccaaaaatagcaccaaaaacttttgaaaattaattaatgcaaataaaaattaaaaaaacaaaaaacacaaaatctcaaaatctaaacctaatcgattctctctcgcctgtcgtcgtcgccggttaaccatcatcttctctctcgctgtcgctgtcgccgattaaccgtcatcatctctctcgccgtcatcgtcgccttctcgtgattctctatcgctgtcgttgttacacagtattgcctcgtgattctctctcgttgtctccgaaatcacacagactcgtcttgccgaaagaacgttgatgttacgccttcccactacaaaaaaagtcttcattgttagcgcaaaccatctgctatcgtatgtaatacacagcgaattcacaaatgctatgtttgcggcagctatagtaggtgtcacccctatgacagcattgttttgtacgctatggtatattttgctacgatagcaacgatataacgtcattatagagttttgatatatcactttaattcttgttataaattactaatctttctaatttcgtgtcataataccctcacctaataggacaactaattattgctctctaatataagttttgtagctttgtgttttatgctatcatatataattttttgacaatgacatcgaagaattgctatagtaaacagaattagtgcgtttaattatgctctaatataatctactatagttgaaaacaacaaccaatttttgctataatatccaatctcaaagaactatcttttgtgattaattctaaacatgttttgcataacataaacatacaacataacataagtcttaatagttgttatattataaataagtctgattccaatccaagagacaccattcaaaagttaaacataatcatccaaaacaagtttaaccaaagccaaatacataacaacacaagtctgattagtctagtcttaacctaatcagaaaactatctaatctggaccatagattcttcactccatgcaataatcaacaatgtctcatatcagttcctgcataaaaccaaagcacaagcatcacaacaatttcaaaacttaccctagattctgcaaagtcagtaggtcaccaacttatcttttggccatgcaattgatgaaccaagtgaatctctcatatactcaatttcatctgatggcctccagactgctgcatcatctacattcactacatctacccaaactctagctgcattctctcccaaatgaacatggtgtaccttttgatctgggtctattgaatgcactcgtcctgcaccaaccacccgcttctttccacttatatccattaacttgcacttctgattagccttcaaaccttcagatattttttggcgctaacatgttacattataaaccaggattaaacgcatgtagaaattttattagtcaatatgtcaaaccaaagacaaacttaccggagatctccgtagaggggtttgtgatgctaactgagttttcttcacaggagactttggaactactgttggttgcttctcaccaagagattttgcaattgttcctgcagattctgaacccttggctgcagatacctgaatagaagaattatgacctgactttccttttgttgctccattttgttgcttctcaccaagagatttctctgttgctccattttgttgacttgctgctgctgactttccttttgaggctgatgctgttggataagttgattgagaactctgaagaggagctttctgaactgctgaatctgtggtgttttcataggaaactttgtgggcaggccatgctacaaaagactgtaaacagtcctcaaggtatgtcacatccatcgttggcctccatatgaacgtctcaggttgaagtattacatccacaaatactttcactgcagcaggtccgagaggaagcccattaactaatgcagattggtcttttgtctgccaacgtccttctgcaacaataacgtcattgtaagacaaatccagtagtttgcacttgtttccataagtgggtcttggtccctgtcaaacacattaaaccaatgtcttagtatgactctgaatatattagtatgactctgaatatataacattttacctgtgcaatgtcgtctggattgagcttctcctctaggctaacacacatagcaacaagccaagctatcatctgaccaacaactttctccataatttccatgttaactgcgggtctccaaaggtatgcttctggtacaaccgcagtgtcaatcaatactttaacatctgtaggacctaagcgacttccattgactatctcatccggatcagaagatataatacaaccctcagcaacggttgcatcagtaccagcccaatccatcaagatacacttaggttgtgatccttggttcacactctgtataaggaatcaataggctattatcatctaattatgtaccaagagatcaaaagtatcaaataaaagtgacttactcttgcagctgaggtttcaccaacttcagctgattgtctctgtaccaaaaaaaaaacaaagtcaaatatatgtactaaccgattgattagctttatgtataagtagacaagtgtttacatggttctttatcttgtcaattacttcttgtaactcattgaccttctgctggagctggtcctgtttctgttgcatttcagccatacatttgctttttacttggaaacaagctagtttggtcttgttcatatttcttcccatcgcccttagtctaccaggattgtcaggccctaagagttggctaagtgaatcttgtgcttcattcgtcccatttgattgaggaccactactaacaatcttagctgcctttttccgcaaaccatcacacacaatcacaaaccagtccacacaatcactggctaagttctggatttattgcctatcacattcatttcaaaaccatcacaaaccagtccacacaatgactggctaagttctggatttattgcctatcacattcatttcaaaaccatcacaaaccagtccacacaatgactggctaagttctggatttattgcctatcacattcatttcaaaaccatcacaaaccagtccaatttctgttccatcactaacctatccaatttaacaaaccatcactaacctaacaatcatcacaaaccaaactgtcacaacttccaaactataacatactcacaattttttcagccgcatttgtattcactggtgttccatctttcttggtccgtgacttaacccaaacctttagcctcatcacttcagttgggtctgcactaccaaattttctgaaaaacacaacatgccaatattagtagcaagctaagtgttttaaaatttcaaagcaataaaaaacataacctaacaggcacataagattaccatatcttctgcaagtctaaccatccctctgcgactacaagtgtgaggaagctggttgcgccttctctccttgtagctatcacttataacctaacaatgattgttaattagtaactttctacatagtaaatatgcttagtttaatcttctccctcaacataccttaaattcagggctagttttgctcttcacaaattttctccactcaaatggagaaacatttttaggtctcagattcatcccctgctggtttgtctttgcttctctaaacttagttacttgccttgatttccaggatctccacaaacatcccatttgcttaagcactgcaaccttttgatactcctcatctagttcaaaccttgccttcaatcaattacagaaaaagtgattattgttgtgataaggaaagatagtcaaatattacaaaaaaataaaaagtgaagtgttacctggatagatttccagagaagtgtcctgatttcttcacctatttttgtccagtgatcaattgtgatagggacgtgttcacggaccaatgcacctgcatatgatgctaacttaactgagcctttaccaataggctctcccatcatggtgtactccactctcactctggcatttggacccttagcaatatctttcatcctagttggtccacgctgcctcttggtcttaggttgaacaacatcttcatctccagataattcaagctcgccttcaggttcttctgctgcttgcactttcagcttcgttttctgtctctccattaatgtcttcagcttcgttttctgtctctccattgatgtcttcatcagcttctttttatgtctctccattgatgtcttcagcttctttttctgtctcttcatcgatgtcttcaacttctttttctgtctctccatcgatgtcttcaacttcctcaatgttttctgctggaacaacagtttgttctacagctgttggctcaattgtacccacatactccacctcatcattgcatttcttagcagcagcttttttaggttgtcttccacgctttttcttctgttgtcccattgtaaatcacctgagaaaaaatgataaaattaaatcagcactcaaagcagacacacaattaacactaaaagctacgcaatcgactctcagtaagcttttgttcacaaaatgatgagtttgttgttattgttaaatcgcttgaaattcgaattgaaaatgtagatctatgttatgtatcgttttgtgctgttgaattggtcccatttttatcttatttaaccgtctgtgaagttaacaagtagagttttacttccctattgatggcattttactatttttcttgtctttgagattcttgtgtgtttatccctgaaattgagaaaatatttgagtgtaggaagagactgaagagctgttcttaaggataaagtgtcttattatttgattttggtttgtaattgtatacacatgaatctacgaagcttgaatcatacttcttaatgtttctatttgtgggtggagtttgttggctgattcaagctttatagaactttgagatctgtttgcaatttctaaagatctatggctatgtgatgactgatgagcttgaaacagatttaagtttctcattttagtctttgtgtatcagtttttacgaaaattcagtatcctttgagcttttatggaagtaaatttgagaatgtgttagatatttatagtgggttatgattctggtctacattgttatatgttagatttcttcctacagtgtgcttgaccttgcactggttaattattctatccaagactcatataattattctatccaagactcatatctgggaccagttttgaagacaacaacaagaaagtttactctgtctggaaaattgctacattgtgtatttagtaggatcttgactacactgaaagaaaaggagctttggtttcatttcggaggacaacctacgagattctctattagaaaatttcatatggttaccagatttaagtgttctccagattctgaggaacgtgaggagaatgaagaggagaatgatgaagatacaggctacagttgggcgaagacaaaacagagacacacaacggatgtgcttcttcacattccgagggacactgatgaagattcgagtgaagaaagattctgcttggccatgctcctcttaatagagtcgactttcctcactctgtacaaaggctgcaaattccctatagaaaatcttgagagagcacaagatgtggaaaagttgaccaattatccatggggggaagatgcattcaatgtgccaatgtcatcgatcaagaagaacgtggcatcaaacatgatgaagccaaagcatgatattcatggatttcctctagcactacacatttggattcttgagtctattccaatgctacaaacaacctacaaccgaatcagtttaatagagaggcctactgcattcttgtgtgagaaatacacgagcctaccatcaccacaactttctcaaatacagaacattgaagcatcatatcatgtaagtttagtctcttctttcaacggtttaaactagttttgggaaggctttatactaattcggagttttgctgaatgtttttgtttttgtgcagccgaaggtgtttttcatcttaccgtcaatacctgatgatcttgaagataaagtttcattggaagacgaagatgatccagaattggatatgctggtctagcttctaggcaaaggttacaagataaaatctgaagattggacaaaaacaatagttgatgtaggagcagtattagaagaagttgtagtgatttttttttgttcggtaacaaagaggtaatgaaaccaacttcatcaggcgagtctctggttgagaagcttgacaagctagtaaacctagttgaagaagggtttaaatcaacaaatcaacgcttattagaaatagagaggaagttgacaaaacttgatagaagaagaagaagagatcatgtaaaataagattcttaacaaatttaaattatattagaggttctgaaatgaatttaagccggtttgatttcttgttgtagtcggaacgatcaagaagtccatctcctatgcgaacagatttctattccaatcgacctccatctcctatggtaactgagcaagaacctgcaaacactacaaaaaacttcccattgatagcattacggcataacacggtttactggactgctattgaagtttagctgtaatttttgtattcatatgatagcgttttag

SEQ ID NO: 1332 - DNA, 90336 bp, Arabidopsis thaliana
gaattccaatttccttcctcattcattggagagctctctttgggctttccgaaaaggtatcacatgcgaagtttcgcctcacaatctaaaagttatatagtcatacatttttaacaaaacaaatagagaaaaaccgaaaaaaagaatgatacaacacaacgactttcccggaggtcacccatcctaatactattctcgcccaagcaagcttaactgcagagtattgatgggatctgatgcataagtgctgatatgatcgcatccgttactacatgcaatgcaatcgtatctattcgtttttgaagactttatgatccatttgccgtgggtcccaccagctatgtaggaataccctatcttgtttataagagctttgatacatgcaaaaaattggaaaacaatgtctgaacatataatttttgtcccgtaatatagcaaagatcacgaaaaggatagaaaaagtacattaaggtcaaaattttgagtagaaaaaaaatcaatagaaggattccaatttccttgctcattcatatagctctctttgggctttccgaaaaggtatcacatgcaaagtttggcctcgcggtctaaaagttatagaggtatacttttttaccaaaaaaaaagaagaaaaaaaccaaaaaaaagagggattcaacacgaggactttctgggaggtcactcatcctattactactctcgcccaagcacgcttaactgcggagttctgataggatccagtgcattagtgcgggtatgatcacatccgttactacatgcaatgcaatcgtatatattttttttgaagactttatgatccatttgccgtgggtctcaccagctatataggaataccctatcttgtttataagagctttgatacatgcaaaatatttgaaaacaatgtccgaacgtataatcttcgtcccgtaatatagcaaagatcactaaaaggctagaaaaagtacattaagatcaaaattttgagtagaaaaataaacaatagaaaaattccattgtccttcctcattcatcggagagttctctttgggctttccgaaaaggtatcacatgccaagtttggcctcacggtctaaaacttatagaatcatacattcttaacaaaaaaaaaagagaaaaaccgaaaaaaagaagaatttaacacaaggactttccaggaggtcaaccatcctagtagtactctcgcccaatcacgcttaactgcagagttctgatgggatccggtgcattagtgctggtatgatcgcatctgttactacatgcaatgcaatcgtatctgttactacatgcaatgcaatcgtatctgttactacatgcaatgcaatcgtatctattcttttttgaagactttatgatccatttgccgtgggtcccaccagctatgtaggaataccctatcttgtttataagagctttgatacatgcaaaatattcgaatacaatgtctaaacgtataagtttcgccccgtaatatagcgaagatcacgaaaaggcccgaaaaagtacattaaggtcaaaatttggagtagaaataaaaaccaatagaagaattccaatttccttcctcattcattggagagctctctttgggctttccgaaaaggtatcacatgcgaagtttggcctcacaatctaaaagttatatagtcatacatttttaacaaaacaaatagagaaaaaccgaaaaaaagaatgatccaacacaaggactttcccggaggtcacccatcctaatactattctcgcccaagcaagcttaactgcagagtattgatgggatctgatgcataagggctgatatgatcgcatccgttactacaagcaatgcaatcgtatctattcgtttttgaagactttatgatccatttgccgtgggtcccaccagctatgtaggaataccctatcttgtttataagagctttgatacatgcaaaaaattggaaaacaatgtctgaacatataatttttgtcccgtaatatagcaaagatcacgaaaaggatagaaaaagtacattaaggtcaaaattttgagtagaaaaaaaatcaatagaaggattccaatttccttcctcattcatatagctctctttgggctttccgaaaaggtatcacatgcaaagtttggcctcgcggtctaaaagttatagaggtatacatttttaccaaaaaaaagagggattcaacacgaggactttctgggaggtcactcatcctattactactctcgcccaagcacacttaactgcggagttctgataggatccagtgcattagtgcgggtatgatcacatccgttactacatgcaatgcaatcgtatatattttttttgaagactttatgatccatttgccgtgggtctcaccagctatgtaggaataccctatcttgtttgtaagagctttgatacatgcaaaatattcgaaaacaatgtcagaacgtatgctttttgccccgtaatatagcatagatcatgaaaaggccagaaaaagtacattaaggtcaaaattttgagtagaaaaaaaaacaatagaaaaattccattgtccttcctcattcatcggagagttctctttgggctttccgaaaaggtatcacatgccaagtttggcctcacggtctaaaacttatagaatcatacattcttaacaaaaaaaaaagagaaaaaccgaaaaaaagaagaatgcaacacaaggactttccatgaggtcaaccatcctagtactactctcgcccaatcacgcttaactgcagagttttgatgggatccggtgcattagtgctggtatgatcgcatctgttactacatgcaatgcaatcgtatctattcttttttgaagactttatgatccatttgtcgtgggtcccaccaactatgtaagaataccctatcttgtttataagagctttgatacatgcaaaatattcgaaaacaatgtcagaacgtatgctttttgccccgtaatatagcatagatcatgaaaaggccagaaaaagtacattaaggtcaaaattttgagtagaaaaaaaaacaatagaaaaattccattgtccttcctcattcatcggagagttctctttgggctttccgaaaaggtatcacatgccaagtttggcctcacggtctaaaatttatagagtcatacatttttaacaaaaaaaaaagagaaaaaccgaaaaaagagggatggaacacaaggactttccgggaggtcacccattctagtactactctcacccaagcgcgcttaactgtggagttctgatgggatccagtgcattagtgatggtatgatcgcatccgttactacatgcaatgcaataatatcttttcttcttgaagactttatgatccatttgtcgtgggtcccaccagctatgtaggaataccctatcttgtttataagagctttgatacatgcaaaatattcaaaaacaatgtccgaacatataattttcgccccgtaatatagcaaagatcgcgaaaacgccaaaagagtacattaaggtcaaaatttggagtagaaaaaaaacccaatagaagaattccattttccttcatcattcaccagagagctctcttttggctttttgaaaaggtatcacatgccaagtttggcctcacggtctaaaagttatagagtcattcattttaaaaaaaaaaatagagaaaaaccaaaaaaaaaaagagggatgaaacacgaggactttccgggaggtcacccatcctagtactactctcgcccaagcacacttaactgcggagttcttatgggatctggtgcattagtgctgctatgatcgcatccgttactacatgcaatgcaatcgtatctattcttttttgaagactttatgatccatttgctgtgggtcctgatatgtctataatttacatcttttcagtgtccattcatcaccgttttgagtccagttttgtatcattcatcgctgttttatatcatttctcatcattcttgcatactttgcatgattaggatagttttgcatacatattgcatttctaagttgttttcaggtgatttggagctgtttgcgagcaaattggaagaaacgagccagaaccagaagacatactcgaccaccaggtcgtgtgcatccagcaccatactcgaccccctggtcgagtgactttggagccattcttcccatctactcgaccccctagtcgagtatcctcagctcaggctactcgatgacgccatcgaccccctggtcgagtatcacttcgccacaccacctgaccacactcggccattcactctaccaagttagtcgaccccctggtcgagtatcatcactcaccaccatcaccatcactcgaccggacactcgatcacgtcttcacagtctactcaaatccgcactcaaccagacaagctgagcacaaggaagagaagaggagaagacaaagtgtttggaagcggcctggacctccatcggatcacaaagcccatctcggcccattatcactctattggtcgggcgattaggttattggcccgtctactatcattttgttttgtataaatagatgtcttagggttctttcctgagacatctagtcgacattgagtttttgtttcagttttattttctattttactcttctgcgccgcttttgcttctacaacctataattcgagatttttccaagttattcagattctgcatttgattttatctatcatcctgtttctctactctttatctctttacttatgcaatattatcatttatctgcgtttatgtctttgagcatgttgtctgagtagtgacatagaattcttagggatgggatagagtagttgtggaatccgtagtctgtagaatggttaagttttagaattgattgaatcccttcaggactagttgcgtttactgcttatttctttctgatcaactggaattcgatcccaagcattctcgcacccagaaggtgttcgatggaatgcttgatccactagttcctgagatattcgtctctatcccaagggattgggcgtttagagcgtttattgactttatcagtctgttcttattgcctgcatagttagattgcgttaatgggaattagtctgggctagctttgcttgaggatttctatcacagaagtgaattgatttgttgttgaacctattgtctagggatagcttgattgcgcttgttaaccattcgaatatgctaggatatgataaggtctgaccctatcgaagacaagaaaaagactaagagtgataaaataacaagataataggaaatgcaccttgaacggcggagagtgtagatgagagagagaatttcaagattaatgttgttgattgtttattttgataacaaaaccctaaaagggaaggttccttaaatagcatctactgagactcaatacaaaacgcagcatttcgataacccaaaagtaaaacgacacagttggcgagctgtctttctgtgccgagctggcgagctgtctttctgtgccttagccacttttaaatagaagcttcctcaggaacttctcacgagctctgcctttccttccatttgatttcgcccttcttctcacaccagccaacgtcacctgtaacctatcaatgctcccgcgcagaagactgaccttgtcctcaaggtcgaagtccgggtactgctgcaccaaagtgaggagcggctcccaagttgattccaaggttgataatccagaccactgtaccagcacctctggtcctgaatttgtgttgctctgtcggatatctagcagcttctcaggtcctgtgttccattccagtgtgggtgatagtatcttgggaagttcctgcggggtgaatgacggaggtacagcccttttcagttgagagacatggaacaccgggtgaattgtgctgtgttcgggtagttggagcttgtaagcgacctgacctatgcggtgcagcactttaaatggaccgaagtagcgctgggacagcttttcattcttcctatgagccacagaactttgcctataaggacgcagcttcaagtaaacccattcatcaatttcaaacgctacatcacgtcgacttttatcagcagcctttttcatttgagcttgagctatctccaagttctctcttaattcaaccagcattccatccctatccttaagtaactcctctacattcgcattattggttggaatatcgccatacctgagcagaactggtggttctctaccatagactgcttgaaagggagtggttttggtggctgaatggtacgaggtgttgtaccagtattctgcccaaggtaaccactgaaaccacgatgtaggcctcctccctgcaaagcatcgcaaataagactcaagacatctgttaacaacctcggtctgcccatcagtttgtgggtgataggctgtactcttctgtagccccgtgccctgcagcttaaacaactcagaccagaatccgctcaggaaaatcctgtccctgtccgaaaccagtgtgtttgggaagccatgtagcttgactacatctcttatgaaggcctcaactacagtcttggcagtgaatggatgtttaagtggaatgaaatgactatacttacttaatctatccaccactaccaatatacagttaaacctgttagagcttggcaacccttctacaaagtccaagctgacatcactccaaatctgttgtggaatagggagaggtgatagtaaaccggctggagagagggtagagtatttattctcttgacagatttggcatcccttgatgtagttaaccacgtctttccgcaaccctctccagtatacttcacttgtgagtcgtttgaatgtcttaagggcaccttcatgacctccaataggactggtgtggaacttctctagcatctttggaatgaagggagatcctacaggaattaccaaacagccttttctgtaaatcaagccatctgccacagtgaagtcagaatcatggtggtccccttgtgcccagttcttaagtatctggctcaactcatgatcctgctgaatttctgcctttagtgcagtcaagtcgatagtaggaggaccagttatagtgagctgtgagagagcctcagttggaggtctccttgagagtgcatcagctaccttattgtcaactcctggtttatattcgatcctatacttcagtccactcaacttagacgcccatctctgctgtattgtggacaccgacttctgttccaacaaatgtctgaggctgcgttgatctgtcttgataatgaattctttacttgataggtaatgcttccactttgtgacagctttcactatggctaacagttcacgttcataaactgaccttattctgccttgactggagaaggcttggctgagaaatgcaataagcctcttattctgtgacagtactgctccaatccccatccctgatgcatccgtttccacagtaaactcctgctggaaatctggtaacactagcacaggtagtgctgaaacagctgctttgagagcctgaaatgcagaagtagctgcctcattccaatcaaaactgttcttttttaactgatctctgagtggtctggcgatttggccgtaattcttgacaaatcggcgatagtagccagtgaatcctaggaagcctcttaactcagtcacagatttaggtaaaggccactggagcattgcttccaccttttctggatctgttgcgactccttgctcagagataatgtgtcccaaatatgagatcctagtgcttccaaatgtgcactttttaaaattggcatagaactgatgaagatgcagtagctgtaagacggtttccaaatgcttcaaatgtgtcttcatatcaggactataaactagtatatcatcgaagaaaaccaagacgaactttcgcaagtatggcctgaataggtcattcatgacgctttgaaaggtggagggggcgttggtcaagccaaatggcattaccagaaattcataatggccctcatgtgtcttgaaggcagtcttctccacatcactcagtttcatccttatctggaaatagcctgatttaagatccaactttgaaaacactgtggctcctttcagttcatccaatagctcttctataacaggaatcggatacttatcgggtattgtagcttcattcaatgctcgataatcaacgcagaagcgccatcctccatctttctttttcactaggagaactggacttgaatatggactcacgctaggtcttataatctgagcattcaacatttcacgcacaagcttctctatctcattcttttgagcaaaagaatacctgtatggtcggatattgactggtgaagacccttcttgtaaggtaatggcgtgttctctgttgcgaactggtggcaatagctgtggagtttgaaaaaccccttggtactgatccaaaagcctctggattgcaggctgcaaggctgtttgctcttcctgtttcttgctttcaaacaaagatgctagttccaagagatatgcagttccagtgtatttgataactctttccatagacctcatcgaaatttgtcctctacatagatccgggtcgccgtataaggatacccatgtgcgacctatctgccaactgatcctcaaatctctccagttggctcttgtttctcctagtcctgccaaccaagaaaatcccagaaccaaatccaaatctcccaagtcaaataagtagtagtcttgtacaaactcaattccttggacctctagtggtatatcgacacacttcccactacttttgatgattctgcctccaccaactttaactccaaaactgcgagtttgagtcactaaccatcctttctctcttaccaaagcctcactaatgaagttgcaagttgctcctgaatcaaccaataacaccactttggtgttgccaatgtatcccctcattttcattgactgctcttgagactcatcattcaaggagctgagtgtcattaccttgaaaccttctgcaggttctggatccccttcttcttctgtcagtggttcattcaactcttcaattagaggactctcctcttcaacctcttctgttatggctagacccttgagcttttgtggtttgcatttatggccttgaaaccatctatctccacagtagcggcacgggtttgagttcctggcttccccactgcctgaagcacgagttgtatccctactaggaatgaagggttgtctcgttggagcacggtctaccactctagatcctgtggagacctgattgttgaatggagctgtgttggttctagcttgatttcgcacttggtaactaacagcattccgctcttgtgactcaatgagtttagctatctcaacaatatctgcaagattcactggcctacagcgaactacctggtctcgaagacttcttctcagtccattgaggaatgcagattccaatatgtcagatgtgacatggggtaagtcgactgtgagctcttcaaaacgttctctgtattcctccacggttcctgtttgtctcacgttgaggagatgatccacagcagaactgcctctgcttggtcgaaaacgtaacatgaacttttcttgaaattccctccaggtatagatttgttctctgtccttagagcagcgccaccatgtaactgatgctcctgttaaacaagacacagccttttccagtttttcttcctctagggtgcgattggataagaagcactgttctagccggaacaaccaatcgtcggcattgcctccttcataagccggataatccacagtcctacgcggggctgcttcaaaccgaggttgatgtggcgcagattgaggcggaaacgtttgtgtttggaaggttggagtagtctgaaaccccgtggaaggattagatggaaaacctgaagatgatggaagacccgtggaggcattcagctgaaaccctggtggttctaatggtgacgagtgaaagcgacgcggttcgaagggtgaagctggaagtcgaggtatctctgaagtcgacgcctggtatcgcgactggtcaaagagtaagggccgagggtgtgtgtcccgttgatttgtgccggaaaacagagtctctctgttctgtacctccaagtgttgaggatgagaggtgtagactggtaacgccggagctggagaagaaaaacggactcctctattcggtccttccagatgttgtgggtatgaagcttgtaaaggcagtgccggtgtcggagtggagaaccctatcggagctgcacttccctcacgcgtaaccccaaagatctgatttctaaggatctgggttagagcctctctgacataagtcatctctttctccactttgtctactcgtgtgtccaaatgtggagctggcggaggttcctcaggtggtggtgttgttgtcgagccgagttcaggtgactcgacggcggtatcagatgcggtggctttaggtaacggtggagccatcggtctctccaatgaagaagcaccaatgataaggtctgaccctatcgaagacaagaaaaagactaagactgataaaataacaagacaataggaaatgcaccttgaacggcggagagtgtagatgagagagagaatttcaagattaatgttgttgattgtttattttgataacaaaaccctaaaagggaaggttccttaaatagcatctactgagactcaatacaaaacgcagcatttcgataacccaaaagtaaaacgacacagttggcgagctggcgagctgtctttctgtgccgagctggcgagctgtctttttgtgccttagccacttttaaatagaagcttcctcaggaacttctcacgagctctgcctttccttccatttgatctcgcccttcttctcacaccagccaacgtcacccgtaacctatcaggataccactctactcgattaccccatccttaggaatttctcgtctatactatttctctgttttatcgttatcgcttaatcgttctcattgcctgtttcttagtttttacaattactcgaccaacttactcgaccacacccagtgtctggcaacagactgtgcagtcgagtacagttgtctcatttcctgtctgttactcgaccagtatactcgaccacacccagtgtctggcaacagactgtgcagttgagtatatctgtttcatatcctacctgttactcgaccacatcctacttctggcatcagcctgttgtggtcgagtgattttagtaattttgttattgtttctgttttctgcatgttcacttaggactgtagaaaccccaaaactgttattgcttggcttgacttagtaacttctgatcacatctcatctgtttgcatcacactcatttggattgacacctaaaatactacaacgacatgcttggtgttttagaataattgactaaaaacatattatcaggtcccaccagatatgtaggaataccctatcttgtttataagagctttgatacatgcaaaatattcaaaaacaatgtccgaacatataatttttgtcccgtaatatagcaaagatcaagaaaaggccataaaaagtacatttaggtcaaaatttggagtagaaaaacaacccattcctcattcgtttgagagcactctttcggctttccgaaaaggtatcacatgccaagtttggcctcacggtctaaaagttatagagtaatacatttttaacaaaaaatatgagaaaaatcgaaaacaaaagagttatgcaacacaaggactttcctggaggtcacacgtcgtagtactactctcgcccaagcacgcttaactgcggatttctgatggtatctggtgcattagtgctggtatgatcgcatctgttactacatgcaatgcaatcgtatctattcttttttgaagacttcatgatccatttgttggggtcccaccagctatgtaggaatatcctatcttgtttataagagctttgatacatgcaaaatatttgaaaacaatgtccgaacctataattttctcaccgtaatatagtaaagatcacgattgtgaggcctgtttcaggattgagcttggaagaaagtgttaggacaagagtcagagttgtcaaagaaaaccaaaagtccactagatccatcaaagtaaaagaaacttctccttagaataagagtcaaagaaaagaaagagtggtttgatccaagataagaatgagaaaaaaaaataccttgagtgcaaagggtagaactaggatcatattttgggcttgatggtagtaccatctgctggtgtatacactgtctatgttattgggtagatgggatactatttttgtatgcataggttggctcttacctttagcattctccaaaacctcagtccatttcttttgagagtcccctgttactaaacttgaacaaccagaaagggatcatctttgtctcctgaccttcaccttagccaaatgagttcattgatggtgcattgcctgattcacgttcctaaactaatgaatgttaaagggattggtagatttgaaatcatgtgtaggtcgagtataagagtgagatttaactataataaggcatggctaacgtttttgagtagaattccatcatatcgtatcctagaactgtcattttggacattgattttatctgatttatttgatgatttggttctggatccccaccttcaaacctctccttcagcttatgtctacttgtttgcttgagggcaagcaaagactaagtttgggggagttgatatgtctataatttgcatgttttacacatcctgttttcaccactttgagtctagtttcatccatctttcatagcattcatcatcattcttgtacattttgcgtctttagtcgagtctaggactagtcttgcgtctattggtgctcagaaagaggaaaaacagaacagaaagtcacatttccaccaacatactcaatcaccagtaggagagagggaagcagttagctcaacagtccatccagacacttatactcgatcgcagaggagaggagtcaatcccaactgcagttctactcgatcacagagttgaaggagtccatcctgaaaattctactcaatcgcagaggcgaccatgcagtccactttgccagtccaccaattctactcgatcgcagaggagaagaaccaatccatcctgacagctaacacacatactcggtcacagaggccaagaagcagcccagaccattctgtcaaccaacctactcaaccaccacctcgaccctttgatcaatccgcactcaaccagacaacctgagcaacggaaagagaagagaagagaaggcccattcgaagcccattcgaagtccatcaggaagcccactttgagtcgacactcttgatcacatcgtccatgggccgttaagtgggctcgaaacccgctttcttatcttagtataaataagtctcaaagggtttcgccttgagacatacactttgagagacacgaattttgcactagtattcagcagccacttttcattcctgcaactttgtatttcgatttttcttctaagttattcagattttgatttcatttgcttgttcatctttgtttcattccctttaatatttttagtatgcaatattcaatcgtttctatgttgttgtctttaagcatgttgtctgagtagtgattagagtttctaaggatgggatagggtagctgtggaacccctggtcgaatctgttggttaagtgtagatttattgaatcccttctggattagttgtgtttactgtttattcctttatgatcaactggaatccgatcccagacgttccagcgcttagaaggcgttttatagaacgttgcatctactaattccagtgataatcgtctctatcccaagggattggccgtttagagcggttattggctttaacagtcggttcttattgcctgcttagttagagatcgctaatgggaattaggtcagtgtctagctatgcttgagaatttatatcacgggagtgtattaatctgttgttgaacctgttgtctagggatagcttaattgagatttgttaaccaactgaattgattagggagaccacactattcgattaccccatccttatgagtttctcatccaattgatttctttgtttacttacctacttcattcacttgctattgaattttagtattttcgtgttttcaaccatcctactcgatcacaccctgctactgacagtgagactgtgtgatagagtaaactggtccatttctgcatttttactctctgtcattctattgtactcgatcacagggtcctttctgggagtcgaccctgcaatcgagtatatcagtcatttctgcgactttttactgtttactgcatcaacactaggactgttagaaaaccaaccaaattgtgcttggcatgacttagaaacttctgattatatctcatatgtctgcatcacacccatttggattgacacctaaaatactacaacgacaagattagtgttttaggattaattgagtaagaacctattatcatagttcttatacgcaatcatacacatgacatcaagtcatatttgactctaaaacactaactaagcctcttcttgcttctgaaagctttgatagtgtagctgaagtccgtatgagtcattggctttgtatcttctaacaaggaaacactatttgggctttcaagatccggttgccaatctagttcttatactcaatcatacacaggacatcaattaatatttgactccaaaacactaatcaagcttcttcttgcttctcgatggtgtagccgaagtctgtatgagtatttggctttgtatcttctaataaggaaacactacttgggctttcaagatccgattgcggttttagtttttatattcaatcatacacatgccatctagtcatatttgactccaaaacactaaccaagcttcttcatgcttcctaaaactttgatggtgatgtcgaagtccgtatgagtctttgggtttatatcttcaaacaacgaaacactacttagatttttaagatcaggttgtggttcttgtacttatactccatcatacacatcacatcaagtcatatttgactccaaaacactaaccaagcttattcatgcttctcaaggtctttatggtgtagccgaagtccgtaagactctatggctttgtatcttccaacaaggaaatacaacttgggctttcaagatgaggttgcggttcgagtttttatactcaatcatacacatgacctgtagtcatattttactccaaaacactaaccaagcttattcttgcttctcaaagctttaatagtgtaaccaaagtccacatgagtctttagctttgtatcttctaataagcaaacactactcaggcttttaagatatagttgtggttctagttcttattctcaattatacatattacattaagtcatatttaactcagaaacactaactaagcttcttcttgcttctcaaagctttgatggtctagctgaagttcgtttgagtcattggctttgtatcttctaacatcgaaacactacttaggcttttaatatcgcgttgtggttctagttttacacgccatcataaacatgacatccagtcatatttgactccaaaacactaacagaacttcttcttgattctcaaagttttgatggtgtagccgaagtccatatgagtctttggatttgtatcttctaacaaggaaacactacttgggcattcaagatccgattgcggtttgagtatttatactcaatcatacacatgtcatctagtcatatttgactccaaaacaataaccaagcttcttcatgcttcctaaggctttgatggtgatgtcaaagtccgtatgaatcttttgttttgtatcttctagcatggaaacactacttttgcttttgggataagtttcaagatctagtccaaatacttaaccatacacatgacatcaagtgatatttgatccaaaacactaaccaagcttcttcttgcttctcaaagctttgatggtttaaccaaagtccgtatgagaatttggctttgtatcttctaacaaggaaacactacttgggctttcaagatctggttgtagttcgagtttttatactaaatcatagacatgccatcttgtcatatttgactccaaaacactaaccaagattcttcttgcttctcaaagttttaatggtgtaatcaaaatctgtattagtcattggctttgtatgttctaacaaggaaacactatttgggctttcgggattaggttgtagttcgagttcttatactaaatcatacaaatgtcgtctggtcatatttgactccaaaacactaaccaagattcttcttgcttctcaaagttttaatggtgtaatcgaaaatctgtatgagtctttggtttgtatcttctaacaaggaaacactacttagacttttaagatccggttgtggttctagttcttatactcaatcatacagattacatcaagtcatatttgactctaaaacactaactaagccccttcttgtttctcaaagctttgatagtgaagccgaagtccgtatgagtcattagctttgtctgttctaacaagaaaacactatttgggctttcaatatccggttgccaatctagttcttatactaaatcatacacaggacatcaattcatatttgactccaaaacactaaccaagcttcatcttgcttcttgatggtgtagccgaagtccgtatgagtatttggctttgtatcttctaacaaagaaacactacttgggctttcaagatctggttacggtttgagtttttatactcaatcatacacatgcaatctagtcatattggactccaaaaaactaactaagcttcttttggcttcctaaggctttgatggggatgtcgaagttcgtatgagtctttggctttgtatcttctagcatggaaacactacttttccttttcagatccgtttgcggttcaagttctaatattcaaccacagacaggacatcaatttatatttaactccaaaacataaaccaagatttttcaaagctttgatggtgtagccgaagtccgtatgagtcattggcgttgtatcttctaacaaagaaacactacttgggctttcaagatccagttgcggttcgagttcttgtactcaatcatacacatgccatctaggcatatttgactccaaaactaaccaagcttcttcttgcctctcaaagctttaatggtgtaaccaaagtccgtatgaatgtctggctttgtatctgttggagtaagcttgagtattacttaagaaataagttatttagttttgagaaggattagattaaatctttgggagttatctaaagatattattaggagttatctaatattaatctaaatgtttattctagaattatctattgatctctatataagagttaccaaagttgtggttaaccttatcgttttttagagattgtgaagagatcaatagctttaggttttgagtaattttcctaaagagattaaagagagttattctttactttgagttcttaaacacatctctaaactacaattggtatcagagcttacaaatcttgagaccataaagaagaatttgtaaggagaagatatgagcaaaatagttacgtcgggaacgaaaccaaaagaaggaggaggaacttcttcgatccaatgccctatgctaactcaaacaaattacacggcatgggctatgaagatggagattgctcttcaagtacacaaagtctgggaagctattgaaacagagtcaacagaacccgttgatgcagacaagaacatcatggctatagctttaatgattcaatccatacccgaatccctagctttgcaaattggagaatttaaagtagcaaagaaggtttgggaagctattcggtcgaggaacgtgggagcagaacgagttagagaagcgagactacagactctaatgaatgactttgatcgcttgaagatgaaggatattgagaagattgatgattttgtaggaaagttagcagaaattgcatccaaatctgcagctttaggagttcaaatcgaagaaccaaaactagtgaagaagtttctctcaagtctgcctcgaaagaaattcattcacatagttgcatcactcgaacaagttcttgatcttaacacaaacggatttgaagacattgtaggacgaatgaaagtatatgaagaacgagtggtagatgatgaagaaccacaagaagatcaaagcaagttgttgtatactaatcaagattaccaaacaaatcaagagtacaacaactgctacagaggaagaggtcgaggaggacgctcttattacagaggaagaggacaaggaaggtcgaatggtggaagagatacatccaaagtaacttgctatagatgtgacaaattaggtcactacgcctctgactgcccgaatcgtcttttcaagttgcaggaagcccaagagaacgagaaagacgatacacaaactgcagatgaactcatggttcacgaagttgtgtatctaaatgagaagaattgtattccaagcaactatgaaactaacaatggagagaatgatgtttggtatctcgataacggagcaagtaaccacatgacaggagatcaaagatacttcactagtatagataattctatcaccgggaaagtacgctttggcgatgattcacggattgatatcaaagggaaaggaacgatctcgttttttgacaggaatggcgaacaaagaaaaatgtcagatgtctatttcattccagatttaaaaagcaacatcattagcttgggacaagctagagaatcaggctgtgacataagaatgaaggatgacattctaacaatgcatgaccgagagggaaaattacttgtcaaagcaacaagatcaaagaatcgacttaataaggttcggatggcaaaaagaggaacaatgtgtctatatctaacaaacctcagcgaatcaagtagatggcattcaagattgggacacataaatctcgacacaatcaagtcaatgatacaaaaggagctagtaagagggatcccacacgttaagatcgaaaaagaagtttgtgattcatgtttgtttgggaagcaatcaaggcaatttttcccgcaagcaacctcatacagagccaccaagatacttgaactcgttcatggagacttatgtggtcctataacaccaagcacagctgcaggaaacaggtacatctttgtcattattgatgatcattctagatacatgtggacaactctacttaaggagaaaagtgatgctctcaataaattcaagcgcttcaaggtcttagttgaacaagaatctggaagcaaaattcagactttcagaatagacagaggaggagagtttgtatcacatgagttcactaagttttgtgaagaatcgggtattaaaagacatcttactgctccatatacaccacaacagaatggtgtatttgaaagaagaaacagaactctaatggaaatgacaaggagtgtcatgaaacacatgcatatacctagttacttatggggagaaacagtatgacacgccacctacctgctgaaccggatagctacaagatcgttgaatgacaacactccatatgaagctttctaccaaaagaaaccaaacgtgaatcatctcacagtatttggctgcattggatacgcagaagtggagacaccacacttgaggaaactagatgacaggtcgagaaagctagttcatctaggtactgagccgggttcaaaggcatatcgtctacttgacccagtaaatcggaaaattgtggtgagtagagatgttgtattcgatgaagaaaaaggatgggattggaatcacaacgaacctaaacaagatggaagcttcagtgtcacacttggagaattcgggaatcatggtctacaagaagaagacaacgaatatggtgagacagagcaaacacagcctattcacgtgaatgaagaacaacatgatcatgaaacctttgcagaaaatgaagaagtctctgctgatcttggaacagaaagtcaacaacctaatctaagaagatcgcaaagacaaaccataagaccaaagtaccttgaagactatgcattacttgtagaagaagaaggagaaaggctacttctaatattgaataacgaaccgagcagtttcagtgaggctaaggagtccagagagtggacacttgcgtgtgaagaagagatgttttcaataacaaagaataagacatggagtcttgaagatctgccgcatggagttaaacgtataggtctaaagtgggtttttaaactcaaacgcaactcggacgggagcatcaacaaatacaaggctcgattggtcgcgaaaggttacgttttggcgctatggagtggactttgaagaagtgttcgctcccgtagctcgccttgaaaccaaacgactacttgtgaaccttgcagcatcaaatggttgggagatacaccatcttgatgtcaagacagcatttctccttggagaactaagagaaaccgtgtatgtgacacaaccagaaggattcgaagaaagaggataggaagggaaagtctataggcttcacaaagctttgtatggattacgacaagcaccgagagcatggaaccataagctgaatcagattcttacagaactacaattcgagaagtgttccaaagaaccatcagtatatcgtaaaactgtaagtgggaatatttttcttcttgtggtagtgtacgtagatgaccttttcataaccggaacagatgaaagaagtattagtggattcaagagagagatggcttctaagttcgagatgagtgatcttggaaaattgacgtactatcttggaatagaagtctgtcaacaagagcaaggaatcacactaagtcaacaccgatatgcaatgaagattttagaagacgctgggatgaaggactgtaacttgatgcacataccaatggaatctggtttgcaattgtccaaatcacatcatgaagaaggaattgatgctaccggatacaggaaaaaagttggttgccttcgctatttaattcatacaagaccggatctgtccttttgcgtgggagtgttaagtcgatacatgcaagatccaaatgaatcacatggtgctgcaatgagacaatgtttgaggtacttgaaaggtacgactacactcggtttggtatttaaacgatcaagtgaaaagataccaaagctagtaggctatagtgacagcaaccacaatgttgatcctgatgatggcaagagtacagccggtcacatttcctaccttggagagagtcccatctcgtggtgttcacagaaacaagaaacaatggcaatgtcctcatgtgaagcagagtttatggcaggaacagaagcagctaggcaagcaatttggcttcaagacttgcttagtgaagttataggagaaccaagcgagaaggtgctcataagaatcgacaacaaatcagcaatcgcccttaccaagaatccggtcttccatggctgaagcaagcacattcataggcgttaccacttcataagagaatgcgtcgaaaatggacaagtggaagtagagcatgttccggggaatgagcaaaaggcagacatcctaactaaagcacttgggagaatgaagtttaaagagatgagagatcttatgggtgttcaagaagtgaagaggagtgatctcaagcttaaaggggagattgttggagtaagcttgagtattacttaagaaataagttatttagttttgagaaggattagattaaatctttgggagttatctgatagtagttttttatggtcaattatcctaaaacaccaatcatgtcgttgtagtattttaggtgtcaatccaaatgggtgtgatgcaaacagatgagatgtgatcaaaagtcactaagtcaagccaagcaataacagttttggggtttctaacagtcctaagcgaacatgcagaaaacagaaacaataatagaattactaaaatcactcgaccacaacaggctgatgccagaagtaggatgtggtcgagtaacagacaggatatgaaacagatatacttgactgcatagtctgttgccagacactgggtgtggtcgagtattctggtcgagtaacagacaggaaatgagacaactgtactcgactgcacagtctgttaccagacactgggtgtggtcaagtaagttgatcgagtaattgcaaaaacgaagaaacaggcaatgagaacgaataagcgataacgataaaacagagaaatcagatagacgagaaattcctaaggatggggtaatcgaatagagtggtatcctagcctatccgaatggttaacaagcgcaatcaaggtatccctagacaacaggttcaacaacagatcaattcactcccttgatagaaatcctcaagcaaagctagcccagactaattcccattaacggaatctaattatgcaggcaataagaacagactgataaagtcaataaacgctctaaacggccaatcccttgggatagagacgaatatctcaggaactagtggatcaagcattccatagaacaccttctgggtgcgggaatgcttgggatcgaattccagttgattagaaagaaataagcagtaaacacaactagtcctgaagggattcaatcaattctaagacttaaccattctacagactacggattccacaactactctaacccatccttaagaattctgagtcactactctgacaacatgcttaaagacaataacatagaaacgaaagatgaacaagcaaatgaaagcaaaatctgaatgacttagaagaaaaatcgaaatataaaattgcaggaatgaaaagcggctgctgaataatagtgcaaaattcgtgtctctaaaagtgcatgtcccagggcgaaacccttagagacttatttatactaaaataagaaagcgggcttcgagcccacttaacggcccatgaacggcgtgatcaagagtgtcggctcaaagtgggcttcttgatgggcttcgaatgggtttcgaatgggcttcgaatgggccttctcttctcttctcttttcgatgctcaggttgtctggttgagtgcggattgataagagggtcaaggtggtggtcgagtaggttggttgacagaatgatctgggctgcttcttggcctctgtgatcgagtaagtgtgtcagcagtcaggatgtactggttcttcacctctacgatcgagtataactggtggactggcaaagtggactgcatggtcgcctctgcgatagagtagaattgtagaatggattgcctcctctcctctgcggtcgagtatatctggcagaatggactgcctagtctcctctatgatcgagtagaagtgtctggatggactgcttagctgactacttccctctcagctactggtgatcgagtatgtttggtggaagtgtgactttctgttctgttttccctctttctgagcaccaatagctccaaaacacctgaaacaactccagaatgtagaatgtatgcaagattagtcctagactcgactaaagatgcaaaatgtacgaaaatgatggtgaatgctatgaaagatggatgaaactagactcaaaatggtgattaaaggatgtgtaaaacatgcaaattatacacatatcaactcctccaaacttagtctttgcttgccctcaagcaaacaagtagacataagctgaaggagaggtttgaaggtggggattcagaaccaaagcatcaaataaatcagatagaatcaatgtccaagttggcagttctaggatgccatattatcgaactctactcaaaaacgttagccatgccttattatagttcaatcccactcttatactcgacctacacatgctttcaaatctaccaatccctttaacattcattagattaggaacgtgaatcaagctatgcatcatcaatgaactcatttggctaaggtgaaggtcaagagacacagatggtccctttctggtggttcaagtttagtaacaggggactctgaaaagaaatggactgagctttaggagaatgctaaaggtaagagccaacctatgcatacaagaatagtatcccatctacccaaaaacatacacagtgtatacaccagcagatggtactacccttaagcccagaatatgatcctagttctaccctttgcactcaaggcatttttttctcattcttatcttggatcaaaccactctttcttttctttgactcttattctaaggagaagtttcttttactttgttggatctagtggactttggttttctttgacaactatggctcatgttatcttcttgtgatcaagacttttctagactttttttcttttgttgtgagcctattttttttttagttccccaaaatccattactagactaacttgtttctcaacttccttctcctaagaacatcaacatttcctttctctcttattttctcatatactcgatccccacttcaagaatagacacccaccttgtcctatctagcccagaaaacgtggactagaactacatgagacactactcttgtcggctcaaacctaacactttcttccaagctcaatcctgaaacaggcctcacaatcgcacacgatatataacagggctcgaaagaaaggtttggttaagggcaagggaaactacttcaatgatggaagcagctacttgggttagcaagggtggtgaaaagtttaaagaaaacccaagtatgtatatggtatccatgagttcaaattcgatgctaagacatgataattgcaagtcagattcaggttcaaattgatagggaatggtatcagataataacagtgtgatcgagtagagcattcaagacatggtgcagttttacttcaatttcattgactacacatcagacaactagaaacgatgaacaaaaatgcttacaaggctatctcatcataatccccaatgcatatgcgacaatcctatatgaaacatcctagactcaatcctaaatgtgatgcaactatatgaacactctgtttttgtggaatacattttcagaaatgttttcattttttttttattttttttctatgtcttagatgaagttaagactcaaatgatgcaaataagactcactagcaaacatgttaaatacttcttgaatcctcccccaaacttaaactatacagtcccttgtgtaatagaagtctaaagaagagttcaagagacactaaaacaaaacgaaaacagaaaatggtatatacaatgatggttgtgtgtgccatctcctctctggtgtaatcccatggaatactgggaccttgttgttgttcctcctcctctggtgcatgatactcgatcgcagggttcacatgacgtttggtccgacggtcgagtatattggtctgagaaatggtctaaagtgtcgccttggtgatcgagtgaaaacgggcagttgggatgcctccatggtcgagtaaacttggtgacctgtagatgttaactcggcttcgagcccacttaacggcccatggacggcgtgatcaagagtgtcggctcaaagtgggcttcctgatgggctttgaatgggtttcgaatgggccttctcttctcttctcttctctttccgatgctcaggttatctggttgagtgcggattgatcagagggtcgaggtggtggtcgagtaggttggttgacagaatgatctgggctgcttcttggcctctgtgatcgagtaagtgtgtcagctgtcaggatgtactggttcttctcctctgcgatcgagtataactggtggactggcaaagtggactgcatggttgcctctgcgatagagtagaattgcagaatggactgcctcctctcctctacggtcgagtatatctggcagaatggactgcctggtctcctctgtgatcgagtagaagtgtctggatggactactgagctgactgcttccctctctgctactggtgatcgagtatgtttggtggaagtgtgactttctgttttgttttccctctttctgagcaccaatagctccaaaacacctgaaacaactccagaatgcagaatgtatgcaagactagtcctagactcgacttaagatgcaaaatgtatgaaaatgatggtgaatgctgataagtgtgtattttgcatgttttgagcatccatttgtcatcactttagcatcatatcatcactgttttatacaatttctcatcatttgtcatcactttacaatttttggatagatttgcatgcatgttgcatatttgcgttgatttcaggtgatttggagctgttgacaagctatctggaagaagcgggcctgatcatatcaaacgacttgaccccgaggtcgattaggagcttcaagatctcaacagatcactcgaccccctggtcgagtagaggacatcactacttcaccacatcactcgaccacgaggtcgagtgtcttcatcccatcacctgaccatcactcgatcacgtcactcgaccctgaggccgagtgtcttcaccttcattgccagaccactacttgacctcttcactctacgtggaagtcgagtatcaccatcaccaccactcgactacatactcgatgacaagcttcagagccttcttcattccgcactcaaccagacactcgagcacaaggaagaaaagaagactccagctattcactcgacctcccactcgaccacatgggtcgagtacagttcttaatccgtcccaatactgcgtcgttttaagtattagggtttcggaatatttggctgtaagtagcatgtacttcacattttggcagacaagtttttatctagttttattccgtagaccttgtgttctagaccttttgtaatccagatttctctttatctatttagtattcagtattcagcttttgttcttgatttcgtttactgttgttcattctgttatcatcttgttgttacacagttgttatcatgttttcaacttgttcaacgtttatgcttactgttatgatgtctgagtagtgaataggtttctgaggatgggttagagtagtgtagaattctcaatatgctaggtgattgagtattggttgatatatcccttctggattagttgttcttaatccctattgctttctgatcaactggaatttgagcccagacatttccgcgcccaaaaggtgttcgatgaaatgtctgaaccactaattccagagtttcgtgaccctgtaccaaggtattggttgcaaggagcgttttggctttaacttgttgattcgtaatgcctgttaggttatctctcgtcaatggtgattgagtctgggactaggttaacttgagagtctctgttgcggtggcacttagatttggttaatgaacttgttgtctagggttaatttattgagcatgtcaatcacctgtaaactgaggaaacgaaactactcaattaccccatcctcaggaattctttatctgattgaattctgtgtttactccactgttatttactgcatcttgttatctgtcgcgtaatttctgcagttctttcttgttactcgaccacccaattgtctggtaacagactgtgcagtcgagtatctgtattttattttctgtctgttactcgacctgtcactcgacctcacccagtgctctgcaaagagctgtgttggtcgagtgttttactgtttctgcttgaatttctattttctccatgttcacttagaactgctagaacacaccacaacctgttattgcttggcttgacttagtgacttctgatcacatcttgattgttagcatcacacccatttggattgacaaccttcagtattacaacgacatgatagtgctttaggtttaattaattaaaaacctattatcaaatgctatgaaagatggatgaaactagactcaaaatggtgataaaaagatgtgtaaaacatgcaaattatagacatatcattacctaaagatattattaggagttatctaatattaatctaaatgtttattctagaattatctattgatctctatataagagttaccaagttgtggttaaccttatgggtttttagagattgtgaagagatcaatagctttaggttttgagtaattttcctaaagagattaaagagagttattctttactttgagttcttaaacacatctctaaactagaaacacatctctaaactagagtatcttctaaaaaagaaatactacttaggcttttaagatccggttgcggttctacttcttatacccaatcaaaaacatgaaatcaagtcatatttgattccaaaaaactaaccaagcttcttctttcttctcaaagcattgttggtgtagctgaagtccgtatgagtctttggctttgtatcttctaacaaggaaacactacttaggattttaagatcgggttacagttctagtttttatactcaatcatacacatgaaatctagtcatatttgactccaaaacactaaccaagcttcttcttgattcccaacgctttaatagtgttaccaaagtccacaacaatctttagctttgtatcttctaacaaagaaacactactttgggttttaagatccggttgtggttctagttatactcaatcatacacatgacatcaagtcatatttgactctaaaacactaactaagcttcttcttgcttcacaaagctttgatggtgtagctaaagtccgcatgatttattggctttgtatcttctaacaaggaaacactacttaggcttttaagatccggttgtggttctagttcttatactcaataatacacatgacatcaagtcatatttgactctaaaacactaactaagcctcttcttgcttttcaaagctttgatagtgtagccaaagtccgtatgagtatttggctttgtatcttctaacaaacaaacactagttgggctttcaagatccggttgcgatttgagtttttatactcaatcatacacatgtcatctagtcatatttgactccaaaaagctaaccaagcttcttctggcttcctaaggcgttgatggtgatgtcgaagtccgtatgagtctttggctttgtatcttctcgcatggaaactctacttttccttttcggatccgtttgcggttcaagttctaatactcaaccatagacatgacatcaatttatatctaactccaaaacacaaaccaagattcttgttccttctcaaagatttgatggtgtagccgaaatccgtatgagtcattggcgttgtatcttctaacaaggaaacactacttgggctttcaagatccagttgcggttcgagttcttgtactcaatcatacacatgacatctaggcatatttgactccaaaacaataaccaagctttttcttgcttctcaaagctttaatggtgtaaccaaagtccgtatgaatgtttggctttgtatcttctaaaaaacaaatactacttaggcttttaagatccggttgcggttctagttcttatacccaatcatacacatgacatcaagtcatatttgactcgaaaacactaaccaagtttcttcttgcttcgcaaagctttgttggtgtagctgaagtccgtatgagtttttggatttgtatcttctaacaaggaaacactaactaggcttttaagatcgggttgcagttccagtttttatactcaatcatacacatgacatctagtcatatttgactccaaaacactaacaaagcttcttcttgcttcacaaagctttaatggtgtaaccaaagtccgtatgaatgtttggctttgtatcttctaaatactacttaggcttttaagatccggttgcggttctagttcttatacccaatcatacacatgacatcaagtcatatttgactcgaaaacactaaccaagtttcttcttgcttctcaaagctttgttggtgtagctgaagtccgtatgagtctttggctttgtatcttctaaaagggaaacactaactaggttttaagatcgggttgcagttccagtttttatactcaatcatacacatgacatctagtcatatttgactccaaaacactaaccaagcttcttattgattctcaacgctttaatagtattaccaaagtccacatgagtctttagctttgtatcttctaacaaggaaacactaatttgggttttaagatccggttgtggttctagttcgtatactcaatcatacacatgacatcaagtcatatttgactctaaaacactaactaagcttcttcttgcttcacaaagctttgatggtgtagctaaagtccgtatgattcattggcttgtatcttctaacaaggaaacactacttaggctttaaagatccgattgcaattcttgtcctgatactccatcatacacatgacatcaagtcatatttgactccaaaacaataaccaggcttcttcttgcttcccaaagttttgatggtgtacccaaagtccgtatgagtctttgtctttgtaccttctaataaggaaacactacttggactttcaagatccggttgcggttcgagttcttatactcaatcatacacatgtcatctagtcatatttgtctccaaaacaataaccaagcttcttcatgcttcctaaggctttgatggtgatgtcgaagtccttatgaatcttttgctttgtatcttctagcatggaaacactactttaaattttgggataagtttctgataataggtttttatggtcaattatcctaaaacaccaatcatgtcattgtagtattttaggtgtcaatccaaatgggtgtgatgcagacaaatgagatgtgatgagaagtcactaagtcaagccaatcaataacggttttggggtttctaacagtcctaagtgaacatgtagaaaacagaaacaataacagaattactaaaatcactcgaccacaacaggctgatgccaggagtaggatgtggtcgagtaacaggcaggatatgaaacagatatactcgactgcacagtctgttgccagacactaggtgtggtcgagtatactggtcgagtaacaaacaggaaatgaaacaactgcactccactgcacagtctgttgccagacactgggtgtggtcgagtatgttggtcgagtaattacaaaaactaagaaacaggcaatgagaacgattaagcgataacgataaaacagagaaataagatagacaagaaactcctaaggatggggtaatcgagtagagtggtatcctagcctattagaatggttaacaagcgcaatcaagctatccctagacaacaggttcaacaacagattaattcactcccgtgatagaaatcctcaagcaaagctagcctagactaattcccattaacggaatctaactatgcaagcaataagaacagactgataaagtcaataaacgctctaaacggccaatcccttgggatagagacgcatatctcaggaactagtggatcaagcattccatcgaacaccttctgggtgcgggaatgcttgggatcgaattccagttgatcagaaaaaaataagcagtaaacacaactagttctaaagggatacaatcaattctaaaacttaaccattctacagactacggattccacaactactctatcccatccctaataattctaagtcactactcagacaacatgcttaaagacataaacgcaggtaaacgataatattgcataagtaaagagataaagagtatagaaacaagatgacagatgaaatcaaaagcggaatctgaataacttggaaaagtctcgaattacaggttgtagaagcaaaagcggcgcagcaaagtaaaacagaaataaaactgaagcaaaaactcaatgtcgactggatgtctcaggacagaaccctaagacatctattaatacaaaacaaaataaaatgatggtaaacaggccaataacctaattacccggcccatagaaagataatgggccgagatgggcttcgtgatccgatggaggtccaagccgcttctaaacactttgtcttctcctcttctcttccttgtgctcagcttgtctggttgagtgcggatttgagtagactgtgaagacgtgatcgagtgtccggtcgagtgatggtgatggtgtggcgaagtgatactcgaccatggggtcgagtgatgtggtagagtgaacggtcgagtgttgtcaggtggtgtggcgaagtgatactcgaccatggggtcgagtgatgtggtagagtgaacggtcgagtgttgtcaggtggtgtggcgaagtgatactcgaccaggggatcgagtagtgtcattgagtagcctgagctgaggatactcgaccaagtggtcgagtaggtgggaagaatgactccaaagtcactcgacctgggggtcgagtatgtcttctggttctggctcgtttcttccaatttgctcgcaaacagctccaaatcacctgaaaacaactcagaaatgcaatatgtatgcaaagttatcctaatcatgcaaagtatgcaagaatgatgagaaatgatataaaatagtgatgaatgatacgaaactggactcaaaacgatgatgaatggacactgaaaacatgcaaattatagacatatcaactcccccaaacttagtctttgcttgccctcaagcaaataagaagacatagttgaaggagaggtttgaaggcggggactcagaaccaaagcatatgttagagcaaataaaatcaatgtccaaattggtagttctaagatgcgatatgattgaattttactcaaaaacgttagccatgccttgttatcaatcaatccgtctcttatactcgacctacacatgctttcaaatctaccaatccctttaacattcattagttctggaacgtgaatcaagcaatgcatcatcaatgaactcatttggctaaggtgaaggtcaagagacaaagatggtcccttacagaataggcttaagtaacaggggatccctcaagaatgattgagctttagtagaatgctaaaggtaagtcccaagttatgcatacagagataagatcccatctacccagagtatagcaatgaagttctaatggtaatcccaactcctgtcccaacttaactctaccatttgcactcatgaatctttcaaactctttttcatatcattcttttattttctcttaactctaggagaagctttctcaacactctgatacatctagcggatttggatttctttaacaactaaggttcctgttttaaatctttaaaaccaaaggcttttaacccttcttctttagctaacaagaacctcattcttttctttaacattcccaaaacctttactagatttttttctaacttctttagcttacttcccctagaattctttccctttccttatcaacaataaattcacccttttcttttaaagacatcccaacccatgatataagcgcccacctagtcctatccagtccgaagaacgcgaactagaactacatgagacactatctctgtcgttacgaagctaacactttttaccaagctcaatcgaaataagacctcacaaacactcacaagtgatatagggcttgaaagaaagttcatgtttgggttcgggttaactgctctaataaggagagtcagctatttggatcaacaagagtggttaaaaggagtaagaaaatccaagtattttagggtatccatgagttcaaattcgatgccaagacatgataattctaaatcagattcaagttcaaattgatagggaatgatatcagatcctaacagtgtggtcgagtagagcaatctaggcatggtgcagttttacttcaatttcaatgacaacgcatcaaacaactaacaacgagggcactgagcttatctggtgaaccaaaatgcttacaaggctatctcatcattatcccctatgcatatgcaacaatcctaaacgaaacactctagactcgatcctaaatgcaatgcaactacatgaacactctatttttgtgaaatcattttctgaaatttttcaatttttttggttcttttctatgccttagatgaatgcagactcaagattatatacaatgcaatacacactttctgagccctcccccaaacttaaatcacacagtccactgtgtgaccaaatttggaagagagtacttaggacaaaacacatcacaaaaacaaaataaaaacaagagatggtatattacaatggtggagtgaggtgcatacctcagtggaagaaggagcgaagttggtcgccaatagctgcctgtgattgctcccaggccatcgaagaatctccctgctgtgtctcagcttccccctgggggtactcgacctctgctccttcgtcgcggccagcaccgctctgatgatactcgacctctcttcttctgctgcggccagcaccgcggtcgcgtaagctacgggactggagaagtcgtgtactcctgctgccagaccgagcgagtgcagccttcttctttctcccgagctcccgaggctcgaatgatgaatgccttgcagggactggtgggactactcggtcactaggctcaggcttgtggtgacttggctcaggcctgtgatgacttggccctggcgcgtcatatctcctcgaaggcatgtcctgaggacgctctccctgcggaatagctgtggtagaagagaagcagctaagcttgtctgtcagaaacgtgatggctttgaagcacttgatgagtagcctatcttgtttcttgcaccacctctgcaacttactgttgtttctgtgagcttcactcaagctcttgctctcccgcgctggaggtacgtgctctctgaaatgatacatgctcgtatcgtactcctcctccctatcctcatccgtctcagcaatatcatcctctatagcttccgtcgtagggacattatcatcagtcggtggagcgctctcaaagtagaggtaatcacgtgcaggtttgaagtcaatgttcctaccctgaagtatggtcgtggcctcgatgcagggaagcaaaatgttggctgttcggatcagggagtgctcgaatttgtagcgatagaaatcgccaaccatatcatactccagaaactcacaacaacgcaagtgatctaaatccatcatcctcggatcaaaccttggagacgtgagaggtacaccacatgcaatcagaatcggtgtcacaacgccacctacacaaagggctcctcgcaccttcttcttcccgttggtgtgcgcccacttcctgtatccacataggtggatcaacagaagcataaccggtggtgcatcattaaggtcgccctttaggaccttcttcccctttgttctccggagaatgcccttgagtggagaatcaatcatctccatgtctgtgttaaacacggtgcctgtagattccctggggtacagaacattcgctactgagcgctgatagtagcggatcacagggctacgaatctggttgctcttagaccttgcaaagttgagcgccaaatcgttcccaatggttaaccacaaatccttcaactcttccctctcgaacttgggtttagttccctttccactgggaaaaccaaataatccttccaagctcttgatagatagctggtaacgctgctcgttcactgaaaaagtcaagaaccccaacccttcactctccagctcatctgctgtaagtccctgatacatctccacttgcagagtgaagagaaactctattgtttccttcttgtaagcgacgtacgggtaagacatcagcgtctccagatggcacttctcgaataagtgatgtacgtcctccagtagccccagctatgctaaagtctcataacaggggtacctcgttccccagaagtcgttcatcaggcttgttcaacagcttcgtttctctgtgccatgactcaggctcatactcgacgtcaatatcttcgtcgatcaactcatatctgctggtcattgctctctttctctagcaatctcagctctcttctcattgcgtcgagctactgagcgttgggtctcagctctaaagctctcataagcctgtcgctctctctctggtccagttgaccaagattcagcttcatcgacgttgtaatctgcatccatggaggattcgccactgtagttactcatattgatttcctgaaaaataatgtaacttaaaaccaaatatcaatatgttagtccaaataaacacaaacactaaaccaatcaagttcacggtcgagtaaccggtcgagtatagtcaaattgtgtgttcaaattttgtggtcgagtggaagagaatgagaaacggtgactgtgtggccgagtaaatgtcgaatggagagaagacggtggcggtttgaggagcggtcgagtgaagagatgaacggaggcgaagtgaatggcgaggtcgagtgaacggtgagaacggagagttgagagaaagagatcgaagtagaggctgaggtgctcttgcggtcgagtgaatgggaggcgagatcgagtgaggaatgttgaagttggagcggcgagatcgagtgaaaaggaggcgacggtgagagtccggcggagtgaagggcggagtggtcgagtgaacgacgagaagctccggcgaagtcgagttagcttgcgagaacgagagagagaaactctggccgtttatcgaaaatcgaatgaagagcctctttgtccaaattgcgatgcggtcgagtgaaagaagtcgagtagcggttgagtgaagatgaaacctgtcccgtcgtcgagtgaatgagagagagagggcggaggcgtgagcagtgagagctgggacgacgaggtcgagaaagcggcggatggagaggagggcgttgcaatcgagtaaatgggaggcggtgcgagagatgacgagtgaggtttggtcgagtgagagggtgacaaagcagcgagagatggtgaagccggaggggagagatcgagtgaacggtgaggtcgagtgtgatggtgcggtcaagtgcttggagaggaagagagatggtgaggtttggtcgagtgagaaacgtgaggtagagtgaatcttcttggtcgagtgtttggagagggagagagatgatgtcggtgggagaggatagggatagagtgagatcgagtggttgggaaagagggaagagattttgttatctctaaaaacgcgtgggggaacaaaggtgagaggtggttggccacgctctgtctgtttgtcctgaagcgctgttctctgttgactagaaccttctgtaatcctctgtaaacttgttaaactccctgcaagtctctgtagcttctgttggtcgagtatagatatgatttaaaaattttgggtttttttaaaatcatcactaatactcgaccaaacttactcgacctcatggcctcttagtgcaacaaaagtttttcaaactcttgaatttctgacatactcgttctcctgttgctctgtagagtaaaatttttaaatttttactctacctccacgctgtttctctgttcctgagaatcacaaacacaaccaaaaacaaatcaaaaataacaagaaaataaaagttttatttacagaaacagtcttgggaattcctcccaagtgagcttgtttaaagtctctagcttgactcctcacactcattaagaagaaaatgggtgatagagaggatcttcatagtcctctctgatctcatcatcatattcagcatcctctcttgagagatgagtagcagaatactcaattcttctttcctcgaaataggcctctttctcttctggtggataatctatctccttagaccatcttgaagtaatcttttttctcgggatagtgttattcccgcatttggattgagctatctcttgcatatgatccagtttactcttaagttcctcaactgtctgagctagcttctctatggtctcttcttgctcatcagatttctttttgagatctcgcaagttaggtgtagaggctgtgcttggtctggtgattgaattcgaacgttgaggttgagccctgatcttttcttctacagctgacctttgcgaagtttcgttgatgtcaaactgcatcttgatgtgcttcccaaggttaagacttattctcccatctctgacatctatcatcgcttccactgaggctaagaaaggtcttcctaggattagaggatccttaggttctgcttccatatcaagaacaacgaaatccgtaggcacttccactccattaatcattactggcagatcttgtagaaggtcaaagggttttcttgaagacctatcagcaaggatcaaagtcaggtcgcaaggcctgtactgagtgaattccagcttccttgccacggagagtggcattaagcttactgaagctcccaaatcacaaagacaatggctgaaaaccaattgaccaatgaaacatggtagagtgaaagttcctggatcttcctgtttttcttgaacactcctcttagcagtggtcctaaacggaatagcatcacattcgtcttctgaatcttgatgaatcttgatcctttccagaattgactttctcacatctttgtgaggatccgggattaggttgagaacttctattagaggcatcaccgcttccatctcatcaagccgtttccatctcatcaagctgcttctctgcaagagaattgtatctttctatacatgctttcctgaattttctatggaagagcacgtgaaggtaatggtgctggcttgaatcgttttaccatcctctcaatgatggctgctttctcgtctaggttggactcggtttgaaaacgggatccagctgaatggtcgagtccaaccactgaaatttcaatctgagtagaagcctccccgtcctgaacatcactgtcctcggtgattgatgtggaaacatgtcgagtaggcagctctcgatcatgacagatggtgatagcgtgagcggtggcgtattccttcgggttctgtattgactttcctggaagtcctgttacttttggagcagaagttgacgctgtttgtccttccatgtatctgaccttagaggtaagtgcctcaagtttgatattcagatcattgaaagtacaatcaaccttgttgtggatttttgccatctttttggcaagatccattgcacctgcagcttgtccctagagaatctgctgtaacatgttcttcaagtctgaatctggagttgttgaagctagttgttgttgctggtgtgtgaacctaggtggtggaagttgctgctgatagttgccctgatactgcggcttaggaacatacccctgaccttggttgtatgaacaaagggcttgggttgattttgctgctgtgaagggtagacttggtcatgcgggtttgcaacatttgtactcctgtaagacagatttggatggctctgcttgaagttgttgaaacctttgttgtaacctccttggttctgcacatagctgacctccttggttctgcacttggactgtctcatcatcacccagaaaatgaatgtgcttttgttgcacaaggagtagcttgtccagtttgtcattcatggctttcatttccctgcggtgcttctcatcagaatcagagctggtgcggatgcttctgtcataatcttcattatagttgccatccgactgagctaagttctctaccagctctcatccttcttcaacgtctttgttgaggaagttcccgttggaagcggtatcaagaagcattctgatcttgggaaggacacctctatagagagtgctgagaagtgaagctttggagaaaccatgatgaggacattgcgtctgataacctttgaagcgctcccatgcttcacagaaagtctcattattcgtttgagtgaaactggagatatcattccttagtctcgcagtcctggagtttgagaaaaacttagccaagaaggctttcttgcagtcattccaggaggtgatagagccttgaggaagtgacttttcccactgatgtgctttgtctccaagagagaatggaaacaatctgagcttgaaaccatcctcactaactccattgatctttgttaggctgtagagcctatcaaactcgtccaggtgatcgagtggatcctccatagggaggccgtggaacttgttgctctgaaccatggcaatgagaccgctcttgatctcaaagttgttgttctgcacaggtggaggcacgatgccattacgctgattctggttgcgtggtgcatcgcctgcacctatgttgtttggttgcacctgctcatcaacaactgcagccattgtctctgtttctgtctgtgttctgagttggcgtgcaatacggtcgatgttatcgttgaacaggagattctgatttcctcgtgaccgtatttgcatacaacgagtaccaacttgtaaagctggtatcgtagtacctaaatcaaaacagacaaacagaaaaaacacaaagttagtaactttcagaaaaaatgaaaaagataacagcgccaaattgataataggtttttatggtcaattatcctaaaacacctatcatgtcattgtagtattttaggtgtcaatccaaatgggtgtgatgcagacaaatgagatgtgatcagaagtcactaagtcaagccaagcaataacagttttggggtttctaacagtcctaagtgaacatgcagaaaacagaaagaataacagaattactaaaatcactcgaccacaacaggctaatgccaggagtaggatgtggtcgagtaacaggcaggatatgaaacagatatactcgactgcacagtctgttgctagacactgggtgtggtcgagtatactggtcgagtaacagacaggaaatgaaacaactgcactcgactgcacagtctgttgccagacactgggtgtggtcgagtaagttggtcgagtaattgcaaaaactaagaaacaggcaatgacaacgattaagcgataacaataaaacagagaaataagatagacgagaaattcctaaggatagggtaatcgagtagagtggtatcctagcctattcgaatggttaacaagcgcaatcaagctatccctagacaacaggttcaacaacagattaattcactcccgtgatagaaatcctcaagcaaagctagcccagactaattcccattaacggaatctaactatgcaggcaataagaacagacttataaagtcaataaacgctctaatcggccaatcccttgggatagagacgaatatctcaggaactagtcgatcgaacattccatcgaacaccttctgggtgcgggaatgcttgggttgaattccagttgatcataaagaaataagcagtaaacgcaactagtcctgaagggattcaatcaattctaaaacttaaccattctacagactacggattccacaactactctatcccatccctaagaattctaagtcactactcagacaaaatgcttaaagacataaacgcaggtaaacgataatattgcataagtaaagagataaagagtatagaaacaagatgacagatgaaatcaaatgcggaatctgaataacttggaaaaatctcgaattacaggttgcagaagcaaaagcggcgcagcagagtaaaacagaaaataaaactgaagcaaaaactcaatgtcgactggatgtctcaggacagaaccctaagacatctatttatacaaaacaaaataaaatgatggtaaacgggccaataacctaattacccggcccatagaaagataatgggccgagacgggcttcgtgatccgatggaggtccaggccgcttccaaacactttgtcttctcctcttctcttccttgtgctcagcttgtctggttgagtgcggatttgagtagactgtgaagacgtgatcgagtgtccggtcgagtgatggtgatggtgtggcgaagtgatactcgaccatggggtcgagtgatgtggtagagtgaacggtcgagtgttgtaaggtggtgtggcgaagtgatactcgaccatggggtcgagtgatgtggtagagtgaacggtcgagtgttgtcaagtggtcgagtaggtgggaagaatggctccgaagtcactcgacctgggggtcgagtatgtcttctggttccggctcgtttcttccaatttgctcgcaaacagctccaaatcacctaaaacaactcataaatgcaatatgtatgcaaagctatcctaatcatgcaaagtatgcaagaatgataagaaatgatataaaacagtgatgaatgatacgaaactggactcaaaacgatgatgaatggacactgaaaacatgcaaattatagacatatcagtttccatttctagtccaaatacttaaccatacacatgacatcaagtcatatttgactctaaaacactaactaagcctcttcttgcttctcaaagctttgatagtgtagctgaaattcgtatgagtcattggctttgtatgttctaacaaggaaacactatttgggctttcaagattaggttgtagttcgagttcttatactaaatcatacacatgtcgtctggacatatttgactccaaaacactaaccaagattcttcttgcttcttaaagttttaatggtgtaatcaaaatctgtatgagtctttggtttgtatcttctaacaaggaaacactacttaggcttttaagatctggtagtggttctagttcttatactcaatcatatacattacatcaagtcatatttgactctaaaacactaactaagcctcttcttacttcccaaagctttgatagtgtagatgaagtccgtatgaatcattggctttgtatgttctaacaaggaaacactatttaggctttcaagatctggttgccaatctaggtcttatacttaatcatacacaggacatcaattcatatttgactccaaaacactaaccaagcttcttcttgcttctcgatggtgtagccaaagtccgtatgagtatttggctttgtatcttctaaaaaagaaacactacttcggcattcaagatccggttgcagtttgaattcttatactcaatcatagtcatatttgactccaaaaaactaaccaagcctcttctggcttcctaaggctttgatggtgatgtcgaagtccgtatgagtctttggctttgtattttctggcatggaaacactacttttcctttttggatccgtttgcggttcaagttctaatattcaaccatagacatcacatcactttatatttaactccaaaacacaaaccaagattcttcttgcttctcaaagctttgacggtgtagccgaagtccgtatgagtaattggcgttgcatcttctaacaaggaaacactactttggctttcaagatccagttgtggttcgagttcttgtactcaatcatacacatgccatctaggcatatttgactctaaaacaataatcaagcttcttcttgcttctcaaagctttaatggtgtaaccaaagcccgtatgaatgtttggctttgtatcttctaaaaaataaatactacttaggttttaagatccggttgcggttataattcttatacccaatcatacacatgacatcaagtcatatttgactccaaaacactaaccaagcttcttcttgcttctcgaaactttgttggtgtagctgaagtccgtatgagtctttggctttgtatcttctaacaaggaaacactacttaggctttaaagatcgggttgcagttctagttcttatactcaaatcatacacatgaaatctagtcatatttgacaccaaaatactaaccaagcttcttcttgattctcaatgctttaatagtgttaccaaagtccacatgcgtcttttgctttgtatcttctaacaaggaaacactactttgggttttaagatccagttaaggttctagttcgtatactcaatcatacacatgacatcaagtcatatttgactctaaaatactaactaagcttcttcttgcttcacaaagctttgatggtgtagcgaaagtccgtatgattcattggctttgtatcttctaacaaggaaacactacttaggcttttaagatccggttgcaattctcgtccttatactccatcatacacatgacatcaagtcatatttgattccaaaacattaaccaagcttcttcttgcttctcaaagttttgatggtgtacccaaagtccgtatgagtctttgtctttgtaccttctaaaaaggaaacactacttgggctttcaagatccggttgtggttgagttcctatactcaatcatacacatgccatcaagtcatatttgacttcaaaacaccaaccaagcttcttcatgctccctaaggctttaatggtgatgtcgaagtcagtatgaatattttgctttgtatcttctagcatggaaaaactaattttgcttttgggatccgtttgtagtttaagttctaatacttaaacatacacatgacataaagtcatatttgactccaaaacactaaccaagcttcttcttgcttctcaaagcattgatggtgtagccgacgttcgtatgagaatttggctttgtatcttctatcaaggaaacactatttgggctttcaagatccggctgtggtttgagttcttatactcaatcatacaaatgacatctggtcatatttgactgaaaaacacaaaccaaacttcttcttgcttctcaaagctttaatggtgtaaccgaagtccgtatgagtcttgggctttgtatcttctaacaaggaaacactacttgggttttcaaaatccggttgcggttctagctcttctacttgataagtgtgcattttacatgttttgagcatccatttgttatcactattgcatcatattaccatttttttatattatttctcatcatttgtcatcactttgcatgtttaggatagttttgcatgcatgttgcatatttgtgttgctttcaggatatttggagctattggcgagttaattggaagaagcggacctgatcatatcaaaccactcgacctacctagtcgagtacatggcttaacgacttcaacacaccacctgacaatcactcgatcacaccactcgaccccctggtcgagcatccccatcacaatcactcgatcactcactcgattacacgaccgagtcccaccatcatcacacactctacgatcactttaacaccaagccgagtaccaccatctcaatcactcgacttcttactcgacttccagctttagagtcttctccattccgtactcaaccaacactcaagcacaaggaagagaagaagactccagcttatcactcgacaaattactcgacaacctgggtcgagtaccgttcttaatccgtcccaatattgtgtcgttttgagtattagggtttcataatatttcgctatcagtaccatgtattttacattttcgtttacctaagttttattttccgcagacactgtgttcttgacgtttttgtaatccggatttctcttaatctattcagtattcagtatttgcttttgatttggtttaccaagttgttcatcctattatcatcctgctattactttgttgctatcatgttgataagtgtgtattttgcaagtttgagcataccatttgtcatcactttagcaccttatcatcagtgttttataccattctcatcatttgtcatcactttgcatgtttaggataggtttgcatgcatgttgcatatttgtgttgatttcaggtgatttagagctgttgacgagctaactggaagaagcggacctgatcatgtcaaaccactcgaccccgaggtcgagtagaagcttcaagacctcaacagaccactcgaccccctggtcgagtaggggagttcacaatttcatctcatcactcgaccctctggccgagtaccaccacgagagatactcgatcacctcactcgaccacctggtcgagtgtattcacctccaccacctgaccagtcactcgatcacatcattcaacccccaggttgagtgtcttcaccaccaccactcgactacatactctatggcaagctttagagtcttcttcattccgcactcaactagacactcgagcacaaggaagaaaagaagactctagcatatcactcgacctctcactcgaccatctgggttgagtatagttcttaatatgtcccaatactgcatcgttttgagtattagggttttcgaatattttgctataagtagcatgtactttacattttcgagaagaggtttttatctagttttatttcgcagacattgtgttctagaccttttgtaatctggatttctctttatctattcagtattcagtatttgttcttgattttgtttattgttgttcatcctgttattgttttgctattacactgttgttatcatgttttcatcctgttcaacgtttatgttctcttcaatgatgtctgagtagtgaataggtttctgaggatgggttagagtagtgtagaattctcagtatgctaggtggttgagtattgattgatagatcccttctggattagttgttcttaatccctattgctttttgatcaactggaatttgagcccagacatttccgcgcccaaaaggtgttcgatgaaatgtctgaaccactaattccagagattcgtggctcagtaccaaggtattggttgcagggagtgttttggctttaacttgttgattcgtaatgcctataaggttagctctcgtcaatggtgattgagtctgggactaggttaagttgagggtctctattgcggtggcacttagatttggttaatgaacttgttgtctagggataatttattgagcatgtcaatcacctgtaaattgaggaaacgaaactactcaattaccccatcctcgggaattctttatctgattgattttattgtttactctactgttgtttactgcatcttttcatctgttgcttagtttctgcaattctttactgttactcgacctgttacttgaccccccagttgtccggcaacagactgtgcaatcgagtatccctgttacattttctgtctgttactcgaactgtcactcgaccacacccagtgctctgcaacgagctgtgttggtcaagtgttttattgtttctgcttgattttctgttttctgcatgttcacttaggactgctagaacacaccaaaacctgttattacttggcttgacttagtgacttagtgacttagtggcttgctagaacactgctagaacaccaatcatacacatgccatcaagtcatccttattgttagcatcaaactcatttggattgacaacctaaaatattacaacgacatgattggtgttttaagataattgactaaaaaacctattatcaatttgtccctgttgccaattgggtgtttgtttgttacatttgagatttcagacttgcttagatcaagttctttttcaattttcaatttggttgctaactgtgtgtttttcttgttgtcttcttgttctaggtacacctctgctgtatgattggtgttctagcagtgttctagcaagccactaaaatactacaacgacatgattcgtgttttaagataactgactaaaaaatctattatcaatttgacgccgttgccaattgggtgtttttttgttacatttgagatttcagacttgcttagatcaagttctttttcaattttcaattcggttgctaactgtgtatttttcttgttgtcttcttgttctaggtacacctctgctgtatgcaaactcgatcaacaggcaatccgaacctccttttcaacgacaacatcgaccgcatagctcgcgaactcagagaaaagagaaacacagtcaacctaataccacaacaaccactcgaaatggctgacgaacagaatcatcaaaaaggccctgccaacattggtgctggaaacgcaccacgtgatcaccgttagcggaaaggaattgcacctcctgctatctagaacaacaacttcgagattaagagcggtctcatctcgatgattcaggggaacaaattccatggtctgccaattgaggatccactcgaccaccttaatgaattcgataggctctgcaacctaacaaaaatcaatggtgtcagtgaagacggattcaagctccgtttgtttccattctccttgggcgacaaagctcacatttgggagtagaatctgtcccatgactcaatcaccacctgggatgattgcaagaaggcttttctatcaaagttcgtctccaacgccagaactgcaagactcagaaatgagatctctggctttttacagaaggctggtgaaagcttctgtgaagaatgggagcgttttaagggttatacaacccaatgccctcatcatggcttcactaaagcctctctgctcagcactctttatagaggcgttttgccacgcatgagaatccttctggaaaccgccagcaatgggaacttccagaacaaagatgttgaagaaggctgggaaattgttgagaaccttgctcaatcagatggtaattacaacgaggactgtgataggaccgtcagaggcacaactgaatctgatgacaaacaaaggaaggagatcaaagcactgaatgacaagctggacatgattcttcttagccagcagaagcatgtgcacttccttgttgatgacgagaagtatcaagtccaaggtggggagggtaaccagttggaagaagtcagctacatcaacaacaaccagagcggctacaaagggtataacaacttcaaaaccaacaaccccaacctctcctaccgcagcaccaacgttgttaatcctcaagatcaagtgtatcctccacagcaacaacaagatcagaacaaaccttttgttccttacaatcaaggttttgttcctaagcagcaatttcaggggaactaccagccgcaaccaccacctgggtttgcacctcagcaaaaccaagatcctgctgctcctgatgctgaaatgaaacagatggtacaacagctgctacagggacaagcatctagctccatggaaattgctaagaaattatttgaattgcaccataagctggactacaactacaatgacctgaatgccaaagtggaggcattgaataccaaagtcagatatttagaaggacaatcagcatctacctctgcacctaaagtcacaggacttccaaggaagtcaatacagaattcaaaggagtatgcaactgctcacgccatcactaactgccatgatcgagagctgccaactcgacatgtccctgacttaatcactagggacagtgatgttcaagaaaggaaggcttccactcagattgaagtctctgttcttgaattcaaccattcttcttgttctcgccatctcattcaatccacctcagaagagaagtccgccataatcgagagaatggtaaaacgattcaaacatacttcattaccctcacgtgcttttccgtggacattcaagaaagcgtggatggagagatacaagtctgttgcagcgaagcaggtagacaagattgaagaagtgatgccactgatggaaattctcaacctgattcccgatcctcacaaagatgtgagaaatttgatactggaaaagatcaagatgtatcacaattcagatgatgaaagtgatgccactccatctcgagctgttgataagaggattgttcaagaaaagttagaagatcctggatctttcactctaccatgttccattgggtaattagctttcagcgattgtctgtgcgatctcggagcctctgtcagcttaatgccactctctgtggcaagaaggttagagtttattcagtataaaccttgtgacctgactttgatccttgcggataggtctttaagaaaaccctacgacatgctgaaagatctaccagtcatgattaatggagtagaagtgcctacagacttcgtggtgctggatatggaagtagagcataagggtccttaatcctgggaagatccttcttagcttcagtgggagcagtgatagatgtcagggaagggaaaataagtctcaaccttggaaagcacatcaagttgcagtttgacatcaacaaaactccacaagggtcaacagaagatggaaaaacctttggaaatgatagagcgatctcaggagaaggatatgagactaaaagagtaaaggaacttaaaaagaggtctgagaagcaagatgaaactatagagaagcaagcccacactgttgaggaacttagaagtaagcagaatcagttgcagaaggaagctcaacctaaaggcgggattgacactatccctataaagaagttcacttcaagatggtctgaagagatagataaccctccaaaagagaaagaagcatattttgaagagaggggaattgagtattctgctgtagacctctccagggaggacgctgagtatgatgatgatattagagaggactatgcagaccctctctatcattcattttcttcttgataagtgtgaggagtcaagctagagactttaaacaaactcacttgggaggaagtcccatgattatccttgtaaataatttttactttcttgttatttttgatttattttagttgtgtttgtggttctcaggaacagaggaataacgtaaagctagagtaaaaattcaaaacttttactctacagacggcctagggaccgagtacattggttgagtgtttaaaatctaaaacttttaaatcatcatttcactcgaccaacagaagctacaagttcttacaggaagtttattaagtttacagaagattgttggatttcctgagactttcctagtgaagaaagaataataatttagaataaggagacagacgagggacccactgctgcaccctatgtctcccacgctcctaaccaacagacaagaaatccaactctttcttctcacaaccactcgaccccctcaccttatcctatctccactcaacctcgacgccatccccatcccacacctatcacttactcgacctcgttatctcctccacacctattaactcgaccccatccctcctcattcattacaaccaacaacccaactctcatactctcatccactcgacctcctcaccatcctcttcatatactcgacctcaacatctttctccacacaccaaacttttcgcaactctctcatctcccatcgtcgctcattgcaattcaagtcttcaagtgttcgttttaatcactcgacctccaagctcacaaccactcgattgcggcaactcacctcttcaccaaagccaccaccatcttctcttcttccgtgagctccacttcactcgatccctcataataaacttcttcatcgcctcttcactcgatcgcgtcttctcttctcacattcgcaaccgaggaatcattcagctcacctcgcctctcaaccaccacaatcactcgaatcaccgctcctccattttcacttaacctctttcaaaccgcatcaccatatctcctcctcttcaagctcaccactcgacctacgcatcactcttaccacgaaacgaacttcactcggtcgtacgaaatcacttgatcaaccgaaagaaaagaaaaaaaaaaaaaaattaaacgaaggtttactcgattacatcactcgaccggtttactgtgttggtttgtgtttttggttttgttgagactaacttattaacgtttatctttgagtttcaattgtttacaggtttgatcatgagtaactacagtcgagaatcctctatggatcctgattataatgtggatgaagctgagtcctggtcctctagaccggagagagaggaacatgtttacgagagcttcagggatgaatttcaacgctcctctgctcgacgtaatcagagaagagcagaaatcaccagagggaagagagcgatgcccagtagatatgagctgattgatgaggacatcaaaactgagtatgagccaaagtcatggtgcaagaagacgaagctactgaacaaacccgaataggttacagtggaggagtatatcagattctttgagatgaatgatttatggggaacgaggtatccctactatgagactttagcccagctggggttactggaggacgtgcagcatctgttcgagaagtggcatctggaaacactcatgtcttactcttacgcttcctataaggaggagacaatcgagtttctttccacactgcaagtggagatgtatgagggactcacatacattgagtttagggtttagggtttagggtttagggtttagggtttagggtttagggtttagggtttagggtttagggtttagggtttaaggtttagggtttagggtttagggtttagggtttagggtttagggtttagggtttagggtttagggtttagggtttagggtttagggtttagggtttagggtttagggtttagggtttagggtttagggtttagggtttagggtttagggtttagggtttagggtttagggtttagggtttagggtttagggtttagggtttagggtttagggttagggttcttgacgttctcaatggatgaacagtggtatcagctttcgatcaagaagttggaagaactgttttgtttccctagtggaaagggaaccaaaaccaggtttgacagggaagagcttaaggatttgtgggctactattgggaataatttaccgctaaacttggcgcggtccaaaagcaaccaaatccggagtcctgtgatccgctactttcaccgctcggttgccaacgttttttactctagggagtctacatgcaccgtgtctaacacggacatggagatgatagattccgcgcttacagggattctctgctgtacaaagggaaagaatgtcttgagaggcgatctcaacaacgcaccactagtcatgcctctgttgatccacctgtgtggatataggaagtgggcgttgacgaacgacaagaataaggtgacaggagcactatgcatggatggcgttgtgacgccaattctggaagcttgtggagtaccgcttaaggaaccagggttagcaccgagaatgatggacttggatcacttgcgccgatgtgagttcttggagtttgacatggctagcgactttcaccgctacaggttcgagcattcatcgattagaatcgccaacattcttctcccctacattgatgctactaggattcttgagggcaggaacattgacttcaagcctgcgcttgaagatctttatttcgagggcagtctgccaactgaggagattagtcacaccgaaggagctataacagaagatgttgatgagacagatgacatagattaggcggagtttgacacgagcatgtatcatttcagtgagcatatacttccagcgagggaaagcaagagtttgagcgaagctcacaggaataacatcaagctgcagaagtggtgcaagaaacaggataagtttctcgccaagtgcctcagggctatcaagtttctgaaggataagatcagctgctccacttccactacagctattccacagggacagctccctcaggacatgccttcgaggagatatgacgcgcccgagccaattcggcgcaaacctgagcctagagagcaggagattctgcatgtccctgcgaggcattcatcattcgagcctcatgaatctgggaggaagaggaggaccacactcactcaatctaacaacaagggtagacgacttctgcattctcgtagtttacatgaagaagagaggtcgagtatcctcagagcggtgatggccgccacagagctgaggaggtcgagtacccacctactggagctgatacggaacagggcggttcgtctatggccagggagcaatcacaagcagccattgacgaccgacttcgttcattcttcgactgaggtaagcgcctcacttcaccattgtattatatcatctcttgtgatttgttctttattttgtttctgtgaatggatttgtcctgggtactctcttccaagtttatccacacagtggactgtgtgatttaagttttggggagggctcaggaagtgtgtattgcattgtgtatattttttagtccgcatacatctaaggcatagaaaaaccaaaaaaattttgaaaaatttcagaaatgatttcacaaaaaaaagaatgtttatgtagttgcattacatttaggatcgagtctagagtgtttcatttaggatttttgcatatgcataggggataatgatgagatagccttgtaagcattttggttcaccggataaacttagtgccctctttgctagttgtctgttgcgtagtcaatgaattagaaataaaactgaaccatgcctagattgctctagtcgaccacactgtcatgatctgataccattccctatcaatatgaacctgaatctgatctttaattgtcatgtttgcatcaaatttgaactcatggataccctaaaatacttggattttctgatgagaaaaggtaaaagactctaggtaaggtaagctaaagaagcagaaaaaatctagtaaaggttttgggatttgtaaagaaaagaaagagttcttgttagctattgaagatgggcaaaagccctcggttttaaaatgctaaaaacaggaaccttagttgttaaagagatccaaatccgctagatgtatcaaagtgttgagaaatcttctcctagagttaagagaaaagaaaagaatgattagaaaaagggcataaaggattcatgaatgcaaagggtagagttaggtttttatattgggattggagatgggattaccattagagcttcatttgatatactctgggtagatgggatcttatctctatatgcatagcttgggacttacctttagcaatctactaaagcttaatcattttttgagagatcccctgttactgaagcctattctgtaagggacaatctttgtctcttgaccttttaccttagccaaatgagttcattgatgatgcattgcttgattcacgttccagaactaatgaatgttaaagggattggtagatttgaaagcatgtgtaggtcgagcatatgagtcagattgattaataacaaggcatggctaacgtttttgagtagaattcgatcatattgcagcttagaactatcaatttggacattgatttcatatggtttatcaggtgctttggctataagtccccgctttcaaacctcaccaccagcttgttcttaattgtttgcttgaggggaagcaaagactaagtttaggggagttatatgtctataatttgcatgttttcagtgtccattcatcatcgttttgagtccagttttgtatcattcatcactgttttatatcatttctcatcattcttgcatactttgcatgattaggatagctttgcatacatattgcatttctgatttgttttcaggtgatttggagctgtttgcgagcaaattggaagaaacgagccagacctagaagacatactcgaccaccaggtcctgtgcatccagcaccatactcgaccccaagtcgagtaactttggagccattcttcccatctactcgaccccctggtcgagtatcctcagctcaggccactcgatgatgccactcaaccccctggtcgagtatcacttcgccacaccacctgaccacactcggccattcactctaccaagttactcgaccccctggtcgagtatcatcactcaccaccatcaccatcactcgaccggacactcgatcacgtcttcacagtctactcaaatccgcactcaaccagacaagctgagcacaaggaagagaagaggagaaaacaaagtgtttggaagcggcctggacctccatcggatcacgaagcccatctcggcccattatcattctatgggccggggattaggttattggcctgtctactatcattttatttcgttttgtataaatagatgtcttagggttctgtcctgagacatctagtcgacattgagtttttgcttcagttttattttctgttttactctgctgcgccgcttttgcttctgcaaccagtaattcgagatttttccaagttattcagattccgcatttgatttcatctgtcatcttgtttctctactctttatctctttacttatgcaatattatcatttatctgcgtttatgtctttgagcatgttgtctgagtagtgacttagaattcttagggatgggatagagtagttgtggaattcgtagtctgtataatggttaagttttagaattgattgaatcccttcaggactagttgcgtttactgcttatttctttctgatcaactggaattcgatctcaagcattcccgcacctagaaggtgttcgatggaatgcttgatccactagttcctgagatattcgtctctatcccaagggattggccgtttagagcgtttattgactttatcagtctgttcttattgcctgcatagttaaattccgttaatgggaattagtctgggctagctttgcttgaggatttctatcacgggagtgaattgatttgttgttaaacctgttgcttgaggatttctatcactagcttcatcagttggtactcgttgtatgcaaacacggtcacgaggaaatcagaatctcctgttcaacgataatatcgaccgtattgcacgccaactcagaacacagacagaaacagacacaatggctacagttgtagatgagcaagtgcaaccaaacaacataggtgcaggcgatgcaccacgcaaccacaatcagcgtaatggatccgtgcctccaccagtgcagaacaacaactttgagatcaatagcggtctcattgccatggttcagagcaacaacttccacggcctccctatggaggatccactcgatcacctggacgagtttgataggctctgcagcctaacaaagatcaatggagttagtgaggatgacttcaagctcagattgtttccattctctcttggagacaaagcccatcagtgggaaaaatcgcttcctcaaggctctatcacctccaggaatgactgcaagaaagccttcttggctaagttgttctcaaactcctggactgcgagactaaggaatgatatctctggtttcacacaaacaaatatccctggtcctggctgacagatctgttagaattccccatggtctcctggaagacttaccagtcatgaaaggcgtggtcgaagtacctacagactttgtggttctagaaatggatgaagaacctaaagaccctttgatattgggaagaacatttttagctacagtcggagctatcattgatgttaagaagggaaagatcgatcttaacctcgggagagatctcaagatgaccttcgatatcaccaacaccatgaagaaacctacaatagaaggaaatgttttctggattgaagagatggatatgttagctgacgaaatgctagaagagctaagagaaacagatcatcaacagagtgctctaacaaaggatagctaagaaggagatttacatttggagactctagggtaccagaagctgttagatgaacacaaagcagttgagaatccaggagaatatgaagatttgggtgaaagagcaaggaaggaatatatacttgaccacatcactcgactaacagtccattcagtgtactcgaccgaactactcgaccacaacccctcctctgaagccaacttagtatccgatgactggtctgaactcaaggcacccaaagtagatttgaaaccgctaccaaaagggctaaggtacgtttttcttggactaaactctacttatcctgtcatagtgaatgatgagctaactgctgatcaagtaaacctgctgataactgagctcaagaagtataggaaagctataggatattcgttagatgatattaaggggatttcacccaccttgtgcacccatagaatccatcttgaaaatgaatcctactctagcattgaacctcaaaggagattaaatccaaacttgaaagaggttgtgaaaaaggagatacttaaactattagatgctggggttatttaccctatctctgatagcacttgggtatctccagttcactgcgttcctaaaaagggaggtatgacagttgttaaaaatgctaaagatgaactgatacccactaggactataactcgacataggatgtgtattgactataggaagttaaatgctgcctctagaaaagaccatttcccattgcccttcattgatcaaatgctagaaagattagcaaaccatccttactattgcttgttggatggctatagcggattttttcaaatccctattcacccaaatgaccaagagaaaactacttttacttgtccttatgggacctttgcttacaagcgtatgcctttcggtctctgtaatgcacctgctacttttcagcggtggttgacttccattttctcggatttgatataggagatggtagaggtattcatggatgatttttctgtgtatggctcttccttctcctcgtgtttgttgaacctatgaagggtactcaaaagatgtgcagagacaaacctggtgctgaactcggagaaatgccatttcatggttagagaaggcatcgttttggggcacgaaatttctgaggaggggatagaggttgataaggctaaggttgacgtgatgatgtagttatagccaccaaagactgtcaaggacatcaggagttttcttggacatgcagggttttacaaaagattcatcaaggatttctccaagttggcaagaccgctcacaagactactgtgcaaggaagccgagtttacatttgatgaagaatgtttgacagcctttaagttaatcaaggaagctttggtcacggccccaatagtccaagctccaaactgggacttcccattcgagatcatgtgcgatgcttcagattatgcagtaggagcagttttgggccagaggattgataaaacgttgcatgtgatatactacgcgagaagaacgatggatgatgcacaggtaaggtatgccactacagagaaggaactgctagctgtggtatttgcattcgaaaaatttagaagctacctagtcggctctaaggtgacagtctacactgatcatgctgctctgaggcatatatacgcgaagaaggataccaaacctaggctgttgagatggatcttattgctccaagagtttgatatggagataattgataagtagggaatttaaaacggtgtagctgatcatctaactagaatgagaattgaagacgaggtccctattgacgattccatgccagaagaacagctaatggcaattcagcaacttaacgagagtgctcaaattcggaaatcactcgatcaagtatgtgcaattgaagaaaagcttttgtggtatgctgatcacgtcaactacttggttagtggtgaagagcctccgaatttgtcgagctatgagaagaagaagttcttcaaggacattaaccacttctagtgggacaaaccttatctctacacactctgcaaggataagatctacaggagatgcgtttcagaagacgaaatcgaaggcatcctactgcactaccatgggtccgcctatggttgccactttgcaacgttcaagacagtgtcaaaaatcttgcaagctggtttttggtggacgacaatgtttaaggatgctcaggaatttatctcgaaatgtgactcatgtcaaaggaaagggaacatcagcagaaggaatgagatgcctcagaatccgatcttagaagttgagatctttgacgtttggggaattgattttatgggtccgtttcctttttcttacgggaacaagtacatactggtcgtagtagactatgtatcaattgggtggaagccatagccagccccaccaatgatgctagagttgtgctaaagctgttcaagacaattatcttccctagatttggagtcccgagagttgtgatcagtgacggagggaaacattttatcaacaaggtttttgagaaccttttgaagaagcatggagtaaagcacaaggtagccactccttatcatccacagacgagcgggcaggtggaaatctccaacagggagataaaagcaattttagagaaaacaatgggaattacaaggaaagattggtctactaagctcgatgacgcactatgggcttacagaacagccttcaagacccctattggaacgactcctttcaacctcctctatggaaaatcctgtcatttgcctgttgaactcgagtataaagccatgtgggcagttaaactcctgaactttggcattaaaaccgccaaggagaagcgattgatccaactgaacgatctcaacgagattcgcttagaagcttatgagagttccaaaatctacaaggagcgaaccaagtctttccatgacaagaagatagtctcaagagattttaaggttggtgatcaagtgttgctgttcaactctcgcttgaggctttttccaggcaagctcaagtctagatggtctggtcctttctctgttactgcagtccgaccttatggtgctatcactctagctggaaagaatggagacttcacagtcaatggacaacggctcaagaaatacatgatagatcagtttattccagaaggaacttctgttcctttggatgagcctataaacgcctaatgagtatgaagagtcaagctagagacctaaaacaagctcacttgggaggaagtcccatgcctatctttgtacatatctttaatttttcttgttgtttttgatgcatcttgttagtgttttcaggcgataagtatgaagagctgacggaaatagattctggctttgagggaacagcaatacactcgaccaaagagcaatcaaggatactcgacattgttctggtttctccaccccatgaaatcactcgaccacaccctacagggactgaatgacgatgtgatcgagtatagcgagtggtgcaatcaaaacttctccatgtcagtaaatcactcgaccacggtgctggccgcagcagaagaagagaggtcgagtatcatcagagcggtgctggccgcgacgaaggagcagaggtcgagtacccctagggggaagctgagacacaactgggagattcttcgatggcctgggagcaatcacaggcagctattgacgaccaactctgctccttcttccactgaggtatgcacctcactccaccattgtaatataccatctcttgtttttattttgtttctgtgatgtgttttgtcctgagtactctcttccaaatttggtcacacagtggactgtgtgatttaagtttgggggagggctcaggcaatgtgtgttgcattgtatataatcttgagtctgcattcatctaaggcataggaaaaaacaaaaaaattgaaaaatttcagaaaatgatttcacaaaaatagagtgctcatgtagttgcattgcatttaggaacgagtctagagtgtttcgtttaggattgttgcatatgcataggggataatgatgagatagccttgtaagcattttggttcaccagataagctcagtgccctcgttgttagttgtctgatgcgtagtcattgaaattgaagtaaaactgcaccatgcctagattgctctactcgaccacactgtttggatctgataccattccctatcaatttgaacttgaatctgatttagaattatcatgtcttggcatcgaatttgaactcatggataccctaaaatacttggattttcttactcattttaaccactcttgttagtccaagtagctgactctccttattagagcagttaacccgaaccaaaacctaaactttctttcgagccctatatcacttgtgagtgtttgtgaggtcttatttcaattgagcttggtagaaagtgttaggttcgtaacgacagagatagtgtctcatgtagttctagttcgcgttttcggactggataggactaggtgggcgcttatatcacgggttgggatgtgtttaaaagaaaagggtgaattcattgttgataaggaaagggaaagaattctaggggaagtaagctaaaagaagttagaaaaaaaatctagtaaaggttttgggaatgttaaagaaaagaatgaggttcttgttagctaaagaagaagggttaaaagcctttggttttaaagattaaaaacaggaaccttagttgttaaagaaatccaaatccgctagatgtgtcagagtgttgagaaagcttctcttagagttaagagaaaagaaaagaatgatttgaaaaagaaaaaaaaaagtttgaaagattcatgagtgcaaagggtagagttaagttgggactggagttgggattaccattagagcttcattgttatactctgggtagatgcgatcttatctctatatgcataacttgggacttaccttaagcattctactaaagctcaatcattcttgagagatcccttggtacttaagcctattttgtgagggaccatctttgtctcctgaccttcaccttagccaaatgagttcattgatgatgcattgcttgattcacgttccagaactaatgaatgttaaagggattggtagatttgaaaacatgtgtaggtcgagtataagagacggattgattgataacaaggcatggctaacgtttttgagtaaaattcaatcatatcgcatcttagaactaccaacttggacattgattttattcgctctatcatatgctttggttctgagtccccgccttcaaacctctccttcaactatgtcttcttattagcttgagggcaagcaaagactaagtttgggggagttgatatgtctataatttgcatgttttcagtgtccattcatcatcgttttgagtccagttttgtatcattcatcactgttttatatcatttctcatcattcttgcatactttgcatgattaggatagctttgcatacatattgcatttctgagttgttttcagatgatttggagctgtttgcgagcaaatttgaagaaacgagccagaaccagaagacatactcgaccaccaggtcgtgtgcatccagcactatactctacccccaagtcgagtaactttggagctattcttcccacctactcaaccccctggtcgagtatcctcagctcaggccactcgatgacgccactcgaccccctggtcgaatatcacttcgccacacaacctgaccacactcagccattcactctaccaagttactcgaccccctggtcgagtatcatcactcaccaccatcaccatcactcgaccggacactcgatcacgtctttatagtctaatcaaatccgcactcaaccagacaagctgagcacaaggaagagaagaggagaagacaaagtgtttagaagcggcctagacctccatcggatcacgaagcccatctcggcccattatcattctatgggccgggcgattaggttattggcccgtctactatcattttatttcgttttgtataaatagatgtcttagggttctgtcctgagacatctagtcgacattgagtttttgcttcagttttattttctgttttactctgctgtgccgcttttgcttctgcaaccagtaattcgagatttttccaagttattcagattccgcatttgatttcatctgtcatcttgtttctctactctttatctctttacttatgcaatattatcatttatctgcgtttatgtctttgagcatgttgtctgagtagtgacttagaattcttagggatgggatagagtatttgtggaatccgtagtctgtagaatggttaaattttagaattgattgaatcccttcaggactagttgcgtttactgcttatttctttctgatcaactggaattcaagcaaagcattcccgcacccagaaggtgttcgatggaatgttcgatcgactagttcctgagatattcgtctctatcccaagggattggccgattagagcgtttattgactttatcagtctgttcttattgcctgcatagttagattccgttaatagaaattagtctgggctagctttgcttgaggatttctatcacgggagttaattgatcagtctagggatagcttgattgcgcttgttaaccattcgaataggctaggatacaactctacttgattaccccatccttaggaatttctcgtctatctgatttctccgttttattgttatcacttaatcgttttcattgcctgtttcttagtttttgcaattactcgaccaacttacttgaccacacccagtgtctggcaacagactgtgcaatcgagtacagctgtctcatttcctgtctgttactcgacatgtatactcgaccagacccagtgtctggcaatagactgtgcaatcgagtatatttgtttcatatcctgcctcttactcgatcacatcctacttcttgcatcagcctgttgtggtcgggtgattttagtaattctattattgtttctgttttctgcatgttcacttaggactgtaagaaaccccaatactgttattgcttggcttgacttagtgacttctgatcacatctcatctgtttgcatcacacccatttggattgacacctaaaatactacaaagacatgattggtgtttaaggataattgactaaaaacatattattagggagttaataagtgtgtattttgcatgttttgagcatccatttgtcatcacttaagcaccatatcatcactgtataataccatttctcatcatttgtcatcactttgcatgtttaggataggtttgcatgcatgttgcatatttgtgttgatttcaggtgatttggagctgttgacgagctaactggaagaagcggacctgatcatgtcaaaccactagaccccgaggtcgagtagaagcttcaagacctcaacagaccactcgaccccctggctgagtaggggacttcacaatttcatctcatcactcgaccccctggccgagtaccaccacgagagatacttgatcacctcactcgaccacctggtcgagtgtattcacctccacaacctgaccagtcactcgatcacatcactcgacccccaggtcgagtgtcttcaccaccaccactcgactacatactctatggcgagcttcagagtcttcttcatttctgcactcaactagacactcgagcacaaggaagaatagaagactccagcatatcactcgacctctcactcgaccatcagggtcgagtacagttcttaatccgtcccaatactgcgtcattttgagtattagagtttcagaatattttgctataataagcatgtactttacattttcgagaagaggtttttatctagttttattccgcagacactgtgttctagaccttttgtaatccggatttctctttatctactcagtattcagtatttgttcttgatttcgtttattgttgttcatcctgttatcgttttgctattatattattgttatcatgttttcatcctgttcaacgtttatgttctctataatgatgtctgagtagtgaataggtttctgaggatggattagagtagtgtagaattctcagtttgctaggtggttgagtattgattgatagatcccttctggattagttgttcttaatccctattgctttctaatcaactagaatttgagcccagacatttctgcgcccaaaaggtgttcgatgaaatgtctgaaccactaattccagagatttgtggctctgtaccaaggtattggttgtagggagcgttttggctttaacttgttgattcgtaatgcctgttaggttagctctcgtcaatggtgattgagtctgggactaggttaacttgagggtctttgttgcggtggcacttagatttggttaatgaacttgttgtctagggataatttattgagcatgtcagtcacctgttaactgaggaaacgaaactactcaattaccccatcctcgggaattctttatctgattgattttattgtttactccacaggactttctatcaaagttcttctccaacgccagaactgcaaaactcagaaataagatttctgatttttcacagaagacgggtgaaagcttctatgaagcatgggagcgtttcagaggttacatcaaccaatgccctcatcattgcttcacgaaagcctctctgctaagcactccatagataggcgttttaccacgcatcagaatgcttctggataccgccaacaatgggaatttccagaacaaggatgttgaagaaggctgggaattggttgagaacctagctcaattagatggtaattacaatgaggactacgataggaccatcagaagcacagctgactctgatgacaaacacaagaaggagatcaaagcgctgaacgacaagctggaaaggattcttcttagccagtagaagcatgtgcacttccttgttgatgacgagcagtatcaagtccaagatggggagggtaaccagttggaagaggtcagctacatcaacaacaaccagggtggctacaaagggtataacaacttcaaaaccaacaaccccaacctctcctaccggagcaccaacgttgcgaatcctcaggatcaggtgtatcctccacatcaacaacaaggtcagaacaaaccttttgttccttacaatcaaggatttgttcccaacaatttcaggggaactaccagccgcaaccaccacctgggtttgcacctcagcaaaaccaaggtcttgcagctcctgatcccgaaatgaaacagatggtacaacagctgctacagggacaagcatctagctccatgaaaattgctaagaagttatttgaattgcaccataagctggactatagctacaatgacctgaatgccaaagtggagacattgaataccaaagtcagatacttggaaggacaatcaacatctacctctggtcctaaagttacaggacttcctgggaagtcaatacaaaatccaaaggagtatgcaactgctcacgccatcactatctgccaggatcgagagcagccaactcgacctgtccctgacttaatcactggggacagtgatgttcaagaaggggagccttcaaccaagattgaggtctctgttgtagaattcaaccattctgctggttctcaccatctcatttaatccacctcggaagagaaagcagccataatcgagagaatggtaaaacgattcaaacctactccattaccctcacatgctcttccatgaaattcaggaaagcatggatggagagatacaagtctgttgcagcgaaacagctagacgagaatgaaacagtgatgccactgatggaagttctcaacctgattcctgatcctcacaaagatgtgagaaatctgatactggaaaggattaagatgtatcacgattcagatgatgatagtgacgctactccatctcgagttgctgataagaggattgttcaagaaaagttagaagatcctggatattctactctaccatgttcaattggggaattagctttcagcgattgcctgtgcgatctcggagcctctgtcaccttaatgtcactctctgtggcaagaaggttggaatttatttagtacaggccttgtgacctgactttgatccttgcagataggtcttcaagaaaaccctccgacatgttgaaagatctaccagtcatgattaatggagtggaagtgcctacaaacttcgtggtgctggatatggaagaagagcataaggatcccttaatcctgggaagacccttcttagcctcagtgggagcagtgatagatgtcagggaagaaaaaataagtctcaaccttggaaagcacatcaagttgcaatttgacatcaacaaaactccagaagagtcaaaagaatatgaaaaaccctctggagacgatagagtgatcccaagagaagcgtatgagactgaaaaagtaagggagcttaaaaagaggtctgataagcaagatgaaactatagggaagctagcccacactattgaggagcttaagagtaagctgaatcagatgcagaagaaagctcaacctaaaggcggaattgacattatcccgagaaaaaggttcacttcaagatggtctgaagagatagattaccctctagaagagaaagaagcctgttttgaagaaaggggaattgagtgttctgctgcagacctctccagggaggacgctgagtatgatgatgatatccgagaggactatgcagaccctctctatcattcattttcttcttgataagtgtgagcagtcaagctagagactttaaacaagctcacttgggaggaaggtcccatgactatctctgtaaataaatttttcttttgttgttatttttgatttgtcttagttgtgtttgtggttctcaggaacaaaggaacaaggtggagatagagtaaaaattcaaaacttttactttacaaaagacctggagatcgagtgtatagcccgttggagtgcaaaattttgtaaattttctgttgcacatggagaccttgcactcgagtacattggtcgagtatgagtgatgtttaaaaccaaaaaattttaaatcatcatattactcgaccaacagaagctacagagccttacagggagttaatcaagtttactgtagatttcctgcagttttcccaatcaacagagtgtggaccacgcgctgaggataagatggagagagaatctcaaactcaatctccaccactgcttttgaaatttcactcgaccaacctctattcagttttccaccactcgatcgcaagaatcaacttgacctctgaaaccaagccacgctcgacctcgccgaaaccactcgaccgcagctggaaagaattacagccgccgcagtcgagttcaaagtcccactcgaccaccgattacgtttcaccttgaatcactcaaccacttcacttcgccgttaaccgtcacttcccgtctaagtcgagtctccacctcgtttaccgtcgtcgtctcaagagctactcgattacatccactgtactcgatcgtcgatttgaggtttcgtccctgccaattttggctcacctatggtatactcgaccaacctgattcaccatctgcacactacttcctcaacattactcgacctcttatatctgagccactcgattcaacccgtgaaagagaaacttggaaaaagttaagcttacttgagtatttgattgtacttgaccgtttgggtctatattgtctgttgttaacaattttggtttgattgttctctttgagactatcctattgatattggagttttgagttctaaatcttctacaagagaatcatgagtaattacagtggcaattcttcagttgatcctgactacaacatggatgagacatagtcgtcatcttcaaggccagagagagaaaagatagaatttgatagcttcagaagaaaagctgagatagctcgagggaagagagcaatgacagagaggtacgagcttatagatgaggatctagaagacgagtacatgcttgagcatactagtagagccacaaagcttcttcacaaaccagatgtattacctgctgaggagtatatcagactcttcaaactaaatgagttctgtagcacaaggtatccatgctcgaccacacttgcataacttggattgttggaagatgttcaacacctgtaccagagtagtcatgtggacactctgatggcttatccgtatgtagcatatgaagaagagacaattcaattcctctccacacggcaagtggagctttaccaaggtatgacctctgatgagttggattgcgaaggattgggattcttgagattctctgtgtatggtcatgagtataggttatcaatcaaacgcttggaaggactttttggtttccccagtggaacgggtactaagcccaagtatgacagagaagagttgaaagacttatggatcaccattggcagctctgtaccgctaaattcttccaggttaaagagcaatcagatacgcagccctgtcatcaggtacttccagcgttctatagccaatgtcctctactccagagagatcacagggactgttaccaattctgatatggagatgatcgctatatgctctcaaaggcactctctaccaaactaagaacaacatatctgtgaaatcaatgacacacctttctctgtacttcttctaatccacctgtgtggatacaagagctgggctgtcagcaataatcacaagagagcacgaggcgctctttgcatagtcggtgttgtgacaccgattctgattgcttgtggagtcccaatcacatctgatggactcgagccacgggcaattgatatcaagcatctacgtcactgcgaagtcctggagttagcatcctacgtcctgaagttcggaatggttggcgacatgcactgttttaggtttaagcactctacggataagagagctagcatccttctccccagccctaaggttacacggataatagagggagataacattgattttcggcctgagcttggaaacctctactatgagaacgctccgccattggatgaggatgatcttatagaagaagctgcttaggatgggatggatgaagacagagcagtggagttcgacactagcatgtatcattttgatgaacatgtacctctggcgagggagagcaagagcttgagtgaagctcataggaacaacaataagctgcagaagtgttgcaagaagcaggacaagcggctcgccaagtgctttaagactatcaagtttctgatagattaactgagctgttcctcttctactacagctattccacagggacagcctcctctagatatgccattgaggagatttgatgagcctgagcacagacctgagcttagtgagcagagagtctcacatgtccctgctaggcattcgtcattcgagtcccgggagcacaagtgaagaaggaaggctacactcgttcgctctagcagtagatcatgcctaattcactcgaggagatcactcgaccacggtgctggccgcagcagaggaagagaggtcgagtatccacagagctgatgaggtcgagtacccacctgctggagctgatacagaacagggtggctcgtctatggcttgggagcaatcacaggcagccattgacgaccaacttcgttcattctttgattgaggtaagcgcctcacttcaccattgtattatatcatcttttgtgatttgttctttattttgtttctgtgattggatttgtcctgagttactctcttccaagattagtttgggggagtgctcatgaagtgtgtgttgcattgtttatactcttgagtctgcattcatctaaggcataaaaaaaccaaaaaaaaattgaaaaatttcagaaaatgatttcacaaaaaaaaagagtgttcatgtagttgcattacatttaggatcgagtatagagtgtttcatttaggattgttgcatatgcatagggaataatgatgagatagccttgtaagcattttggttcactggataaactcagtgccctcgttgctagttgtcttttgcgtagtcaatgaaattgaagtaaaaccgaaccatgcctagattcctctactcgaccacactgtcatgatctgataccattccctatcaatttgaacctgaatctgatctttaattatcatgtctgcatcaaatttgaactcatggataccctaaaatacttggattttcttattcattttgatcactcttgttaatccaagtagttgactctccttattagagcagttaacccgaaccaaaatctagactttctttcaagccttatatcacttgtgagtgtttctgaggtcttatttcgattaagcttggtagaaagtgttaggtttgtaacgacagagataatgtctcatgtagttctagttcgcatttttcggactagataggactaggtgggtgcttatactttgggttgggatgtgtctaaaagaaaaagaaaaaacaaaagagttgattcattgatgagaaaaggtaaaaggctctaggtgaagtaagctaaagaagtagaaaaagtctagtaaaggttttgggatttgtaaagaaaagaaaagggttcttgtcagctaatgaagaagggcaaaagtcctcggttttaaaaattgaaaagaggatccttagttgttaaagaaatacaaatccgctagatgtatcagagtgttgagaaagcttctcctagagttaagagaaaagaaaagaatgattagaaaaaggggttaaaagattcatgaatgcaaagggtagagttaagttcttatattgggattggagatgggattaccattagagcttcattggttatactcttggtagatgggatcttatctctgtatgcatagcttgggacttacctttagcattctactaaagcttaatcattttttgagagatccccttttgctgaagcctattctgtaaggggccatctttgtcacttgacctttaccttagccaaatgagttcattgatagatgcattgcttgattcacgttccataactaatgaatgttaaagggattggtagatttgaaaacatgtgtaggctgagcataagagtcggattgattgataacaaggcatagctaacgtttttgagtagaattcaatcatatcgcagcttagaactatcaacttggacattgatttcatctgatttatctggtgctttggctcaaagtccccgccttcaactctcacctcctacttgttcttaattgtttgcttgagggcaagcaaagactaagtttgggggagttgataagtgtgcattttgcctgttttgagcatccatttgtcatcactttatcatcatatcatcattgttttatatcatttgtcatcactttgcatgtttaggatagttttgcatgcatgttgcatatttgtgttgttttcaggtgatttggagctgttgacgagctaattggaagaagcgttcctgatcatgtcaaaccactcgacccccaggtcgagtagatgcttcacgacctcaacagaccactcgaccccctggtcgagtagaggacttcaccacttcacctcaccactcgaccccctggtcgagtctcataacctccaccacctgaccatcactcgatcacactactctaccacatggtcgactaccttcatcaccttcactcgatcactctaccacctggtcgagtatcatcacctccacacttgaccatcactcgatcacaccactctacaaggaagtcgagtgataagtggtgaacctatcaagaagattaagaacagaaagagatagaatcggatgaagaagaagaagaagatagagtggataaaggatagaggagagtaataataggaagtttgattaatactttgataccttaaccctaaagtagagttcaacatttatagtagtttccctatggaaaactacacacactctctcagactcttacttaaacaacatacagttaatatgaactatagcatacttatttctttgacacttcaaagcctctggatgcgacagagtgtttccttgcactttcttaaactctctttagccacttgggtcaaagatcttctttgaatcctcttccttgttgctctatctcctttccttgcttctccttccatagtctccaccttatcattactcccccgtaacgaagccaccttgtcctcaaggtgaaatgctgggaactgctgcctgatgactttcattggctcccatgtattctcacactctggcagacctctccatttaatcaataactcagtatctgcgcccgtgctgctttcccttatctctagtacatcttcaggttcaggttcccactccaagttagaagtcataatcgctgggagaggttgagcttgggctgaacttggttgcgcatgcttcagctgtgatatatggaagaccgggtgtatggagatgctgcttggtaactgaagtttgtaggctactgcacctattttttgaagaatctgataaggaccaaaaaatctgggagatagcttctcattgcgacgctgtgccacggttacctgcctgtaaggtcttaactttagataaacccaatcgccaactatgaattccagctcccttctatgcttgttagctgatttttgcattcgggcttgagctgcctgcagattttctctcagcatcgtgaccactctgtccctttcttgtagcatctcctctaccaccgcgttagcttttgggatgtcaccaaatcgtaacagtttcggtggttctcttccgtacaaggcctgaaatggagtcatcttgatggcagaatgaaacgaagtgttagaccagtattctgcccaggaaaacaattgagcccaagattttggctttccattaacaaaacagcgaaggtaagtctctaagcatctgtttaggacctcggtttggccatccgactgtgggtggtatgctgtgctcttagccagatgtgttccttgggacttgaaaagagcagaccaaaagtgactgacaaaaatcttgtcccgatctgaaaccatactctctagaaatccatgaagtctaacaatctctttaataaacacttctactactgatttagctgtgtaaggatgcttaaggggaataaaatgaccatacttgctgagccgatctaccacgacgagtaccgcatcatatccacttgaaactggaagcccttcaatgaaatcaaggctgatattggaccataccttagtcggaatgggtaatggttgcaagaggccggctggagacaatgtagaatacttgttttgttgacaaacttgacaacccttgaggaactccaccacgtccttgcgcatgcctttccagtaaacttcactagataaccttttaaatgtcttaaacgctccttcatgtcctccaatgggactagtatgaaactgttccagcaattttgggataaaaggagagctttctggcataacaattctgccatccttatataaggtgttagctaccagactgtatcctttctccccttcctctcctctaagcagttgttcctgtatgagtttgaggctgggatcattttgtacctgtgcctacagttcttccttgttcactgtcgccgaagctagaaacagcatgttcattatttgctcggttactggacgtctagatagcgcgtctgctactctattttctgagtcatgcttatactcaatctcatagtccaggctaactaatttcgaagcccacctttgttgtatggctgacactgccttctggttgagtaagtgtttcaggcttctctaatcagtcctgataatgacttttctcccgtgaggtagtgcttccacttatccactacaaaaacaatcgccaaaagtttcctctcatatattgatttaactctgcctttactggagaatccttggctaatgaacgcaatgggacgcttatcctgagatagaactgctcctatacccgtgcctaaagcatcagtctctatcacaaatggcttctcaaaatctggtaatgctaacgttggaagacagataaccgcctcttttaaagcctcaaaagtacttgtaccttcaacagaccattcaaatttccctttcttgagtaattctgtcagtggctttgctatcttcccataacctgccacaaaccttctgtagtaaccagtaaggcctaaaaacccgcgcagctctgttatattcttgggctgtggccactttaccatagcttctatctttgtgggatctgtagaatctccttcgctagtgatcatatggcccaaatatgatatccttgtgcaaccaaagtggcatttcttctcattggcgtagaacctgttctgtaaccgaatctgaagaaaaacctctaagtgtttgagatgtgtctctacatcaagattgtataccagaatgtcgtcaaagaacactaaaacaaaccggcgcatatatggtctaaacagctcattcatcactgattggaaggtggctggtgcattagtcagcacaaagggcattgataatagtttttttagtcaattatcctaaaacaccaatcatatcgttgtagtactgaaggttgtcaatccaaatgggtgtgatgctaacaatcaagatgtgatcagaagtcactaagtcaagccaagcaataacaggttttggtgtgttctagcagtcctaagtgaatatgcagaaaacagaaaatgaaacagaaacagtaaaaaacactcgaccaacacagctctttgcagagcactgggtgaggtcgagtaacagacaaaaaatgaaacacagatactcgactgcacagtctgttgccatacaactaggtggtcgagtatgaggtcgagtaacaagaaagaactgcagaaattaagcaacagataacaagatgcagtaaacaacaatatagtaaacaaagaattcaatcagataaagaattcccgaggatggggaaattgagtagtttcgttttctcagtttacaggtgattgacatgctcagtaaattaaccctagacaacaagttcattaaccaaatctaagtgccaccgcaacagagaccctcaagttaacctagttccagattcaatcaccattgacgagagctaacctaacaggcattacgaatcaacaagttaaagccaaaacgctccctgcaaccaataccttggtactgggtcacgaatctcttgaattagtggttcagacatttcatcgaacaccttttgggcgcggaaatgtctgggctcaaattctagttgatcagaaagcaataggcattaagaacaactaatccagaagggatctatcaaccaatactcaatcacctagcatactgagaattctacactactctaacccatcctcagaaacctattcactactcagacatcataatagaaagcagaaacgttgaacaggttgaagacatgacaacaacagtgtaacagtaggatgataacagaatgaacaacagtaaacgaaatcaagaacaaaagctgaatactgaacactgaatagataaagagaaatccggattacaaaaagtctagaacacaaggtctgcagaataaaactagataaaaacttcttgtctgcgaaaatgtgaagtacatgctacttatagccaaatattccgaaaccctaatactcaaaacgacaaagtattgggacggattaagaactgtactcgacccatgtggtcgagtgggaggtcgagtgaatagctggagtcttcttttctttcttgtgctcgagtgtctggttgagtgcggaatgaagaaggctctgaagcttgtcatcgagtatgcaatcgagtggtgtgatggtgatactcgacttccatgtagagtgatgaggtcgagtagaggtctagcaatgggatgaagtcactacatctgggggtcgagtgatgtgatcgagtggtggtcaagagatggagatgaagacactcgacctgggggtcgagtgatgtgatagagtggtggtgtcttctactcgacctgggggtcgagtggtctcttgagatcttgaagctcctactcgacctcttggtcgagtggtttgtcatgatcaggtccgcttcttccagttagatcgtcgacagctccaaatcacctgaaaacaacacaaatatgcaacatgcatgcaaaactatcctaaacatgcaaagtgatgacaaatgatgtgaaatggtataaaacagtgatgatatgatgctaaaatgatgacaaatggatgctcaaaacatgcaaaatacaaacttatcaactcccccaaacttagtctttgcttgcctcaagcaaacaatcaagaacaagctggaggtgaggtttgaaagcggggactcagagccaaagcaccagatagaccagatgaaatcaatgtccaagttgaaagttctaagctgcaagatcgaattctacttaaaaaagttagttatgcctcatcaatcaatcaatccgactcatatgctcgacctacacaagttttcaaatctaccaatccctttaacattcattagttctggaacgtgaatcaagcaatgcatcatcaaagaactcatttggctaaggtaaaaggtcaagagacaaagatggtcccttacagaataggcttcaataacaggggatctctcaaaaaatgattaagctttagtagaatgctaaaggtaagtcccaagctatgcatacagagataagatcccatctacccagagtacatcaaatgaagctctaatggtaatcccatctccaatcccaatacaagaactaaactctaccctttgcattcatgaatcttttaagccctttttctaatcattcttttcttttctcttaactctaggagaagctttctcaacactttgatacatctagcggatttggatttctttaacaactaaggttcctgtttttaacattttaaaaccaagggcttttgcccatcttcaatagctaacaagaactctttcttttctttacaaatcccaaaacctttagtagactttttctgcttctttagcttacttcacctagagtcttttaccttttcttatcaataaatcaaccttttttttttcttttaaacacatcccaacccaaagtataagcgcccacctagtcctatctagtccaaaaaatgcgaactagaactacatgagacactatctctgtcgttacgaacctaacactttctaccaagcttaatcggaataagacctcacaaacactcacaagtgatatagggcttgaaagaaagtctaggtttgggtttgggttaactgctctaataaggagagtcagctacttggattaacaagagtgatcaaaatgaataagaaaatccaagtattttagggtatccatgagttcaaatttgatgcagacatgataattaaagatcagattcaggttcaaattgatagggaatggtatcagatcatgatagtgtggtcgaatagagcaatctaggcatggttcagttttatttcaaattcattgactacgcaacagacaactagcaacgagggcactgagtttatcctgtgaatcaaaatgcttacaaggctatctcatcatcatcccctatgcatatgcaacaatcctaaatgaaacactctagactcgatcctaaatgtaatgcaactacatgaacactctttttttgtcaaatcattttctaaaatttttcaattttttttggtttttctatcccttagatgaatgcagactcaaaaatataacacacacttcctgagccctcccccaaacttaaatcacacagtccactatgcgaataaacttggaagagagtactcaggacaaatccaatcacagaaacgaaatgaagaaacaaatcacaacagatgatataatacaatggtgaagtgaggcgcgtacctcaatcgaagaatgaacgtagttgctcgtcaatggctgcctgtgattgctcccaggccatagacgaaccaccttgttctgtatcagctccagcaggtgggtactcgacctcattagctctgtggcggccagcaccgctctgaggatactcgacctctctccttctgctacggccggcaccgcggtcaagtgatctcctcgagtgaatgaggtgtgatctgctcctagatcaagtgagtgtagccttccttcttctcttgtgctcccgggactcgaatgacaaatgcctaaccggggcatgagagactctctgctcgctaagctcaggcttgtgcgcaggcttatcaaatctcctcgatggcatctccagaggaggcaatacctgtggaatagctgtggtggaggaggaacaactcagcttatctgtcagaagcttgatagccttgaaacacttggcgagcaacttgtcctgcttcttgcaccacttctgcaatttacttttgttcttatgagcttcggtcaagctcttgctctgcctcgctggaggtacatcttcaccaaagtgatacatgctagtgtcgaactccactgcgcaatcgtcatccatcccatccgaaacagcttcttctagaagatcctcctcattgaatggcggagcgttctcatagtagaggcgtccaacctcaggccaaaaatcaatattatctccctctattatccgtgtaacctcagggctagggagaaggatgttagctctcctgtctgtagagtgctcaaacctgaacctgtggaagtcgtcaaccattgcaaactctaggaattcgcagtgacgtaggtgctcgatatccattgctcgcggctcgagtccggcagatatgattgggactccacaagctatcagaatcggtgtcacaacaccacctatgcacagagcgcctcgtgctctcttgcggttattgctgacagcccaactcttgtatccacacagatggatcagaagaagtacagagagaggtgtgtcattgatttcaccttggagagacataccattcttcgtttggcgaagagttcccttgagggccattgcgatcatctccatatcagagttagtaacagtccctgtgatctctcgggagtagagtacattggctatagaacgctggaagtacctgatgacagggctgcgtatctgattgctctttgacctagaagcattcagcggtacagagctgcaaatggtgatccacaagtctttcaactcttctctgtcatacttgggcttagatcccgttccactggggaagccaaacaatccttccaagcgcttgattgataacctatactcatggccatacacagaaaattgcaagaatcccaatccttcacaatccaactcatcagaggtcataccttggtagagctctacttgcagcgtggaaagaaattgtattgtctcatcttcatacgctacatacggataagccatcagagtgtccagatgacaactctggtacaggtgttgaacatcttccaacaatccgagttgtgcaagtgaggtcgagtaaggatacctcgtgctacagaactcgttcagcttgaaaagcctaacatattcctcagcaggcaatacgtcgggcttgtgcagaagtttggtagctctacgagtctgttcaggcatgtactcgtcttcctgatcttcgtctataagctcatacctctcagtgatcgctctcttccctcgggctatctcagctttccttctgaagctttcatattctctttgttctctctctggccttgaagatgttgactctgtctcatccatgttgtagtcaggatcaacagaagaactgccactgtaattgctcatgattctcctgtaaaaatttagaactcaaagctcaaagtcaataggttagtctcaaagatagcaatgaaaccaaaattgttatcaataggcaatgaaataaaccctattggtcgagtacaattctgtactcgagtagactgagctgttcttgagttccctttagacgatttggatcgagtatcgtctccggattcgagtgggtatgcttcaggagatcgagtaagttgtggaggttgagttcagccggtgaagcctagaggtcgagtaaacactctgacagttcttcagggctctgttgctttcaagaacaagaggtcgagttgctgctgcagaggtcgagtgaatactcgaggtcgagtgatagtttgtggtctagtagcttggtcgtaatcaagtggtcacggagacttcgacggtgaacgaggaggagtactcgattacggaagcgcagaggtcgagtggttcccggaggtcgagtgacggaagatatgatctggtgacggcggcgcggatgtcgagtaactctcggaggccgagtgatattgtcaggatcgagtatctctttggacggcgattcgtggtgtagagagattagagtgtcggtggtgaaatgaaaagaggtaggtcgagtggattttgtgaagtcgagtgatgtttttaaatgagtggtctaggttgagttttagattctctctccagcttatcctcagcgcgtggtccacactctgttgactgaaaaaatatgcagaagatctactgtaaactgcaagaaatccttgcaagtctctgtagctcctgttggtcgagtacaatgatgtttttttaaaattttggattttaaacatcacgtatactcgactgatgtactcgaattccgtgtctccagacgcagcagaaaactttataaattttgtactccaccaggttatacactcaatctccaggtcttctgtagagtaaaagttttgaatttttactctatctccacgttgttcccttttctctgaaaaccacaaacacaattaaaacaaatcaaaaataacaagacaagaaattttttatttacagagataatcatgggacttcctcccaagtgagcttgtttaaagtcattagcttgactcctttactcctttaatcatcaagaggttcttggagatgaaccgatgtcacctctggaaggatttggtctgctaagtatttcttgagcctttgaacatttactgtaaaatctctactcttaccagctagagtgactgctccataaggacggacctcagtgatacagaatgggccagaacatctggatttaagttttcttggaaagagtttcaagcgatagttgttgtatcttttgtagccaccctggttgttttatgtagctgacttcttccaactggttaccctccccatcttggacttgaaattgctcgtcatcaacaaggaagtgcacatgcttctgctggctaagaagaatcatgtccagcttgtcattcagcgctttgatctccttcctgtgtttgtcatcagaatcagctgttcctctgacgtatcacagtccacgttgtaattgccatctgattgagcgaggttctcaaccaattcccagccttcttcaacatccttgttctggaaattcccattgctagctgtatccagaagcattctgatgcgtggtaggactcctctgtaaagagtgctgagcagagaggctttagtaaagccatgatgagggcattggttggtgtaccccttgaaacgctcccatgcttcacagaagctttcaccagtcttctgtgagaaaccagaaatctcatttctgagtcttgcagttctggcattggagaagaactttgatagaaaagccttcttgcaatcatcctaggtggtgattgagtcatggggcagattcttctcccagatgtgtgctttgtcgcccaaggagaatgggaacaaacggagcttgaatccgtcttcactgacaccattgatctttgttaggttgcagagcctatcgaattcatcaaggtggtcgagtggatcctccattggcagaccatggaatttgttcccctgaatcatcgagatgagaccactcttaatctcgaagttgttgttctggatcgcaggaggtgcaattcctttcctctggcggtgatcacgtggtgcatctccagcaccaatgttggcagggccattttgttgattctgttcttcagccatttcgagtggttgctgagatacaggggtgactgtggttctcctttttctgagttcgcgagctatgcggttgatgttgtcgtcgaaaaggaggttctgattgcctgttgatcgaattcgcatacagcagaggtgtacctggatcaagaagacaacaagaaaaacacacagttagtaaccgaaaagaaaattgaaaaagaacttgatctaagcaagtctgaaatctcaaatgtaacaaacaaacacccaattggcaacggcgccaaattgataataggttttttagtcaattatcctaaaacaccaatcatatcgttgtagtattttaggttgtcaatccaaatgggtgtgatgctaacaatcaagatgtgatcagaagtcactaagtcaagccaagcaataacaggttttggtgtgttctagcagttctaagtgaacatgcagaaaacagaaaatcaaacagaaacagtaaaacactcgaccaacacagctctttgcagaacactgggtgaggtcaagtgacaggtcgagtaacagacagaaaatgaaacacagatactcgactgtacagtctgttgccaaacaactaggtggtcgagtatgaggtcgagtaacaagaaagaactgaagaaattaagcaacagataacaagatgcagtaaacaacagtagagtaaacaaagaattcaatcagataaagaattcctgaggatggggtaattgagtagtttcgttttctcagtttacaggtgattgacatgctcagtaaattaaccttagataacaagttcattaaccaaatctaagtgccaccgcaactgagaccctcaagttaacctagtcccagactcaatcaccattgacgagagctaacctaacaggcattacgaatcaacaagttaaagccaaaacgctccttgcaaccaataccttggtacagggtcacgaatctctggaattagtggttcaaacatttcatcgaacaccttttgggcacggaaatgtctgggctcaaattccagttgatcagaaagcaataggcattaagaacaactaatccagaagggatctatcaatcaatactcaatcacctagcatactgagaatcctacactactctaagccatcctcaaaaacctattcactactcagacatcataacagaaagcataaacgttgaacaggtggaagacatgataacaacagtgtaacaacatgatgataacagaatgaacaacagtaaacgaaatcaagaacaaaagctgaatactgaatactgaatagataaagagaaatcgggattacaaaaagtctagaattaagatccatttgctgtgggtcataccagccatgtaggaataccatatcttgtttataagagctttgatacatgcaaaatattcgaaaacaatgtccgatcatataattttcgccctgtaatatagcaaatatcacgaaaaggcccgaaaaagtacattaaggtcaaaattaggagtagaataaaaacccaatagaagaattacattttccttcctcattcatcggagagctctctttaggatttccgaaatggtatcacatgcgaagttttgcctcactatctaaaagttatggagtcatacatttttaacaaaaaaaagaagagaaaaaccgaaaaagaaaagagggattcaacacgaggactttccgggaggtcacccatcctagtactattatcgcccaagcacgcttaactgcggagttttaatgggatccggtgcattagtgctggtatgatcgcatccgctactacatgcaatgcaatcgtatctattcttttttgaagactttacgatccatttgccatgggtcccaccagctatgtaggaataccctatcttgtttataagagctttgatacatgcaaaatattcgaaaacactgtccgaacatataattttcgctccgtatatagcaaagatcacgaaaaggcccaaaaaagtacattaacgtcaaaatttggagtagaaaaaaaaaccaatagaagaattccattttccttccttattcatcagagagctctttttgggctttccgaaaaggtatcacatccgaagtttggcctcactgtctaaaagtaatagagtcatacattcttaacaaaaaaaagaggacaaaaaccgaaaaaagaaaagagggatccaacacgaggactttccgggaggtcacccatcctagtactactctcgcccaaacacgcttaactgcacagttttgatgggatctggtgcgttagtgctggtatgatcgcatctgttactacatgcaatgcaatcgtatctattcttttttgaagactttacgatccatttgccgtgggtcccaccagctatgtaggaataccctatcttgtttataagagctttgatacatgcaaattattcgaaaacaatgtccgaatatataacttttgctccgcaatatagcaaagatcacgaaaaggcccaaaaaagtacattaacgtcaaaatttggagttggaaaaaaaaacaatagaagaattcagttttccttcctcattcatcggagagctctctttgggctttccaaaatggtatcacatgcgaagttttgcctcactgtctaaaagttatagagtcatacatttttaacaaaaaaagaaaaagaaaaaccgaaaaaagaaaagagggatgcaacacgaggactttccgggaggtcacccatcctagtactactgtcgccccaagcacgcttaactacggagttttgatgggatcaggtgcattagtgctggtatgatcgcatccgttactacatgcaatgcaatcgtatctattcttttttgaagactttacgatccatttgccatgggtcccaccaactatgtaggaatatcctatcttgtttataagacctttgatacatgcaaaatattcgaaaacaatgtccgaacatataattttcgctccgtaatatagtaaagatcacgaaaaggcccaaaaaagtacattaacgtcaaaatttggagtagaaaaaaaaccaatagaaaaattcaattttccttcctcattcatcggagagctctctttgggctttctgaaaaggtatcacatgcgaagtttggcgtcactgtctaaaccttatagagtcatacatttctaacaaaaaaaaatagagaaacaccgaaaaaagaaaagagggatgcaacaggaggactttccgggaggtcacccatcctagtactactctcgcccaaacacgcttaactgcggagttttgatgagatccggtgcgttagtgctgatatgatcgcatccgttactacatgcaatgcaatagtatctattcttttatgaagactttactatccatttgtcgtgggtcccaccagctatgtaggaataccctatcttgtttatgagagctttgatacatgcaaaatattcgaaaacaatgtccaaacatataattttcgctccgtaatatagcaaagatcacgaaaaggccttaaaaagtaccttaacgtcaaaatttggagtagaaaaaaaaagaatagaagaattcaattttccttcctcattcatcagagagctctttttgggctttccgaaaaggtatcacatgcgaagtttggcctcactgtctaaaagtaatagagtcatacattcttaacaaaaaaaagaggacaaaaatcgaaaaaagaaaagagggatccaacacgaggactttccgtgaggtcacccatcctagtactagtctcgcccaaacacgcttaactgcacagttttgatgggatccggtgcgttagtgctggtatgatcgcatccgttactacatgcaatgcaatcgtatctattctttttcgaagactttacgatccatttgccgtgggtcccaccagctatgtaggaataccctatcttgtttatcagagctttgatacatgcaaaatattcgaaaacaatgtccaaacatataattttcgctccgtaatatagcaaagatcacgaaaaggccccaaaaagtacattaacgtcaaaatttggagtagaaaaaaaaaccaatagaaaaattcaattttccttcctcattcaccggagagctctctttgggctttctgaaaaggtatcacatgcgaagtttggcctcacggtctaaaagttaaagagtcatacaattttaacaaaaaaacatagagaaaaaccgaaaaaagaaaagagggatgcaacacgaggactttcttggaggtcacccatcctagtactactctctcccaagcacgcttaagtgtagagttttgatgggatccggtgcattagtgctggtatgatcgcatccgtttactacatgcaatgcaatcgtatctattcttttttgaaaactttatgatccatttgtcgtgggtcacaccagccatgtaggaatacgatatcttgtttataagagctttgatacatgaaaaatattcgaaaacaatgtccgaacatagcaaagatcacgaaaaggcccgaaaaactacattaaggtcaaaatttggaatagaaaaaaaaacaatagaagaatttcattttgcttcctcattcatcggagagctctctttgggctttccgaaaaggtatcacatgccaagtttggcctgacggtctaaacgttatagagtcatacatttttaacaaaacaaaatagagaaaaaccgaaagaaaaagtgggatgcaccacgaggactttttggtaggtcccccatcctagtactactctcgcccaaacacgcttaactgtggagttttgatgggatccggtgcgttagtgctgatatgatcgcatccattactacatgcaatgcaatagtatctattcttttttgaagattttactatccatttgccgtgggtcccaccaggtatgtaggaataccctatcttgtttatctgagctttgatacatgcaaaatattcgaaaacaatgtccaaacatataattttcgccccgtaatatagcaaagatcacgaaaaggcccgaaaaagtacattaagctcaaaatttggaatagaaaaaaaaaacaatagaagaattccattttgcttcctcattcatcggagagctctctttgggcttccgaaaaggtatcacatgccaagtttggcctgacggtctaaacgttatagaatcatacatttttagcaaaacaaaatagagaaaaaccgaaagaaaaagtcggatgcaccacggggactttctggtaggtcccccatcctagtactactctcgcccaagcacgcttaactgcggagttttgatgggatccgttgcattagtgctggtatgatcgcatccgttaactacatgcaatgcaatcgtatctattcttttttggaagactttaagatccatttgccgtggctcccaccagctatgtaggaataccctatcttgtttataagagctttgatacatgcaacatattcgaaaacaatgtccgatcatataattttcgccctgtcatatagcaaagatcacgaaaaagaccaaaaaagtacattaaggtcaaaatttggagtagaataaaaaaccaatagaagaattccattttctttcctcattcataggagagctctctttgggctttccgaaaaggtatcacattccaagtttggcctcatggtctaaaagttataaagtcgtacatttttaacaaaaaaaagaaaagagggatgcaacacgaggactttccgggaggtcacccatcctagtactactctcgcccaagtatgctcaactgcggagttttaattggatctggtgcattagtgctggtgtgatcgcatccgttactacatgcaatgcaatcgtatatattctttttttgaagactttatgatccatttgctgtgggtcacgccagccatgtaggaataccatatcttgtttataagagctttgatacatacaaaatattcaaaaccaatgtccgaacatataatttcgccccgtaatatggcaaagatcacgaaaaagcccgaaaaagtacattaaggtcaaaatttggaatagaaaaaacaaacaatagaagaattccattttccttcctcattcatcggagagctctctttgggctttccgaaaaggtatcacatgcaaagtttggcctcacggtctaaaagttatagagtcatacaattttaacaaaacaaaatagagaaaaaccgaaaaagaaaagagggatgcaacacgaggactatccgggaggtcacccagcctagtactactctcgcccaagcacgcttaactgcgtagttttgatgggatccggtgcattagtgctggtatgatcgcatccgtttactacatgcaatgcaatcgtatctatctttttttttaagactttatgatccatttgtcgtgggtcacaccagccatgtaggaataccatatcttgtttataagagctttgatacatgcaaaatattcgaaaacaatgtccgatcatataatttttgccctgtaatatagcaaatatcacgaaaaggaccaaaaaagtacattaaggtcaaaatttggaatagcaaaaaaaccaatagaagaattc

SEQ ID NO: 1333 - DNA, 86585 bp, Arabidopsis thaliana
aagcttgtagtgtctcatatatttcagcgccagtttgtatcctattggcattcccttcctcaacagtgttatcaaaccaagcttttctatatctgtaacgatggccaggcggtagtctctttctattccccatatagacaaacttacggctaaacttaagccatctggaaggtgtatcttttttccacatacattgcaagcttgtttccccttcactttacatcgagacaatgttcctagggctggatagtcactaatactccatagcagcatggctctaagtgtgaaattctccttcgcaaatgagtcatatacttcaatacccacaaatcttttaaatcgtctatcagtggtgccaagtaaacatctatgttattaccaggagctgttggaccagggatcagcaaagacaacattatattctcagccttcatacacatagtcggagccgtgttatatttcaccaacaatactggccatgtgtgctgtgattggtgttttgcatggagaaagggttcaacccatctgttgaaattccaagtcgaagattccttggttcagcagcaaagtctggccatttatcattcacttgtgcccaagatatagaatcaacggggtgtctcattataccatcttcagtgccatttatatagtgccaacgtaaatcttcaaccatcttttttgatctaaacattctcctaaatctgtccttgattggaaaatatctaaggaccttggctggaatcccaacctttatctcattactgtgcttatccatttcccatcttgaaactttgcatcttggacagctatctaacttctcaaactccttcctatatagcatgcaatcattcttgcaagcatagatattttcatattcgaaaccaaatatcttcaggattcttttgattgcagctaaactcttcggaagtacattgtcttcaggtagcatgtcttgaattaaatccaacagctgatcaaagtagttcttcgacacaccacttttaaccttgaatctgtaaagtcccataattgctgaaacctttgtgtatttgatacaatcagagtacaatggagtttcaacttctcttaacttctgcctaaactcagtttcctctactgcttcatcgtcgtttccctgatcatcattcgtctgatttggttcaccttcacccatagagaatgctgtcttaaacaagtcaaatgcctctgtttcatattgaggaccaccgtcttctgtagatgctcttttttcaccatgagtactccaacaagaagtgttatacttcttatccataccccttatcactagatgctcaacaatttctttgatagactgatggcataaattgcgacaatctctacacgggcatagcatttcagacagattgcccaatcttcttgctgatgaattggcgaagtttgttgctccttctaagtactcaaaactattcctacgttgtaaatttgaaaagaacttagctagatttctttcaatcggttaataagctcagaaagaatttagtgtataccttggcagcgaaatccacatcttatccatttggttacgatggagatggatccgttctgaaattgctgaaccctaaaacatctgaatgaaccctaaagcgacttggagagattttggtaaaccctaaacacgagttgtgtgtgttctgattttttcgtttcaccgcgaaatcagacactaaagaatgaacggctcagatcaaaagaagtgaaacgaatcgaacgatgtagattgcaatctcggaggttagtcaccattggctaataacacgaacggctcagatcaaaactagagtgacagatcaacggtctacattaatcacgtctacaataagaaaggacggctgagatcaaagttggcgatacatatctaacggtgtggattgcaatctcggaggttagtcactattggctaataacaagaacggctcagatcaaagttagcgagacagatcaacggtctaggattcgtcccccaatctaggaggttacttttcattggcaaagaataatttttttgtttcaaatccaaaattagcatatacaatttttttattaatcaaaaaatataaattattttttaaataatttcaatataataatttcaatttttaaaatatatttcttataaatataaaattttaaaattaagaacaattaatataagatagtattccaactatctaagttatatgttcataaacactaaggcttagtttaaggtttagggtttaaactttgggatttatgttttgcactttaggatttagaagttttacttcaatgtttgagattaagatttttaactttaggatttaattagagttttcactttagggtatagggtaactttagggtttagggtaaatttggggtttaggcgttttaacattggggtttagtgttttaatttggggtttaaagttcaaatttggggtttaaagttcaacttttaattagtgttcaaatttggggtttagagtttaaatttggtgtttaaaaacacaatccaaaatattacacaatctggtttaccaataccataatattacacaatcttataatacaatatcggtttttggtacaaaaacacaaactgaacctattacacagtctaagtttcacacgaactttattttatcatttggccatgctacaactgaacctattgcatcagaaatgtattcgatctctggatttggcctccagaccattgcattaccaatcttagccacttcaacccagactttgcttgcattaggacctaggggtacattatggcaagcatcgttcgggtctgttgaaagtactcttccttcagctaccttatgtccagaattgctgcaatctaaaagaaaacacttctgctttggactttttgtggaactgttgctgcctgaactctacaactcaaagccaataataaaagcaagttccaacatcaatgaaagttccaacatcaaccagcagacaaacaaatgaattaacaaggttacaataacaaacctggactttaggtagtgctgcatctgtagtggtggcagccgtgacgtcaatctttaggactggccatgcgattttctcgttaattgcatcacccattaaacaaatatcagtagttggcctccacaaatgagcattaccattgaacaccttcacaacttgaatactaacagcacttggttctagaggtatattgttaaccttctctttggagttagatgagcacacaacaccttcagcaataacctcatcgtcttcattagtccaatcatatattttgaatcttcgagtttcaccttccttggtttgctaaaatgtaagaagctaatgattagagatatatcatggacccttatacaaaagcactttaagaagcggttggacccttatacaaatgtaagaagctaatgattgggaaacttgaccatggatacatcttcagaagcggctggacccttatacaaaagcactttgtctattggccaaggtattttgcatcccacagcttcttcaagatataacacatctgttgtaggcctccacagagaagcttctaagcttagtgcagacttaacaaggacaaccattgcattaggaccaattggtatacgaccaattttgtacatcggttcagcagaacacaattctccttcacctacaactacatctcctgaatgaatccaatctaatatttgtactctaactccttctttgaatccaccaaaactctcagatgtttcagtatcattgtaacttttctgagataaggaacaagaattattaaaaccaatccaattaaccattccagatgtttcagtatcatcattccctttaactgagataaggaacaaggacagtttaccttttttccagctaagtctcggaccattccctttaactcctgaatctcactttgcatttctgccatctttgcgtctctagcttgcagaaatgctaacttagtagccgtaatccctctaccaaacccccttactcgtccaggtttgtcttttcccaaaatcttgctcacagcatcttcccttatgttttcacaagctgatgtagagtccatttgactatcaagtgaatgtatttgttcctgatcatacaaacatttaaaccaaaaaaaactaatttatcataatccattacttatacacaggccataacaagttccagaattctcaccatagtctcagcaaattgaggcttcacaggtctaccatcagcatgagtgtgtcccgcaatccataccttactcctagtcaccttacttgggtctgtactctttttttttctatataaagtacatatatatcttagtaccaatttgttctaacaagaatacaatatatatagatatttgacaactattattaccatatcatgagctaaacaaagcattcctttacggctggtggtgtgaggaatctgattttgtctcatcttcctgtatttgttacttatttcctacatgataaatatcaacacattaaatctatcagccatgacatataaacaagaaagttgttagttgtagataactaaccgtgaaagctgcgttagtcttgctcctaacccaagagttccacacttgaatggatgggatgttgctgggttttaaatctattctctcagcaatagtcttcgcagcacgtacttctgaaactagccttgacttccaagccctccagatatttccaatttgcttaaaaataacaactctctaccattcttcttgcaagttaaacctcccctacatcacatacaacaatcaaaagtcacacctgtttcatttatgttcaaccaaattttttttccatataaatatatacatgaatttcttcccacattgcttgtttagccactgcatcaattttcctccaatcagctagtgtaaccggaacgtgttccctcacaaggacacaaagaaaagatgataatgttattgaaccaggtccaacatgatcaccaaagtcagtgaaagtaactgaaaccttttcattaggattttcatccactttacgcatctttgttggtcctctcttctttctttctttcactctttcctccgctactttacttccttcaccatcttcttccatattggcagcttcttccatattggcagcttcttccatattggcagcttcttccatattggcagcttcttcattctcctgctgttcttgtccagtcaaacaagcttctccttctatctcagaatcttctttctcatcttcagacatttgctttctcagtctgatcagcctccggtactgttacatctttgtcattacccttctcttcttccacaacatccggtgtaacatcttctacctcatcatcttgcggtgtcacatcttctacctcatcatctacaggtgtaacatcttctacctcatcatctcgagcagccattttcttgcttcttcttgtagccactttctttgcttttcttttcttattcacctttaatgttgttgcaggagcaacttgtggtgttatatcttctacctccaagccttggttacgtctactacgacgagaaccaactttacctccacctcttgtcttcaccatttctgaaactgataaatgaagaacagtttcaaccgaaacccaaaaatcataatcgaaacccaaaaaaacataatccaaacaagacatgcatgttctccgaaactaagaatcaaaactaacaaatcaaaattgatacccaaaatcacaaacttccgcatccatgttcacacaagccaagaatcggaaccacaaatcaaaattgttttccattccaaagaacaaagaagctatgattgaatgagaacatacctattgaagattgtagggagattgtgataaatcgagttgagagactgagaaatcgaattcagagactgataaatcgagtgaaataaagtgcgaattagatggagagacagagaaagcgagtgagattgagagaaatcgagtgagagttgcagattttgtgctcaataactcaagaaattcgaatgatacctcaagagagaaaatgagagatcgagaatgaaaagttgattttttagatccaacaaaaatgagaaagttattttttaggattttgtttattttgccttagccaaaatttcactttttcctcatacaattttcaatagcgggatactaaagattagaaccacaaaattgccccgcgtcaatttcattatcccgctttaataatttatagcgtttacaatatacaaaacgctatctttaaaacacgattaagtcaattatagcacatagataaaaaaaaacgctatcttattatgctatcaatacccacatttcctgtagtggtcattactcgcaatttgtacaagaaaacctgattgatttcataagtataaatattacacaacatgttaccaaacatttataagtttcatggccagggcctagtgccaaaagcacgatacatattagaaacatacttgttttacaaaaggcacaaaactactgggtttcctaatgtccaccacgccctctatttcccactacgggtttcctgcaaaacaagtagaatcatgagtaatctaagattactcagtgagcttgggattccctgcaacagacatttgtttaccccaacccaaatacccaacatgaaacacgcaacatagaatggcaacgaaaggtagcttgtcgaagcaactacataaatatgcaatgcattaagactccagttttattaaatcttttaaatagggccggatatgctgccaaacccaacaccaaacacacactcccgtgatctcccgcattacaaccacaaaggtatgcaatcggagcatcactaccaaacgctacaccgtcgtgtagacactcggccaaggtaacaacgttacaagaccccaaaaatagcacggttcactacgaaggccagacttatcacgatcttggcacgcttatagtctttgcctcctaccacaagcaccacgtaccaagaccccaaattttaagatattatgaaacatatgattaaatcaacacatagaatcatcaatatctcagcacaacctctcaaccataagcaatagcataagaatctaaagatcacatatgcaatcgaatataaccattcaaacaattcatataactcatgaaatcaatcaagaatgcatgaggatatgattatgaaacttaaacaattatccagaactcactcagtaaccaacggaaagcttctaatgattcaggcagagttctcggctatgggaccctaacttggatcgaacagacgggttaaactcggcagcctctcactcccacctcaatttctcttcacaaatcaaatgtggtcgagttgggcttttataggcaagggattggcgagtcagcatgtccacgtgtcatgagtatgggcgagtcaccaatccacgtgtcatctacccgcgatgacacgttcgctactcaagcggatgagtgacacgtggccacctaaatttcggctccaagctactaatattcgattccaaacaacttttcttgggccccaagttagccgagccacgcatccttggcgcggtcaacagtcggtcaacgcttggcaaggcaaactttcgcccgtggcacgcccgttcttgcccaaacttgcccatttgtgcccattcttgcccaaacttgccctttgatattctatggtgttttgggcacctaaggtcaattggccatgcattcgggcaactttcgaaaattcggactcttgcccgtggtcgatgtccttacgcgggtcactacactatccgtttgagattatgtgtgatgcatcagattacacagtaggaactgtactaggccagataatagagaagaagcttcatgtcatatattacgccagccggacgttagatgaagctcaaggaagatatgcaacaactgagaaggagcttctaggtgttgtattcgcatttgagaagttcaaaagctatttggttggatctaaggtccctgtctatacagaccatgcagctttgaggcatttgtatgccaagaaggatactaaaccaagactgttgaggatgatacttctgttgcaagagtttgacatggaaacaatagacaagaaaggcattgaaaatggtgcagtcgaccatctgtcaaggatgagaattgaagaacctattccgataaacgactcaatactagaagaccaactcatggttgtagaattcttcagtgggagctacaacatgaaagagttccaccaactaaatgctgttgagggaagatctccatggtatgctgatcacgtcaattatttgacatacaagaaagtgtcaaatattctgcaagcaggcttttggtggccaacaatgtttaaggacgctcacgagtttgtcccaaaatgtgattcatgctggagaaatgagatgcctcataacccaatcttggaagtggagatctttgataagtgtgcattttacatgttttgagcatccatttgttatcactattgcatcatatcaccactgttttataccatttctcatcatttgtcatcactttgcatggttaggatagttttgcatgcatgttgcatatatgtgttgatttcaggtaatttggagctgttgactagctaattggaagaagcggaaaggaatcatgtcaaaccactcgaccagtcaagatctcaacagaccactcgaccccctggtcgagtagaagacctcagcactccacgtcacaacttgacccacatggtcgagtacgaccaggactaccactcgatcacattactcgaccccctggtcgagtatcatcccgtccaccacatcaccttcactcgatcacactactcgaccacctggtcgagtaccttcatcaccttcactcgatcactctaccaccaagccgagtaccaccatccctatcactagactacatactcgattgccagcttcagagtcttcttcattccgcactcaaccagacactcgagcacaaggaagaaaagaagactctagcttatcactcgacctctcactcgaccacctgggtcgagtgccgttcttaatctgtcccaagactgcgtcgttttgagtattagggtttcacaaatattttgctataagtagcatgtactttacatttttgtttatctaagttttattccgcagacattgtgttcttgacgtttttgaatccgggtttctcttaatctattcagtattcagtatttgttcttgatttcgtttactaagttgttcatcctgttatcatcttggtattactctgttgttatcatgctttcattctattcaacgtttatgttctctgcaatgatgtctgggtagtgaataggtttctgaggatgggttagagtagtttagaattctcagtatgctaggtggttgagtttgatttatagatcccttctggattagttgttcttaatgcctattgttttctgatcaactgaaatttgagccaagacatttctgcgcccgaaaggtgttcgatgaaatgtcttaaccacttattccagagattcgtggctctgtaccaaggtattggttgcatggagcgctttggctttaacttgttgattcgtaatgcctgttaggttagctctcgtcaatggtgattgagtctgggactggtttaacttgagggtctctattgcggtggcacttagacttggttatcaaacttgttgtctagggataatttattgaccatgtcaatcacctgtaaattgaggaaacgaaactactcaattaccccatcctcgggaatttctttatctaattgatttctttgtttactttgctattgtttattgcatcttgttacatgttacctagtttttgcatttcttgcttgttactggactagatattcgaccacccagttgtttgggaacagactgtgcagtcgagtatctctgttacattttttgtttgctactcgacctgtcacttgaccacattcagtgctctgcaacgagctgtgttggtcgagtgttttattgtttctgcttgattttctgtttccttcatgttcacttatgactgctagaacacaccaaaacctgttattgcttggcttgactctgtgaactctgattgcatcttgattgttagcatcacgcccatttggattgacaacctaaaatactacaacgacatgaatggtgttttaggataattgacttaaaacctattatcaatctttgatgtatggggaatttattttacgggtccattcccatcttcatacggtaacaagtatatactggtcgccgtagattatgtatcaaagtgggtcgaagctattgtcagtcctactaacgatgcaaaagttatgctaaagctgttcaagaccataatcttccagagatttggagtttccaaggtagtaatcagcgatgggggaaagcatttcattaacaatatttttgagaacctcctcaagaagcatggagtaaagtacacggtcgccaccccttatcacccacagacaagcgggcaggttaagatcttcaacaaggagataaaaataattttggaaaagactttagggattacaaggaaagactggtctgcaaagctcgatgacgcactctgggcttacatgacagctttcaagacccccattggtacaactcccttcaatcttctctatggaaaatcatgtcacctacctgttgagctcgagttgaaagctatgtgggcggttgatccaggaactttgacataaaaacagttgaggagaaacggttgatccaactaagtgaccttgatgagatacgtttagaagcttatgagagttccaaaatctacaaggagaggactaagcttttccatgataagaagatcatcaccaaggatttccaggttggaaatcaggtgctgctattcaattctcgcctaaaactctttccaagaaagctcaagtctagatggtttggccccttctgtgtcacttaagtccgcccttatagagcagtcactctagctggtaagagtggagattttacagtgaatggtcaaaggctcaagaaatacttaacagatcaaatccttccagaggtgacgtcggttcatctccaggaacttcttgatgattaaagaagtaagggagtcaagctaatgacttcaaacaagctcacttgggaggtgacgtcggttcatctccagaggtgacgtcggttcatctccaggaacttctctgtacatatgtttgttttgtttgttatttttgatgcgttttacaagtgttttcaagagataaccgccaatgtttaagtgcaatggatccaatctcagagattcactcgactgcatgctgtagagatcgagtgtctgtgtgcaatcaagtataaacatggtttcagttggagctccaagatgtcactcgatcacactggtcacatgctgatgaggatctgtagtcgagtaagtttgatgattcagatcctttatactggaccgtgtactcgacaaacagagatttacagaggatttcatgatttcctgaggttttgccgagtcaacagggaactgagattaaagacaaaacaacagagcgtggaccacaagcgttttctccctaaagataagatggcgagagaatcacaaattcaatctccaccacaccctttgaaatcgccctcatcctaataaaaagtaaagtttactcgacccatctctcttcatctatccaccgacaccacaaatcgccctctctctctctctctctcgtccaacgaattacttgaccgctgtgaaaagaatcatctactcgaccacccttgcgccgccgcagtcgagttccccatctcattaactgtcaaagcctcaagaaccacttgatttcagccgagaactactcgatttcaaccacttgacttgaacgcctcaccaccattaccaagttcaccatctctactactcgacagtcgattcgtgattctgtccctgccaattctgcctcaccaacgaagtactcgaccgcctgatttcacccactttacatgacttcctcagctttactcgacctctgttctgttctacttgattcaaatcgtgaaagaagaactcgggaacggttcagtttactcgagtactaggttgtactcgaccaacttggtctattttgttgactgttgacctctgttctgtactcgactacctcagctttactcgacctctgttttgctcattgttttctcttagactaacttattaacttttgagctttgagttctaaatcttttcaggactatcatgagtaattacagtgacattttgtcaatggatcctgaatatcacatggatgaggctgagtcttaatcttcaagaccagaaagagaacatagagagtatgataatttcatgagaaaagctgagattgctcgagggaagagagcaatgacagagaggtatgagctgatagatgaggagctggaggtcgagtatatgcatgagcattctcacagagccacaaaacttctccacaagcctgatgtattgccagctgaggagtatatcaggctcttctagctgaatgagttctgcagcacaagatatcactgcttgactacgcgggtacagcttgaattactagaggatgttcagcacatgtaccagagttgtcacctggagactcatatggcttacccatatgtagcttatggggaagaaacgatttagttcctctccacactaaaagtggagctttaccaaggtatgacttcttatgatttggaaagtgaaggattgggattcttgcgattctctgtgtatggccaggattatatgctatcaatcacgcgcttggaaggactgtttggtttccccagtggaacggggactaagcccaaatttgatagagaagagttgaaagatttatggatcaccattggcagctctgtaccactgaattcttctagatccaagagcaatcagatacgcagtcctatcatcaggtacttctagcgttctgtagccaatgtcctctactcccgagagataacagggactgtcaccaatacttatatggagatgatcgttatggctctcaaaggcactctccgacaaaccaagaaaaagatgtctctccaaggtgaaaccaatgacacacctctctatacttcttcttatccacctgttaggatacaagagttgggctgttagcaataaccacaagagagcacgaggcgctatttgcatagggtgtgttgtgacaccgattctgatcgcttgtggagtcccaatcacatctgatggacttgagccacggacaatggatatcgagcatctacatcactgggaaatcctagagttcgcaatgattggcgacagacatcgtttcaggcttgagctctctacagataagaaatccaacatccttctccctagacctgaggttacatgcataatacagggagataacattgatttcaggcctgagcttgaaaacctctattatgagaacactcaaccaacagatgaggatgttcatacagaagaagttactaaggatgagatggatgaggacagagaagtggagtatgacacgagaatgtatcattttagtgagcatgtacctccagcgggggagaccaagagtttgagtgaagctcatagaaacaacagcaagttgcagaagtggtgcaaggaacaagataagttactcattaagtgcttcaagactatcaagtttctcaaggagaagctaagttgctcctcttctactacagctattccacagggacagccccctcaggacaagccatcgaggtgatttaagtctcacatgtccctgctagacattcatcattcgaatcctgggagcacaataggaggaagagggctatgctcgttcgctctagtagtagatcacgccttatccactcgaggagatcactcgatcgcggtggtggccgcagcagaaaaagaggtcgagtacactcagggcggtggtggccgccacataggcaatgaggtcgagtacccacacgctggagctgagacagaacaaggcgactcttcaatggcctgggagcaggcagagacagccattgccgaccaactcgattcattcttagacttaggtaagcgcctcacttcaccattgtactatatcatctcttgtttatattgtgttgctgtgacgtgttttatcctgaatactctcttccaaatttggtcacatagtggactgtgtgatttaagtttgggggagggctcaggaggtgtgtgttgcattgtatatactcttgagtgtgcattcatctaaggcatagaaaaaccaaaaaaaattgaaaaatatcagaaaatgatttcacaaaaacagagtgttcatatagttgcattgcatttaggatcgagtctagagtgtttcgtttaggattgttgcatatgcatagggcataactcagtgccctcgttattagttgtctgatgcgcagtcaatgaaattaaagtaaaattgtaccatgcctagattgctctactcgatcacactgtcatgatttgataccattccctatcaatttgaacctaaatctgattttcaattatcatgtctacgtcaatttgaactcatggataccctaaaatacttggattttcttattcattttaaccactcttgttaatctaagtagctgactctccttattagtgcagttaatccgaacccaaacctaaactttctttcaagccctatatcacttgttagtgtttgtgaggtcttattccgattaagcttggtagaaagtattaggtttgtagcgacatagatagtgtctcatgtagttctagttcgcgttatccgaattatatagaactaggtgggcgcttatactctgggttgggatgtgtctaaaagaaagaaaagggtggattcattggtaaggaaaggtaaaagactctagggtgaagtaagctaaagaagcagaaaaaatctagtaaaggttttgggatttgtaaagaaaagaaaaggattcttgttagctaatgaagaagggcaaaagccctcagttttaaaattttttaacaggaaccttagttgttaaagaaattcaaatccgctagatatatcaaagtgttgagaaagcttctcctagagttaagagaaaagaaaagaatgattagcaaaagggcttaaaagattcatgaatgcaaagggtagatttaagttcttaatttgggactaggatgggattaccattagagcttcattggttatactctgggtaaatgggatcttatctctgtatgcatagcttgagacttacctttagcattctactaaagcttaatcatttttgagagatcccctgttactgaagcctattctgtaagggaccatctttgtctcttgacctataccttagcctaatgagtttattgatgatgcattgcttgattcacgttccagaactaataaatgttaaaggcatgggtagatttgaaaacatgtgtaggtcgagcataatagtcggattgattaataacaaggcatggctaacgtttttttgagtagaattcaatcatatcgcagcttagaactaccaacttggacattgatttcatctgatttatctggtgtttggctttgagtccccgctttcaaacctcacctccagcttgttcttaattgtttgcttgagggcaaccaaagactaaatctgggggagttgataagtgtgcatttttcatgttttaagcatccatttgtcatcattttagcatcatatgaagattgttttataccatttctcatcatttatcatcactttgcatgtttaggatagttttgcatgcatgttgcatatttgtgttgtttaaggtgatttggagttgttggcgagctaattggaagaagtggacctggtcatattttttatattaaaaagtaatactttgatttcgagcttcttcctctgccgtcttcttcccccgatgagctttattctgctgcatttgttgccgttttttctcctccttcaaggtgcgtcaagctacgaagtccaggtacgtgcatcgagttagagagagtttcaaaagctttcaattaggaattacatattttgagattcagtccaattagatttggattattgtgttttagtacatacattagaagtttaaatatagtttcacggtcgatttgctctataaatgggtaaaatatgatttcacatgctgattcgtactgaattgaactcgaatccaatctttgttcttgtcgcaaatataatactggtagaactaggtatagttgtaccgaaacaaatggtttttatatagatagtatgttttaatagcattagtattacttacacatgtagtacttcatttatgtattagtattagtgacacatgtagtatttcagaattaggactagtattactgaaaatgtagtagaaccggtaatactagtaatattgactgagtataggtattgttttggcaggatacaatgagagagaacgtgatcatatattttaaactcgaaggttgtatgtatagttgtatgatgaagacattaggggagaagataactctctccatgttagaatatagaatattgacgaagcttggattagatgaaaataaggttaaattccatataaggtacactccatcgttgttcagagtagaggaagagatgaacattcatgatgatgaggatgtccttattaatataacatccgcaaaaaataaccggagaagtgttttggttgtggaggagatctctaaaccgctcgagcaattgccaaagcaattgtctagagttgagaaaagttatgttggtaagaactatgcggagttgaattcagcggaggatgaaatgagagtggataatgctgccctcatcgtctgcttagaagaggaacaatgaactacccaacaacttgaggaaatagtggaggaggatcactagactcaagaagatgaaacacgtgatgaaaccgttgatgagtctaggaataattatgatagggggaacaatatgttgagccgccgcctgctgtagaaccggtcagtttaaaagaatgagaagacgaaattggtttgaccttatctcaagtatttccaaacaatgcaacattgcacgaggtggtggatagagctgcatttgttaacaattttggttaggtgattaagaagtcggataaggagaagtatgccctaaagtgtgccaaagaaacatgtttttggcgtttacgagcgtcaaatatccgtaatacagatatcttatggattagaaggtacaataagatgcatagttgcactcggctaagtaaagttactagtaggatcagaaaaaggaaagacaacccacaattagttgtagctcttcttcatgatcattttctgggacatggaaactctagttccaagggttatcgtggagctggttcaaacaaaattaggtgtgaaagtatcatactcgacaacactaagggggaactataatgcaatttgtgatttaaaaggtagcccagaagaaagttacaaggatatcaatagttatttgtacatgttgaagaaggtaaatgatggtataataacttatctaaaattggatgagaatgataaattttagtacatattcatagctatgggagctagcattgaaggctatagagtaatgaggaaagttattattgtggatgcaaaacatttgaagaacggatatggtggtgtgatagtatttgcctcggctcaagaccctaatctttaccattacatcatagcgtttgaagtactcagcggtgagaatgatgctagttgggattggttttttgagaagctaaaaacggttgtacccgatacttctgaattggttttcatgagcgacataaatgcaagcctcataaagggcatacagaacgtgtataccgtagctcatcacgggtaatgtatttggcatttgtcccaaaatgtgaaagggcatgctactaacactaacaaagacgtactcgcatggaagttcatggagttaagtcagatttacaccgtggctaagttcaattgggagtatagattgtttaagttgagatatccttcggcgaccaagtatttcagggatacaaccgtgaaagaaaaataggcaatgtgttgtttccccagagaaagatacaacttagatacaagcaattgtgtggaatttttgaacaattccggatggtcgggtgtggcggtttctgttatgatgtgctatagacttgattgctttacttgattacgatatgtttattgtggcctagtgagacgggacgaccgctctcactatgcaatgcttgcttatgcctcctttgtgatgcaggaaaagagggtaatgtgcgtggctaaccagttcgcgggactagggcaaggaaaagaggatgatggattttctgttatgttttattttgggtaacttatgttgttggttagactggtaataaattgtggtgaatatcaacttgtctaagaacctcatttgcttaataaaacgaatcgatttaagttatttccgcttgtgcatgaatttgacttgtttaataatcagattatcgcttaaactatgtctatcgaattggtaaaaatgtttaacacggttagtccgtttggctggcggttaatcggccttaggcaaatcgggttagggcatttcaatttccctcaagaaatttcatgttttggccataacttctctctacatttccgtgtaattcaaccataatttcaccctatctcttcatacaaatagttttaaaacctattccgagcttttaatcagtttagaatttaaattctctcggttataaacttgattctcttccactttgatctacgttggcttgtgtttataactatcctacagaaactcatcgccagacacatggattctgaagaagcaaagagaaggtgattttacgcgagctatagcaagaggatttgcaatcatcaacgaaaggattccagtccgcaatgctaatgccatgaatgaacgttgtgcttgactataacgctgagaagaaaggccgagcacagcctcaccgttttatatgagtcgtcgttcggctagggagagagaggagatcgccagagcaaagaggatctttgaagctgcacaagaaagggaagaacatccagtcttagaggtggaagcatctgaagaagatgttgaggttattgaaaataactcgccagccccaacatgaagaaagaataggccaaggaggaggatagaacccaccttagaggagcactatcagtacttgatggaacttaagtttgaaggcaccagatacctccacaggccaacaatgcaagcacttggaatctgcagagatgtggagtatctgatggagaaggccaacctcgaaaccttctagacttacaagtttgaagggtacaagaaggagagttccaactccttacaaccatcaaggtccatttctcttctggtgaaagtgaaagagaaaaaggaaggttatgatgcataacctttatcgtggagaggaaccacttttccttaaccatcagaaaacttgaggttgtgtttggatttcctacgaaactcggaatcctccaaaactttgacaaggacgatgtagtgaccctcgttaaggggtaagcggtttagcggaaaacatcgaggaacgtgtgaggaagaactagaagagaaaggaactagttaaagggaagaaagccaaagagatgggcaaggcaaaaatgagtgtggtcaaatctagtttgaaatggggtcatccggggcaaacccaaaacgagagaaagttgtcccaaatacatggccgattgaccatatgtgcccaaaaggtgataacccatcaaagggcaaaagaaataactatttgggcaagaatgagcaagaataggaaagaaagggcaagaatggtcaacacgggtgtgccgcgggcaaagattgtcccgccaggtgttgaccgcgccatggactctcgggccagattacttggaggccaagcaaagtttcttagagccgaatttaggtggagtggagccgaatccaccacccttacatctgaagtttccccttccacgtgtccacatcccgttaaggtcgtatatatgtcatcacgggaggatgacacatgtacctgatgacgcgcccttgccagccctatataaacccattcaacctcgaaaatgttcgaagaggaaaaaagagggaaaccatgaggatgctgatatagctcaaattgccttaagcttactttattaaataagagatcgtcgttagcacttaagggtcgaattccactgagctctcgatgttcacacaatagacttatgatgatttcaattaagctagacaaattttacgaatgtaaaagatagtaaaaatgagttgtagattcaggagattaaagtgtcgggtctaaggaattatctcgggatatagataaattgcatatctagctaatattaggattgttatcgcaccgttctcaaactcaaactatgattttagaataaccggtggcgtttcgcaaaaatctgtatgcctagagctaagattatcagagaagccgagaaatcctattctaaagcatgcattattatcacgtttgattagttcacctagtatctaaaccagagcccttctatgagcctacctgttctttcttaaatacttaggctcatctatgatagttctgataacaagtacctatggcgggtatacctattatctaatattaagttctaggtgatcatctaaaactagaagaaagaacaatcaagaagaagaactctaagaataatcgtaaggggttttcgatctactaatccatctaaatcccgattgagactccctaaacccaacaaagtgattactcacacatgattaaagtaacacacatcaaagtatgaataaaaaatcaatactagcaagaagggagtaaggaatatcttttcgaacgggagtctccacatggttttgcacctaaagtacaaaagagataaggagattagcctctccaagcttaggtctaaacattgacctttaaaactagggaatattaggcaatgaagcactttttgagtttcaattaggcaatggagcacttagaagggagtaggcacttttttaagtttttttaccataaccccccagatttcagttaaccatagttactttcctcttatttacaaataaaatattatttttcttccttctcttctctttcttccttcttcctctctcccaaatgatgtgacatctctctcaaatctcaattacacttctcttctccttcttcctctctcccaacactgactccatttatggcccacgaaattggaatctcatacttcctctacttttgattctcttttctgggtttgtcgttttatgggttgattttgtatagtcaaaactgagaaaacaagaagacttcttttggttttcttattttgaagaagataagtctagggtttctaaattttctgggttttctggggttttgtgtgttctttgattggatttgattattgggtaatttccttggtggaagaggtggaagagggataatgatgatggtggtaataatggtgatggttttgatgaatcaaagaagacatggtggttgaatacactacaagaaaacaggagataaacgacttacaagtcagtcgtttcgtagtcgtaaatgatgataatgtgactaatccgcgactaaagacagtagtcaatattccatagtcgctaagtcatgtagtcgttaattagtcgtcgaccaacgacaatattacgagtacagcctaaacagtataaattcgtgattatgtagtcgtattaattgggcacctatttggcgaccattttacgattaatagtactatacagagcgtgtgaaacatggagtcgttaagtagtcgttaatgttttacgtcaaaattacgactactatgcgattaaatattctgaaccctgggtatgtttctagttgtcgtaaaatagtcgtaaaacgtgttacgataattcgatgactgttggacgattaattgtactgtaccagggatacgattcttttagtcatataatagtcgtataaatgtatacgactattatatgtctctttcacgattaggttatgactaatttggttagtctatgactaatttggttagtctgataatagtcggtaatttttgtgactattttacgactactgtacgactaagttgctacttatttactactattttgcgactactagtttggtccgaataagaatttggtcatctattgttgggtttcttgtttgttgtttaaagtcattgattgttctcgtttgttatctaaaatgctataaaatatgaaaagacatatacacatatattgaaaatcaagttcaaatacataaaattatcttgtttctaaacaaacaacttattcaaagaaagttaagttcaactagtgtttggaaacctaaaactatggatcattagatggtggagtacttgggatacgctctgtggctgtggaagagtgagtggccatgaagtccaagaactgcggatcagtttggcggagatacttctcgactaaggacaagtgctcgagcttttccttttgatcagctgtaactcgggctgaatcggcttctcgggcagcaatctcaacatctcgcttctcattatatgcagcctgctcttcaatttgctgctgagcttcctgcagccgttcttctaaggctttaaaggatgagtcttcggggagttgttggcggttggcactgcctagagtgtctttaagacatccaagtccataaggattgcctcttgaatccctttctgtggaatgcaagaaatagagaggaagataattagtgacagaacgcaacattggactctaagactctgaattagactgcaacatcttacctcgagaaagatggctgtatactcatctagtgtgagatcccgaggacgtgaagagccatcagacacagcagaagcagccgcctctcgttcagacaacttctctctcacattatgctcataagttagagcaatcttctccgccttccgatcaacataagtgccatccgaattagtgtgtgtttggatgaacacctcactaagagggacctcttcctgcaaacacagatcacaatcttcataagtcaacagactatagaacttcataacatcacacacagtaaaacgaacatcactaatagacatgagattttgcagaaacacttaccaattcatcttggatttcttggaaaaactttggcctggagtagtggatgtgaggaccgagactgttacggtcagatagacgagctttggaataggtctaactcattttctgtgcttcttctatgtcccattaagcatacattgttccccacagagtttctccaatccatggaggctactctcgacttctccttgcggtgctaaccatgtcctttaagcgcctcttaacaatctcattgaagtagtattggactgtccatgttattaagggatcacagtggtgagttttctacaaaaaaagtgagaagttagtgaacacttgaaagattaaatagtaaagtctaaagaaagttggcgatatacaagaagcttaccgcaaactctaaaaaaaatctttctcttttatccaatggcgaacaagaccaattatagtagggagcactgaacttttgagtaaaaatctgtgtgatctttctaaccaatttagatcctctgtcgcgagtaaacctccaaacacatgcaacaatgaaagaattaaacatgttaaaaatccaaaacactacaactagagcagactatataactgaacaagagtttatctacacagacaaagaacacgagtaacaagagaacatgattcacaacagaacctattagttcatgtcaccaaatgctaagttaaacaatcaacaaatgttccacaatagttcatgattcacaacagaacaccatatagaacataacaagagcacacacagtatagatattaacaagattctacacaagtacaagaaatgcagatcctaaatgtctaaaccgaaaacatgctaagttgaacaatcaacaaatgttccagaatagttcatgattcacaacagaacacaatatagaacataacaagagcacagacagtatagaacttaacaagattctacacgagtatagaacaaaggcagatcctaaatgtctaagctgaaaatttgctaagtgcaacagtcaattatgagagcatgattctacacaattatagaactgaacaaggtcattctgaaaacatgcaaagacatctaagtctactatgttccgacaacccataacaaacattcaattccaaaaaccatcattcacaactatgttccacaacaagccattctttataacagaacacgagttatacattacacaggctaagaacacgagaagaaattagaggaagagaacataccactcgttttttggtgtgggaatcggagacaagacacaacaccattgttccctgtttggcactgagagtatcacttgcagagccaccgccgagtcttcttgtagctccagcaacgtcccaagaacttcctcttagaagttgttcccttgagacaaagggtggctgttagctggagtgtctggatttggcgactgaggagaaccttgctgagcaggctctgttggcagtggattgtagtggacctcttcagatagaggcggtggatagttgtatacgtgcggggggggggggggggggcagacgttgaagggccttgttgttgagccggctccatcgcaggaacttgaaccgttggcgccggagtgaagttgtattgctgaggaagattagcaggtcttgcggtcgtggattcgccatttctctgagtgacgttcggcgtcgtcttacgctttcgggagaaaccttgaccggtgttaggcatgatagatcgacggagggattgaagagatcaaagagatgaagaagagatccaaagatcgagtgagagaagattgaagagaagaagaagaagaagaagaagcagatcgaagagaagaagaagatgaagttgcagatcgaagaaaaagaagatgagagatcgaagaagatcgatcgatcttagtagaagaagaagattgagtagcagatcgaagaagaagaagaagagcgatcgaagaagatcgatcgatcttagaagaagaagaagaagagcgatcgaagaagatcgatcgatcttagaagaagaagaagaagaaggagaagaagatcgagataaaatggggattagggtttgagagaagaagaagaagaagatagatcgaaaatgactaagtgtttggatcgaagagaaatgactcgatttagggttttcaacactaaagtagtcgcaaactagtcgcataatagtcgcctaatcatttgggtttgggcctcaaaatttaaaagcccaataaaacaaaccgtagtcgctaagtagtcgcatttttgtcacatttaataatggatttgggcttcgaaatataaaagcccaacaaatcaaattgatgtcggtaagtagtcacatttttgtcacctataataatgggtttgggatttgaaatttaaaagcccaacaaatcaaatcggcgtcggtaagtagtcgcatttttgtcacctttcttaatgggtttgggcttcaaaatttaaaagcccaacaaatcatattcgtgtcgctaagtagtcgcatttttgtcacctatattaatgggtttgggcttcgaaatataaaagctcaacaaatcaaattggtgtcaataagtagtcgcatttttgtcaacaaatcttacttttgtcgcgcattagtcgcataagagtcaccttttacctttgaaattaaaataattctacatatgaaataaatatgcatatatcataaaatcattcaaatatttattcaaataattatacatatattcacacatttatacatcttcatcttctacttcatcttcgtccgaggacgataaattacatcggaattcgtcttctggttcagcatccccgacatcgtaatcaaggattattgggtttaagccgcctaccggattttctagtacaagatcttcaattgtagtgagcaaaacatcatcatcattttctgtttgcaaaagagttggatcattgttttcatattctccagaaatgtttcccctcggatagacttttaaaacattgagccaaatgttctttggtttcttcgtatatggataaggaatataacaaacttgatctgcttgagatgctatatacatatatcaaacaagattattaataattaacaaagaaccgtattttggacttcaaaattacataccaagaataaatggctcgtatttattgtattttctcgtagatagaacgtctacaacgccaccatggcttcgtcgagtgcctctcccgatatttgggtcataccacttacatttaaaaagtgtgatcctcaaattgacgatgccctcatactcgagttctatgatatcagttaaggtaccgtagaaatccgcttcatcagatgaatcagcataattttcacctttaacacatatcccatagttacatgtcttttgtccagcgccgtgattttgcgtatgaaacaaatatcctcttgtgaaatacattggccaagttttaaccttgttcaaaggtccttgcacaatctcttgaacccaagtaagaaatgaagaagtagtgttctaatatgttacctacataatagataaacaatatcaattagtataaattaaatgatcacttttcgaaagaaccaaaattgatgtagacttacatattctttaacccatagatgatattattcaggtcttctcgcgtagagttctttttcgggcaagcatggatatttcgcagaaagataatcctcgaacatactatatttacaaacgaagaaaaataagtcaaagtgatcttagtgcaaatttacaaacaacaagtgattaaaaatacctctcaaatggtttaaaatagtcacaatttcttaaaacatatgcattgcgcgttggtagtctttctctgaaagccattttacatgcatttcaccacttggacgaccgacgtgcataaatatattagatactccagggacatgatatacaggaacttcaccttcattgaatattgttaacctgatccatgtaagtgaattaatatcgaagtataacaaatcgttaaataattaaatatatttaccttgattttgtttttatatgatcggcaaagtagtgatctgaaaaataagcaatctcgtcattgatatatgactcaacaattgagcctgtagcatatcttttatttttttgcttttcctttcaactttttgaagaaccttttaaatgggtacatccacctatatgggacagggccacccaattcagcttcgtatgggagatggataggtaagtgttccataatatcaaaaaatgatggtggaaagatcttttccaagttacagatgattaaaactatgttctgtttgagaatttgaacgcgacttgtctgtaaagttctcaaacatagatcccggaaaaatgctccaattcataaaatatatgtgcaagttaaataattagattaaaaaatgttggaataataaatagtaagtattgtacctgatagtgcaaggtggacattccggtcttggagttcagcaaagataaatggaagtagtcgctccataaatacatgacaatcatgactcttcatgcctgaaaacttttcattctccatatctacacaactagccaaatctgaagaataaccatctggaaatctaatatcatgtttcacacattgtaataaactttgtttggcttcttctgtcaatgtatacgctggaaatggagctttacccttactataaatatgtaagcctagccgtaaacaaaaattttcaatatccaatcttgacatgatattgtcttttgatttacccttaaaactcatgagagtgttcatgatgttgtcaagaaatttcttctctgtatgcatcacatcaatattatgtcgaagattgaggtccttccagtaagacaactcctacaagatgctttccttgtgacaattatgttccttcccatagcctcgcatcttcttttcatgaccgttcccaccaacatccttcgtttttggtggatttacactagccaaccgctcataataaacttgctcccctgtcaaagactcaggtggatactcgctagaagcatctattccttttagaaagtcttttctgttcctacgggatggatgaccatgaggaagaaatctacggtgacaatcaaaccagcatgtcttccgtccattgggtagataaaaagactttgtactttccatgcacactggacaagacaatttaccatgagtagtccatcctgataacatgctatacgccggaaagtcgctaatcgtccacagtagtactgcttttagattaaaattctgactcaatgaaacatcgtacacatcgactccagtagaccacaactattttaactcctcaataagaggttagaggaagacatcaagactagctcgaggatgatttggaccagaattcagaatggtaagaaataagtactctgtattcatgcacataccagagggtaaattaaatggagttaggatcaaaggccacaacgaatgattacgagacatgccaaacggattgaacccatcagtacacaacccgagataaactttacggggttcttcggcaaactggggatgtaactcttggaaatatctctactctgttgcatctgaaggatgattcatttctccctcctttgattggtgctcagcatgccatcgcattgacgcagctgtcttatggctctgatacattctcttcaaccggtccccaataggtagataccacatacaactatatggtactttggttcttcgatggtcgtctttaggcttccatctttgtgccccacaaaattgacattgatcttctttttcatcttctttccaaaaaagcatacaattgttctgacaaacatcaatcgtatgatatggaagtcctaaattgcgcatcgacttatcggtctggtaatgtgaagtggtagcctggtttccttttggtaaaaaatctgtaaacatttcgcaaacggagtccaccaacttttcactcatattatactccgccttgttgtgcatgggtcgagatgctaaggataactgtgattgcccttcacgacaaccatcgtacaaaggattatttgcaccttctaacaagtcgtagaacttatttgaatggttacggaccggttcttccacattctgataactatcatcatgatgatagttatcatcataccccacgttaaaattaaatgcatcgttcaccatatccacatatggatcttctacaacattacccacttcttcatgattttcactaaaatatgtcctatacgtgtaactcgttcctatatccatattcatttcttctccatgcttataccaaacataataatcaggcttaaatccttgactaaacaaatgagtactaactcttctactcgagatgatgtgtttttcattcttgcatacactacaaggacaatgaaattttcctcgactactctatactattggctgactattagcgaatgtcatgaattgctcaacccatgcgacatattcgctgataaattccccgtcacttcatcaaatctcttgtacatccaatcttgatagaaaccgccactaccgccataattgtagtttcccaccattatacaataaactaactaaattttttttttataataaatcgtttttttctttgatgttgttgttgttttgatttgttggtgaaagaagagtttcgtgaatatttattatataggcgaatatttatgaataatttacgactacaactaattaattaggtgtacctacttgccaatgtgaaacacgttttccaactactttttgcgacgcctatgcgactcttatacgactacaggttgattaagaattgtagtcgtcaattagtcgctaaattagcgactaaattatttagtcggtaagatagtcgtcaattagcaactacgtaacaactaacatctcccttcaataatagaatcgtcaaatagtcgttaatggacaactatgttccgacaaattgagttagtcgtaaaataacgactatgttactactaattttcgtgttgtcgcattgtagtcgtcaaaccgttgccaaatggtcgcttgataatacgactatgttgattgtcgctcttcgtaattgtcttttacctgttttcttgtagtgataggttaatgggtcggaggaagaagatgatagcagaatgataggcggctagggtttcaaggaaagcatgatatgtatacaaattacttttttgcccttctcatttgtatgccaaccatgttgtcagagtttggtgaatgtgcatggatgatcgataattcgaaatgattgaaatgaccacacacaaaatggattcaaacatcaatcactccaagtctccaaatattacatgatatcattagcacacactacaagaaaactgggttttggcgactacaccaaaagtcgttaaatagtcgttaagtggtcatttacgactaaatagcgactaaatcatgtagtcgtaaatcgagagtcgctaaaatgtatagtcgtaaaaatagtcgccaattagcgactactttacgactaatatttgtagtcgtaagtatagtcgtaacgtagtcgtcaaatttagtgactaattaatgactaatttacgattaaatttcacaaatataaatagatgtagtgtagtgatagaatagtcgttaatttaagtgactaactgaagactatgttgcggctacagtcgtaattatgtattcatacaatatttatgtatttatgcagtatttatattaataataatatttatatttgttaataattgttttaaatatatttttggaaagtactgaaactacatttagttattgtgaaacgatatttaaaaaagaactgtattacaaaataaaattaaaaagataattaaaaaatatcttaacagagcttgtcttaacagaacataatacatcatcatcctaaaaacataacatcttaatagaacacaccaacaatcttcaagaaagaacttggcttaattaactcttccttgtctttcatttcttttaatgcttttgtttctctaaacgctgcctcctagttattggtttcgtggatatcctctacctgagaaggcaatgatataacatcttaaaagaacacacgccaacagtgtctaattatccaactctagtctgcttactcaaacacgctgtttccacatttgcaagttaaaaaaagaattttgataataaaaaaaagcaggttttaacttacctaagttgatttgcaggtttcaacatgccaccggacctccgccaagccaagggttcagaaacacccaatgtgaatcatgtttcctatttactctatttcatcaaagtcaaaaaagcaggtttttaagctcttcaataaaggaatggtgactatacttgatcaattattaaccaaccttgcaggagaaacaatatctcatatcgcctggatattgaccttgcgcttgaagaagacagccacataaaggaacgaaaacacttgccatccgtccctaaaagattgaggcggaaaattgacatcataagccatctttgatgctttgaccacaacgttggacacattgaatgcatacttttctgaaaatagattaccatatgagtagtacccgacttttgatacaataagcaaaaaaccgaaatgctaagtgttgaagcgttgaacatacctttctatcgtttccataccagagaaagtgttgctttgataaatgaacagaggcgttctcgtcgtgtcggaacgttacatgtaaccttctgaagaattccttaaccatcatattcaatccagcgccaaaatcaacaccagcttgatcaatattttagtcacttagaaaaaaaacagttaaaattcagagaacttacccaatcaaacaacactttccagcaagattgcaactccacaggataaatcgagcatcaaccacagagaacaccggtatccgtcctcaagaggtcatatctaggaacgagaatcaagtgagataaactcttaccgacccaaggggatcaacaaattggagtgccatcttccttaatcacgaaccaatctgataacccttgaagattatcgagagtttggaaagagaagagaaaagaggaaaggggagagaagagatgattagatctgaaattgaatctgtcgataatgaaccctagaattcggcagtattaaattttagttttagagtatattactatacataacattatagtagttagccattaaaaattcgtacattatagtagctaccaattaggcacatacaacataggaatgcaatagatttgtaactataattagctactaatgttttggttttgaattgtgtttgtatgaacgaggactagaatggggtgaactttttgattatatagacatttatgctgactaaatggcgactacaatgttaacaaatagtgactacggtttgtaatcgcataatagtcgcctaattagcgactattttgcgactaatttttccagtatgcaatttagtcataaagtagtcgctaatttacgactattttaccgactagtgtttttggtcgcacaaaagtgactgatttacgacttaatatttttagtcgcccaacagtcgtttaatagtgactaattagtcgtcaattttggcgactaagtatttggtggatgtgtgtgattttgtgcagtttccatctcttaaaacaatgagcaaatgattaaaaaatggaaaaaatacaaaaaaatcatatccaaaaaaatgcaaagtgataggccgctaggttttcacgaaaaggatgatctgtaagcaaattactattttgtccttctcatttgtatgcaaattactattatgcaaactatgtggtcaaagtttggtgaatttgcatggatggtcgataattcgaaatgattaaaaattaccacatggttagagtttagtggatgtgtgtggacggtcgataatttgaaatgattgcgttttaataatattattcataaaacaagtgttacgttatgtaaaagatgttgataaaatatgatgaaataagttctataattatttttgggtttatggtcatatgggtttagggtttagggtatatgtatatggtttagggttaatgtctatcggtttaagtttaggggtttagggtttagggtttagactttagggttaagggatttatgcttaacatttaagggcaacaataagaaggtttaaagtttagggcttggagtttagggtttatggtatatggtgtaggatatatgtacagtaaaacctctataaattaataatattgggactgcaaaattttattaatttatcgataaattaatatttatcaatttatagagagattttcctaatttggtaacttttaaaatttttttataagatttccttcattatagaaaatatctttctagaaccagttacaagtaaaacataataatattgtctagataacaacaccaaaagttttgatacagttaaatataaaaactataatcaaacaaagaacaaatatgaatttaagcaacaaaatattataaatatattataaagaattttcttacatctaatatatatatatatagttgatacatttatataattattaatttatgatattaatgggaccatagatttacataggactttcaaaaaaattattatcttattaatttatcgatttatgtcattttttacactgatcccaactcgggaccggaagaatttattaatttataaaggttattaatttatagagtattaatttatagaggttatactgtatatggttaatggtttagcgtctatgtgttaaagtttagggtttagggtttgaatttaggaattaagatttaatgttttagagtttagtatctaatgtttagggtttaatgtttagagtttagtatctaatgtttagggtttaggatttagtgttaaggaactatgattgtttacaatgattttagagtttatagttacatggttctcattaaagattatatatttcattgttatccatatggattagatcatatggatttgttgttttctgaatctgtttatatttaggtgaatacaattaataataatatgaaaaaatatagtaatatggatttcaaaatgaaggaactaatgttattattatatattttaaaaaaaaatggttaaagatttttaataaaatagagaatgtgacaaattaaagagaaattaaataacaaaaaggaagagagagaaaaaaatcattagatatattttattaattttaatttgatggtcaagattaaaagagacattaactttacattttaatccgacggacgagatcatttcgtgaaaacattaactcttctcttaataataaccgttagatcgattctctctccaaaataaacgaacggctgagattaaaaacatgttagcggagcagctgacgtcatcaggggtagaattgtattgatttttattaaacagtagaaaatctccaaaaaagtgtctactcccttcaaagtgctctaaatgtgcttaaaaacttggaaagttccccaacatagaagaaacccttaaaactatatgtctgacctaaaaacgtgatgggccttcattagaaataagggaaagttctgggccgaatttggaaatcttcaaacatcaataagttgcgtcttcgaattgccgtcaagtaattgtgtcgctcgacaccagggatggtgttgtttgacacctacgctgtttttagtcgtcggattttctttagcagcataagttctctgttttcctctagaatgctccattatctccaaatgaatcccaaacatgtaaagacctgaaaagactagaaaagactctagaaataacaaatagactctaaaacatggttaaaatagggatatatcaactcccccagacttagcttttgcttgccctcaagcaaaatacaaaagccgaacccgtggaagaggtttgaaaacaaaagaactcccaacattctctagcctattgccttgatcattctaaccaaacccatatgcatggcaagtctaatcaaatcctaaccaacatgtacttctctacaagcttacacaacattctagattccatacctaagttccacaactatatccaccaaggtttcatcgctgggtctcatcaaacaagctaacaatcaagatccctctaaactcattcatgtactatacctcgataaatcgaccattcttttcttctttggtattttttctctcccccagacttattctttttagagagtaaacaaaggggaactcgcatactggatccacaccctcggcatttttttccaacctttgtaattgatcattcctaataatgtataaattatgggctaacccaccccatttatacccaccccatttataatccaccccatttattctaaacatatttaactctatttaaatttatacctgataatttgtttatagtcaattatcctaaaacaccaatcatgtagttgtaatattttaggtgtcaatccaaatgggtgtgatgcaaactgatgagatgtgatcagaagtcactaagtcaagccaagcaataacagttttggggtttctaacaatcctaagcgaacatgcagaaaacagaaacaataacagaattactaaattcactcgaccacaacaggctaatgcgagaagtgggatgtggtcgtgtaacaggtcgagtaacaaacaggatatgaaacagctatactcgactgcacattctgttgccagacactagatgtggtcgagtatgctggtcgagtaacagacaggaaacgagacaactgtactcgactgcacagtctgttgccagacactgggtgtggtcgagtaagttggtcgagtaagtgcaaaaactaagaaacagacaatgagaacgattaagtgataacgttaaaacagagaaatcagatggacgagaaattcctaaggatggggtaatcgaatagagtggtatcctagcctattcgaatggttaacaagcgcaatcaagctatctctagacaacaggttcaacaacagatcaattcactcccgtgatagaaatcctcaagcaaagctagcccagactaattcccattaacggaatctaactatgcaggcaataagaacagactgataaagtcaataaacgctctaaacggccaatcccttgggatagagacgaatatctcatgaactagtggatcaagcattccatcgaacaccttatgggtgcgggaatgcttgggatcgaattccagttgatcagatagaaataagcagtaaacacaacttgtcctgaagggattcaatcaattctaaaacttaaccattgtacagactacggattctacaactactctatcccatccttaagaattctaagtcactactcagacaacatgcttaaagacataaacgcacgtaaatgataatattgaataagtaaagagataaagagtagagaaacaagatgatagatgaaatcaaatgcggaatctgaataacttggaaaaatcttgaattacaggttgcagaagcggcgcagctagagtaaaatagaaaataaaactgaagcaaaaactcaatgtcgactagatgtctcaggacagaaccctaagacatttatttatacaaaacgaaataaaatgatagtagacgggccaataacctaatcgccaggcccatagaatgataatgggccgagatgggcttcgtgatccgatggaggtccaggccgcttccaaacacttcgtcttctcctcttctcttccttgtgctcaactaatctggttaagtgcagatttgagtagactatgaagatgtgatcgagtgcccggtcgagtgatggtgttggtggtgagtgatgatactcgaccagggggtcgagtaacgtggtagagtgaacggccgagtgtggtcaggtggtgtggcgaagtgatattcgaccagcgggtcgagtggcgtcatcgagtggcctgagctgaggttactcgacctgggggtccagtagatgggaagaatggctccaaagtcactcgaccagggggtcgagtatgatgctggatgcacacgacctagtggtcaagtatgtcttctggttctggctcgtttctttcaatttgctcgcaaacagctccaaatcacttgaaaacaactcagaaatgcaatatgtatgcaaagctatcctaatcatgcaaagtatgcaagaatgatgagaaatgatataaaacagtgatgaatgatacgaaactggactcaaaacgatgatgaatggacactgaaaacatgcaaattacagacatatcaactcccctaaacttagtctttgcttgccgtcaagcaaataagaagacatagttgaaggagaggtttgaaggtggggactcagaaccaaagcatctgatagagcaaataaaatcaatgtccaagttggtagttctaagatgcgatatgattgaattttactcaaaaacgttagccatgccttgttatcaatcaatccgtctcttatactcgacctacacatgctttcaaatctaccaatccctttaacattcattagttctggaacgtgaatcaagcaatgcatcatcaatgaactcatttggctaaggtgaaggtcaagagacaaagatggtccttacagaataagcttaggtaacagggatctctcaagaatgattgagctttagtagaatactaaaggtaagtcccaagttatgcatacattgataagatcccatctacccagagtataacaatgaagctctaatggtaatcccaactccaatcccaatacaagaacttaactctaccctttgcactcgtgaatcttccaaactctttttcatatcattcttttcttttctcttaactctaggagaagctttcccaacactctgatacatctagcggatctggatttctttaacaactaaggttcctgtttttaatctttaaaaccaaaggcttttaacccttcttctttagctaacaagaacctcattcttttctttaacattcccaaaacctttactagatttttttttctaacttctttagcttacttcccctagaattttttccctttccttatcaacaatgaattcacccttttcttttaaacacataccaacccatgatataagcgcccacctagtcctatccagtccgaaaaatgcgaactagaactacatgaaacactatctttgtcgttacgaacctaacactttctaccaagctcaatcgaaataagacctcacaaacactcacaagtgacatagggcttgaaagaaagtttaggtttgggttcgggttaactgctctaataaggagagtcacctacttggattaacaagagtggttaaaatgagtaagaaaatccaagtattttagggtatccatgagttcaaattcgatgccaagacatgataattctaaatcagattcaagttcaaattgatagggaatggtatcatatcctaacagtgtggtcgagtagagcaatctaggcatggtgcagttttacttcaatttcattgactacgcatcagacaactaacaacgagggcactaagcttatctggtgaaccaaaatgcttacaaggctatctcatcattatcccctatgcatatacaacaatcctaaacgaaacactctagactcgatcctaaatgcaatgcaactacatgaacactatttttgtgaaatcattttttgaaaattttcaattttttttgttttttcaatgccttagatgaatgcagactcaaaattatatacaatgcaacacacacttcctgagccctcccccaaacttaaatcacacagtccactgtgtgaccaaatttggaagagagtactcaggacaaaacacatcacagaaacaaaataaaaacaggagatggtatattacaatggtggagtgagttgcttacctcagtggaagaaggagcggagttggtcgtcaatggctgcctgtgattgctcccaggacatagacgagccgccatgttctgtgtcagctccagcatgtgggtactcaacctcttctccttcgtggctgccagcactgcggtcgagtgaattttggatatagagaagttgtgactggcatcaactatattcgatcgcagcttcattcgctccccgtagggtgtggtcgagtatactgctctcttcttctactgcggtcagcaccgctttgtgtatactcgatctcactcttctactgcggccaccaccgcggtcgagtgatctcctggcgtggagaagccaaaacaaggtcgagtgtctttgattgctcaatggtcgtgagtagttgttccctcagacccagaatctacttcattcagctcttcatacttatctcctgaaaacactactagaatgcattaaaaacaacaaggaaaaataatgatatttacgaagatagacatgggacttcctgccaagtgagcttgttttaagtctctagcttgactcctcacactcattaggcttatggagggtgatagagaagaattgaaatcttctcttcttccttagcagatacaacatcggacttagcatgctctcttgacaggtctgtaattgagtactcaatggccctttccttataagcttcttttatttcttgtgaatagtcttcgtcttcagaccattctaaaacaaatttcttctttgatatagcttcaatgccgagttgaggttgaatagcttccctttgcatccgactcactttatccctaaatttctcaacactgcaagctagcttctggatggtttcttcgtggagatcagacttccctttaagttctagccaatcaactacacagagcgtactagattgagtggttgagcttgaaggtcgtgttggagctaaacttggttcctttactcttttagtctcaaatccatcttctgtaaccactccttggacccaaaggttcgtccctctatggttgatcttcttggagctttgttgatgtcaaacagtaaccttatatccttcccaagattgagatcaatctttccatctttgacgtctatcaccgctccaactgaggccaagaaaggtcttcctaggatcagaggatccttaggttcttcatccatctcaagcaccacaaagtctgtaggcacgtctactccattaatcttgataggcatatcttctggtagcccatagggttttcttatggtcctatcagcaaggatcaaagataagtcgcacgatttatatttgacaaatcccagcttccttgccacagaaagtggcattaggctgactgaagctcctagatcacatagagagttgctaaaagccagttgcctaatagagcatggtagagtaaaagatcccggatcttccaacttttcttgaacaatgttcttcttgatgattgcactacactcgtgagttaacgccaccgttccttgaacttctttgatcctctctgtaatcatgtcttttatacgtttgtgtgagtgcggtattagcgcaagacagtctactagaggcattgtgatttcaaggtctttcaattgtttttccaagagagcttcatatttgtttatcagttgcttcttgaatctccctggaaatggtagtggaggcttgtagggtggaggaacaaagactttatccttggttttagcagcggcaggctttttaacaaaagaaaatactgcttgagcttgggatcgagtactgcgatcgagtatgggctcctctatttctatttcagctgaaatttcattctgaacaaaatcctctccttcttaaacttcactgtccctagtgatagaggtagaggcatgtcgagttggcaactctcgatcatggcagatactgatggcgtgagcagtggcatactccttagggttctggattgctttccctggaagctggcctgggttgttgttaacagatggtgtagtgaggatgctttccacatatctcatcctagtgctcaatgattcgaacttgctgttaagtttgatgccttatcggtcaactttgttgtttaattcagccagcttcttagcgatttccattcctcctgtggcttgtccttgaatgagctgctggagcatagtcattatatatgaattctgagacgcatgtgcttgttgttgatttggtgtgaaaccaggtggtggctgttgttgttgatatcctccttgaaactgctgctttaaaacgaacccttggctttggttgtaaggaacaaatggtttgggttggttatgctgctgttgagggtagacttggtccttagggttggcaatattggtgcttctgtatgacagaggtgggttgggtctgtaattgttgtaccccttgttgtagccacattgattctgaacatagctatcagcacactgatctttcaccctctcttgtacttggaatggttcatcttttgccaagaaggcctttttacagtcatcccaggtcgtgattgatacctggggtagcatcttttcccacagatgggctttttctccaagtgagaatggaaacaagcgaagcttaaaaccatcttcactaactccattgattttagtaaggctacagagcctttcaaactcgtctagatgatctagcggatcctccattggcaagccatgaaacttgtttccctgcaccattgcaatgagactgctttttacctcaaagttgtggttctgtactagaggtggaacaatgccatgacgatggttgtggttgtgagggaagtcactggcaccaatgttgttaggttgctcttgctcatctactatgtcattcattgtgtctgttgctgtctgttctctcagttggcgagcaatacggtcgatgttatcgttgaataggaagttctgattcccttttgaccgtgtatgcatgcaacatgtagaacctggctataagagacgaataaagttggttgctaagtacctgaaatacaaagtctgaaaagacacaatgttagtatcttttataacaaaaacgaacttgatcttaacaattctaaaatctcaaatatagcaaacaagcacccaattggcaatggcgccaaattgataatttgtttttagtcaattatcctaaaacaccaatcatgtcgttgtagtattttaggtgtcaatccaaatgggtgtcatgcaagcagatgagatgtgatcagaagtcactaagtcaagccaagcaataacagttttggggtttctaacaatcctaagcgaacatgcagaaaacagaaacaataacagaattactaaattgattaagtgataacgttaaaacagagaaatcagatggatgagaaattcctaaggatggggtaatcgaatagagtggtatcctagcctattcgaatggttaacaagcgcaatcaagctatccctagacaaaggttcaacaacagatcaattcactcccgtgatagaaatcctcaagcccagactaattcccattaacggaatctaactatgcaggcaataagaacagactgataaagtcaataaacgctctaaacggccaatcccttgggatagagacgaatatctcaggaactagtagatcaagcattccatcgaacaccttctgggtgcgggaatgcttgggatcgaattccagttgatcagaaagaaataagcagtaaacacaactagtcctaaagggattcaatcaattctaaaacttaaccattctagagactacggattccataactactctatcccatccttaagaattctaagtcactactcagacaacatgctcaaagacataaacgcaggtaaatgataatattgcataagtaaagagataaagagtagagaaacaagatgatagatgaaatcgaatgcagaatctgaataacttggaaaaatctcgaattataggttacagaagcaaaagcggcgtagctagagtaaaaccaaaaataaaactgaagcaaaaactcaatgtcgactagatgtctcaggacagaaccctaagacatctatttatacaaaacgaagtaaaatgatagtagacatgccaataactaatcgcccggcccatagaatgataatgggccgaggtgggcttcatgatccgatggaggtccaggccgtttccaaacactttgtcttctcctcttctcttccttgtgctcagcttgtctggttgagtgcgaatttgagtagactatgatgatgtgatcgagggcccggtcgagtgatggtgttggtggtgagtgatgatactcgacgagggggtcgagtaacgtggtagagtgaacggccgagtgtggtcaggtggtaagtcgaagtgatattcgacctgggggtcgagtggcgtcatcgagtggcctgagctgaggttactcgacctgggggtcgagtagatgggaagaatggctccaaagtcactcgactagggggtcgagtatggtgctggatgcacacgacctggtggtcgagtttgtcttctggttctggctcgtttcttccaatttgctcgcaaacagctccaaatcacttgaaaacaactcagaaatgcaatatgtatgcaaagctatcctaatcatgcaaagtctgcaagaatgatgagaaatgatataaaacagtgatgaatgatacgaaactggactcaaaacgatgatgaataccccattatgagtgaatatattttttttttgcaaaaacacaattttggccagaaaatacgggtttcggattttggagagaaaacacttttggcggaaaacatgattttcaatttcggcgaaaaacatgattttcaattttgacggaaaacacttctttgtgattttggcgggaaaatgtcattttatgggaaaatgttttcttggtaataaaatgcaatttcacgattttggatgaaaacatgattttgcaattttagcagaaaatgtcactttacagttttggcgggaaacatgattttcaattttggcggaaaatacttttttgtgattttggcggaaaaaagtgattttatgatttttataggaaaatatcgtttacagtgtttgtgggaatacgtgattttacggtttggcggaaaacactttgtgatttttgtgatttttgtgggagaacgtgattttacggttttggcgggagtacgtgattttacggatttggcgagaaaaacgtgattttacgattttggcgggagaacgtcggtttactattttggtgggaaaacgtgattttcaattttggctgaaaacgtgattttacggttttggcgggaaaatgtgattttacggtttggacgggaaaaacgtgattttacgattttggcgaaaaaacatccgtttacgattttggtgggaaaacgttattttcaattttggctgaaaaggttattttggtgaaaaaacatgattttacgttttgttttcaatatatataatattttgctctttattttatttaaaattaagttatttacattttaataaaattaattaatataaataaacataaatgggcttgaatgggaacccatttgtttgtaggtaaaccccattaaatatttttctctaaatgggtttaaatgggttaatttttttttgcatgtacccatttaataaatgggtattccatgcccaagttaacatcactatgtataataatgaggttataggaaacatttatacccctatacactatatgaaaatcctatcaatctctcattttcttatttttttattatagggagacgaacactttctttttatcacattggtctcaatatcatgtatgaacaaggagtcaatatctatgaatactaaccgtttaaagaggtaaaaggaagagtagtgagattagctcaagccttagtggttgtgttggaaaccacaatatcctcaagtttgttggtttcctatctggattttccaatagtcggattgaatcgaacctacaacattaatcaaccagacaataatctaaagaatagagatcataattcctaacaaaattttgactcaataaaacgactcaaaataaataaaataagaataagactgaaaaagaaaaacgtagttagtaactgcttcccccagacttaaacgtcacggtccccagtagcattcaaatctagagtaagcgagaaaaataaaagaaaaaacgtaaaataaaaaaaataagaagaaaaccataacagtgagttgcctcacactaagcgcttatttagagtcaatagcttgactttcttggagtttgcggatcaggtggatcagatggaggaaataaatacttcctagtagaacctcgaatcatccaacgtggcgtataagcagtcagtgtttgcggtctaccaaggaagtgagcaatgtcagaagggcaaaacaaaggtatgggttgtcgactccttttaccttcacaatcatcaaaagaaaaaacaagccctcgacgagaaactcgtggcttggtgaaccgtaaaacagtttctagatatttcaaagtcttattgatgatatctggaggtttaggaggaggagatgagtaccattgccgtttcagaggtggatcaaggagtaatggtgttgtgggtgacgtgactatagtgcttggagtttcagcagggaactcaacccgaaaaccagctctaacaacgaaatctggctcggcctgtatggggtatctatcgacacatgtggtggtgtcgatcaacaccattactgcagatcgattctcagcaattagatcgtgacttgctttctatagttgcgagcttgtaccatgaaccagatctatctcaacgcagtgtctatgaaatgctctgatacagagaggtgcatgaccatctatggtgggtgcttcttcagcctgtccatgtcaagagtcataaccatatcacactcattcaaagcaattggactgtcggtagatatagggctatcgagtatacaacttcctggattaggcatcattgcattgattattgtagagataggcacttccagcttgtctttcatcttcaatggagcatcatacatcagaagtgcaatgatttcggcgttaagcaagctcgcgtccttaacactgatacctttctatatcatctccaagatataatcataaagtacatactccaggttcataaagtcaacataaggtaactctgatagaagcagtctacacagcgtgaaacatctataacatctagcttcaaggataagctgctcggccattacaaccattggaatctcaacataatatggcgtagtccttgtccattgttcacatacgctatcatctgatgctgacgcttaggtgccgagctctctcgatttctctccgtcaaacgctgaatcatagtctgttcctgaagagtgtccatcgacatcgaggtcgtgtcgatcgacattgagatttgatatcaatggttctacaaattagtgtggcaagtgatatgtttataatttgcatgttttctatatttatacatcatcgttttgagtctagtttcatatcattcatcattgttttaaataattcctcatcattcttgcatactttgcatgattaggatagctttgcatacatattgcatttttgagttgttttcaggtgatttggagttgttggcgagcaaataggaaaaaccatgtcggaaccagaagacatactcgacccccaggttgagtacatccagtaccatactcgacccattggtcgagtgaaattggagccattcttcccatctactagaccccgtggtcgagtaacagcagccccggccactcgatgacaccactcgaccacgtggtcgagtaacactacgtcacaccacctgaccaccactcggccattcactctaccacattactcgacccccaggtcgagtatcatcactcaccaccaatcgaccattcactctacaatgttactcgaccccctggtcgagtatatcagtcaacacccagcgccatcactcgaccaagcagttgatcacatcttcatagtctactcaaatccgcactcaaccagacaagctgtgctcaaggaagagaagaggggaagaagaagtgtttggaagcggtctggagcttcatttgatcatgaagcccatcttggcccattatcactctatgggccagacgatagggttcccggtctatctactatcattttatttcgttttgtataaaataggtgtttgagggttttgtcctcggacatctaatcgacattgagtttttacttcagtttttatttctattttacctagtttactttggctgcgccgctttgcttctacaacctgtaatacgagatttttggtttttattcagattctgcatttgatttcgtctatcaccttgtttctctactctttatctctttacttatgcaatatacttatttacctatgattatgttttttagcatgttgtctaagtaatgacatttagttcttaaggatgggatagaatggttgtggaatctgtagtctatagaatagttaagttttagaattgattgaatcccttctagactagttgtgtttactgcttatttctgtctgatcaactggaattcgatcaacaacactatcgcacccagaaggtgttcgatggaatgcttgatccactagttcttgagatatgcgtctctatcccaagggattggccgtttagagcgtttattaacttcatcagtcggttcttattgcctgcatagtgagattccgttaatgggaattaagctaggctagctttgcttgaggatttctatcacgggagtgaattaatctgttgttgaacatgttgtctagggatagcttgattgtgcttgttaaccatccgaataggctaggataccactcattgcctgtttcatcgttgatcccttaatcgttctcattgcttgtttcttagtttttgcattcactagaccaacttactcgaccacacctagtgtctggcaacagtctgtgcagtcgagtatagttgtttcattttctgtctgttactcgaccacatcctgcttctagcatcagccagttgtggtcgagtgatttgtgttaaaaaccccaaaacctgttatttttggcttgacttagtgacttctgatcacatctcatctgtttgcatcacacccatttggattgacaccctaagtactacaacgacatgatagtgctataggattaattgactaaaaacctattatcaatttggcgacgttgccaattgggtgtttgtttgttatatttgagatcattagaattgttaagatcaagttcgtttttgtaacaagagatactaacattgtcttttcagtatttgtatttcaggtacttagcaacctgatttacagactcatctctaattcgtctgttatagttgggttgctacttgttgcatgcatacacggtcacaagggaatcataacctcctattcaacgataacatcgaccgtattgttcgacaactaagagaatagacaacaacagaaacaatggctgaccttgtagatgagcaaatacaacctaacaacattggtgctggtgactttccacacaatcacaaccagcgtcatggcattgttccacctctagtacaaaacaataactttgagatcaagagcagcctcattgcaatggttcaagggaacaagtttcatggcttgccaatggaggattcgcttgatcatctagacgagtttggaaggctctatagccttactaaaattaatggagtcagtgaagatggtttcaagcttcgcttgtttcccttctgatgcggacatcaaccttatttcacaaactgctgaactacaagttgtaccacatcttgtactacatcctgtaccagaagtcccggagggtatcatgacacgttcaaaagctaaacaactgaagaaaaggttcaacttagctgtgcaagatattttgagctccctagagctaggagtaaactggtccttagcaccccataccagatatgatctaatagccgaagaagagcttgctgaagcattcacccaaatgagtcttgaacgaactactcccccaggtatgaaatatcgtttgacaggttcaaggacctctagaaaccaagagaaaactttggagcttcaagagacggacgattcaagtgtcatctctgaaagtgatcgagagagtcaagatcaagaacaagatatcaaggacatggaaaagctcaaagacattgatcaaaatactcaagaggaactccacaaagacccctacttcaaggaacaagccaacaaacaagcacaagacttgattccagaagtacctcaagaagtactacaagaaatgactcaggcgacatctattaggcctaaaacgcatctaggtaaggtttattcagtttatattatctttgcaggtccacacagcccagacaacggctagagtcgccctcaatcgtgctccgcaagagaacttaattagtttccttattttagcttattttctttctaaaaacaatggtttttgtgttttgattttatttgcttccttgttgcgtttttacatttaatttcggccttagggctagctgaaggactcttataaggtccccatacagcagttgtacgatttttacctttgattatcaataaagaaccgcattttctcacttcttctctttaagtgttcttaagagaataagcttgttctttgtcttgtgtgtgtgattcaccaaggccaagttcatgtactgtatcagagacttatcacatctctgtggtgtacttcaatccgccagcacttcccctccattagatcccacacgagagaagcgatcgtcatcgtgttagatctccatcatcgaccatctttccttcacaagagagaagcgaccgccagcttgtgaagccaccatctctatcagatacaaagctcaccaccgagtcttgtatcatcttggtataagagcgcagttgtgcttcctttgcgaggtttcatcattttgttttgtctgccctactttctgaatcagtttttgcattagtctagtttctgttttatttaaattaaaaaaaaaagtatttcagtttcattttatttcgtgttaagtatttgtttttgagtttcgtaatattaattaaaaaaaaaataaaaaattattgttaactttgtactacattagcaagtgtgtcaggaagtgattcaacaagtcttaggtttcttgttttttatctttcttttctagtgctgtggtacattgatttctttgttgtttttgtctaatcccatgtcagttttaggcatatactatgggagaagcagcagaaattccccaaaacgccgtaatgcaaatgatggctactttgacggaggagttaagaggattaaggcaacggctaggtcgtttggagcagccccatcctagggttgaaatggggcaagaccaggctcgtgggaatgcccgcgaagaggtagaggagtttcctgacttggatgatgatgatgatcaaccacccgaccctttgaggcgccaacataaacggagagaagatccattgacgagaaaccgtgcacgaggagtagaaccgcgtgaacagaaccgagatatcaaactaacacctcctactttttgcaggaaaatctaatccagaggtgtacatggattgggagcgatagatgaagtacataagcacttggggagaatctcggaaggtgtccttagcagtcgctcagctcaccaaaaatgctttatcttggtgggataggacagtagctgataggaggagataaagatttggtcccataagcacttggggagacatgaagtacctcttaaggttgaggtatgtccctgaccattatcatagagacttacaaaaacgttttagaaaattgtctcagggaacaaggaccgtagatgagtactttgaagagtttgagaagctcatgaacgccttggacctagaggaatccaacgaagctctcatggctcaattcatagacggattacaagagaggattcagcgaaaggtggagagagcccaatataatggactccatgagttgctacacctagcggtacaagtcgagcagcaaatcaggcgtaaggcatccttaagcaaccgatccagaaacaacacaccttggaatgcaagcaacaaccgagccatggacaaaggcaaggccgtagagagtgatcctaggtacaagaacaagtctaatgaggcacctaaaacctctaggcccgaaccaggtaagttctctagtactaatccatctccttctcgtgacattacttgtttcaaatgtcaaggtaggggacacatggtgagagaatgtccgaaccaaagggtgatgatcctcactcctagtggtgactatgagtcacaagatgagcaagaggattctaatgagcatgaggacgttgagtatccggatgtaggagaactccttgtgattcgcaggacattgagtgtgtttgttaaccccgaagaaaaagtgcaacgagaaaacatcttccacactagatgcaccataaagaacaaggtatgtaacttgattattgatggaggttcatgtactaatgttgctagcaagtacatggtagacaggctaggtcttcagaaaacaaagcactcgagaccatacaagcttaggtggctcaatgacaatactgaacttaaaatcgattaacaagtgattgtatcattcagcgtgggaaagtaccacgatcaagtcgtttgtgacgtagtgccaatgagagctggacatcttctccttggacgaccatggcagtttgattgaattacatatcacaatgggcgcaccaaccattactcttttacctttaatgaccgtaagtacaacctcgcccctcttagtccctcagaagtttatgacttacaaattcacatgaccaaggaggacgaggtaagaagttctaatctttatttaagctctaaagatgtttgtaaaactatgagtgccaagggcaccgtgctactaatggttttcaaagaatgtcttagtacaaggataggtgatcctgagctacccactgaagtactaggtgtactagatcggtacaaagacttattcccggaggagattccacccggactaccacgtatttgtggcatagaatatcagattgatcttgtaccaggctgtggtttacctaacaagcccgcctataggatgaattcggaggagtctaaggagcttgagaagcaagtgcgtgacctaatggacaaagggtacatcagagagagcctcagcccgtgtgcagtacatgtcctattggtcccaaagaaggatgtcacgtggagaatgtgtgtagactgccgtgcaatcaacaatatcaccatcaagtaccaacaccccattccgagactagacgacatgttagatgagcttaggggtgccatcatattttccaaaattgacttgaggagtggctatcaccaggtccgaatgagagaaggagacgagtggaagacagccttcaagacaaagcaaggtctccacgagtggcttgtcatgccgttcgggctaaccaacgcgccaagcaccttcatgcgcttaatgaaccaggttctaaggtcttttattggtaaatttgttgttgttttctttgacgacatacttatttacagtaagagctattctgatctcattcaacacttagagttaattctcaaaacgcttcggaatgaaagcctttatgctaacctgaagaagtgcacattttgttctgacaagtgtgtgttcttaggttttgtagtgagtaagcagggactacaagtagatgaggagaagatcaaggcaatccgtgaatggcctactccaacatctattacacacgtccgtagtttccatggactagcgagtttctatagaaggttcgtcagagactttagtacagtggctgcgccaatgactgctgtgataaaaaagaacgtgcctttctcatggggagaagctcaagataagtctttcaacacgttgaaggagaggctcacgcaagcaccggtcttagccttaccagattttgaagtaatgttcgaagtagagtgtgatgcttctggattgggaattggagttgtactacatcagagaaagaggcccgtggctttatttagtgagaaactaagtcgagcagcattgaattacccaacatacgacaaggagctctatgctttggttcgagctcttgagacttggcaacattacttgttgtccaaggaattcatcattcataccgatcacgagactctcaagcatcttaagggtcatacttcgcttaagaggagacatgccaagtggttggagtttgtagagatcttcccatatgtgattaagtacaagaaaggaaaggagaacgtggtagctgacgctttgtctaggagacatgcccttatagctactatggaggctaaagtgatgggttttgagcatatcaagagttgtacaaagacaatcctgagttaggagaatgctaccgagagcatggtaaaggactttacaaggcattctacttgcaagatgggtttctattcaaagacaagcggttgtgcatcccttacggttcagtgcgagagttgatacttagtaaatcgcatggtggaggtttgatgggacactttggtgtagaaaagactttggccatggtaattgagcatttcttttggccccacctcaagaaagatgttgagaggttttgtgcccgttgcattgtttgcaacaaagcgaaatccaggtcacatcctcatggtctctatttaccattacctattcctaacgccccttgggtagatgtttctatggactttgttttaggattgccaaagattaaacacaaggattcaatctttgttgttgtggaccggttttctaagatggcacacttcatcccgtgtgacaagaccaatgacgcgactcaaaccgcggagttgttcttcaaggaagtggtacgcctccatggaattccaaggaccatcgtttctgatcatgacaccaagttcttgagtcacttttggaggactctttggagaaagttaggtaccaagcttctattctcaacaacttgtcatcctcaaacggatggacaaaccgaagtggtaaaccgaactctctcaactttacttagagttactcttggtaaaaatatgagcacatggcttgattgcattccttttatcgagtttgcttataatcgtgctgttcactccggtacaaaactgtctccttttgagatagtctacggaattaaccccttgtctccattggatttagtacctttgcctgagaaagaacaggtttgccaagatggtttgagacgtggtgaaatcatcaagaaaatacatgagaagccaaaagcgaacttagaaaagaaggccgccgaaaacaaacgtaaagctgatcggggaaggaaggaaatgttatttgaactaggagattgggtttggctacatatgcgacctgagaggtttcctacacaaagagcatccaagctagcaccacgaggcgatggtcccttcaagatcctcgaaaagataaccgataatgcctatcgtttagagctgccaagtgaggtaagaatttctcacacttttaatgttgctgaattgtctgcttatgatccatgagattcagttttgaggacaaaaccttttgaagagggagggaattatgcggacatcaaccttacttcacaaaccgctgaactacaagctgtaccacatcttttactacaacctgtaccagaagtcccggatggtatcatgacaagttcaaaggctaaacaactgaagaaaaggttcaacttagttgtgcaagatattttgagctaccaagagctaggagtaaactagtccgtagcaccccatacaggatatgatcttatagacgaaaaaagcttgctgaagcattcacccaaatgagtcttgaacgaactactcccccaggtatgaaatatcgtttgacaggttcgaggacctctagaaaccaagagaagactttggagcttcaatagatggatgttcaagtgtcatctctgaaagtgatcgagagagtcaagatcaagaacaagacatcaaggacatggaaaagctcgaagacattgatcaaactactcaagaggaactccagaaagacccctacttcgaggaaccagccaacaaacgagcacaagacttgattccaaaagtacctctagaagtactacaagaagtaactcaggcgacatctattgggcctaaaaaacatctaggtaaggtttattcagttcatattatctttgtaggtccacacagcccagacaacggctagagtcgccctcaatcgtgctccgcaagagaacttaattagtttccttattttagcttattttctttctaaaaacaatggtttttgtgttttgattttatttgcttccttgttgcgtttttacatttaatttcagccctagggctagctgaaggactcttataaagtcaccctacatcagttgtttaatttttacctttgattatcaataaagaaccgcattttctcacttcttctctttaagtgttcttaagagattaagctcgttctttgtcttgtgtgtgtgattcaccaagactaatttcgtgtactgtattagagacttatcacatctttgtggtgtacttcaatccgccagcacttcccctccattagatcccacacgagagaagtgatcgccatcgtgttaaatctccatcatcgaccatctttccttcacaagagagaagcgaccgccagcttgtgaagccaccatctctatcagatacaaagctcaccaccgagtcttgtatcatcttctcacttggagataaagccaatctatgggaaaaacgttaccctagaattcaatcacaacttgggatgactgcaaggaagccttcttggcaaaattcttctccaactccagaactacaagactccggaatgagatatccgaattcactcagaagcaaactgaagccttctgtgacgcttgggagcgcttgaagggttatcaaaccaaatgccctcatcacggatttaagcaggcttgtcttctcagcacactctaaagaggcgtccagcttaagataaggatgctgcttgataccgcttcaaatgggagctttctcaacaaggatgcttaagaaggataggagctagttgaaaaattggcttagtcggatggtaattacaatgatgattatgacagaagcatccacaccagctttgactctgatgacaagcaccgcaaaaagattaaaactctcaatgaaaaaatagacaaactccttcaagtgcaacagaagcatgttcacttcgcccctgaagatgaactattccaagtgcaagaaagggagaatgatcagtgtgctgaaagcagctatcttccgaaccaaggtggctacaacaaagggtacaacaattacacatccaacccgaatctgtcatatagaagcaccaatgtagctaacccacaagactaagtctacctaagcaacaccaacaacaacaacccaaaacgtttgttccttacaaccaagttcaggggtttgttccaaagcaacagttccagggaggttattgatatatccctattttcactgattttatctatgtcttagggttaggattttgagtctttatgttatatctctaatctttttagtgtctttcaggtatcttatgcattgggacaacaatggagataaggagacattttggagcaaaagcttaggaaaaggaagctaaggacgtttttggactcaggaatcaagagtgtgtcgatcgacaccagtttcggcccagcaaagtcctagacgctttcaagtttacagaataggaaatttggcccagaagacttccttatttacattattagtccgtaaatgttttatagggtttatatacattgttttagaccctagttttcatcaaaaaagttatcatcaagtttttatcacgctttttgcaaaccctgttacagagagacataagctattcatcgagtgttttcagagattgattcagttcttaattcagtgaagagatcccttctttcccttaatttatttgctgtgtttatgttttcatactcaattatattgtttacttcaatcaatatgtatgagtaatctgctttttaggaatagggtttctcattagggattcatatggtttagtagattaccccctttgctcggttatctgtaaaattcttcatctttaataatgtttaatgctagatctagagtaattaactagatcttgaatccagacaatagatatgcccaccgtaggtatctgtagttggatcgattatttaatgtgcctagtttataggtgtgtaataagaatcggcctatctactaaggtgaacaatcgaactcgttaagaatgcatatttaggttaataatctcttggcttctccggttattcttagctatagatatagggagtttcgtggaacgccaccggttattccataattaaagtttgagtttaagaattgttcgataacaacctaactttcattagatctactaaccaataatttcctgagaataccatgttcctagctcttttcctaatcgtttacaacacaatcaacttgctgttttcttactttgttctcttactatttcaatcattacctactagcttaatcttgacattcaactcattgtttgaacaaacaaactttgtgaattcgattcttaaatactgcaaattgatctcttatttgagagagtagttctagggtaatttgaaccatatcaattatgaacaacaaccaacacctggtttccaatcacatcaacatcaagcccctacacttcaggattctgacaggaagaccattctgcagaagataattcaaggccaagccacatgagcaatcaaaatcgcaaagaagttggctgaattacacaataaagttgaatgacacttcatcaaacttaacagcaagtacaaatccttgggcattagaataggatatctggaaggcatccccgcttcaccatctattaccaacaacccaggcgagcttccaaggaaagcaatccaaaaccctaaggagtatgccactgctcacgccatcactatctgccatgatcaagagctgccaactcgacatgcccctacctctatcactggggatagtgaagttcgggaaggagaggatttcgttcagagtgaagatccaactgaaatagcaatagaggagtccatactcgatcgtagtagtcgatcccgagctcaagcagtacctctttctgttaaaaagcatgtcgttgctaaaacaaggataaagtctttattcctccaccctacaagcctccactaccattttcagggagattcaagaagcaactgataaagaagtatgaagctctcttggaaaaaccattgaaggaccttgaaatcacaatgcctctagtagactgtcttgcgctaatatcggacttactcaaacgtgtgaaggacatgattatagagaggatcaaagaaattcaaggaacaatggcattaagtcacgagtgtagtgaatcatccagaagaagattgttcaagaaatgttggaagatccaggatctttcactttaccatgctctattaggcaactagctttcagcaactgtctatgtgatttaagagcttcagtcatcctggaagctgggatttgtcaaatataagccatgcgacctaaccttgattcttgctgataggagtgaaaggagacattttggcctgttagaagatctgcctataatgatcaatgaagtagaaatacatactgactttgttgtgcttgagatggatgatgaatctaaggatcctctaattttaggaagacctttcttggcctcagtaggagctgtgataaatgtcagaaatgggaaagtcgatctcaaccttgggaggcatatcaagttgaaatttgacatcaagaaaactccaagaagatcaaccatagagggacaaacctttgggatcgaaggagtgataaaggaagaaagatttaagactgaaagagtaaagcaaccaagtttagctccaacacgaccttcaagctcaaccactcgatctagtacactctctgtagttgattggctagaactcaaaaggaagtctcatctccaagaagaaaccaactagaagctagcttacactgttgaggaacttagggataaagtgagtagaatgtagagggaagatattcgacctcaactcggcattgaagctatcccaagcaagaagtttgtttcagaatggtctgaagaagaggactacccacttgaaataaaagaagcttacaaggaaagggccattgagtactcaattacatacttgtcaagagagcatgctaagtccaatgtcgtatctacaaatgaagaagagaagatttcaattcctctctatcattctccttaagcctattgagtgtgaggagtcaagctagagacttaaaacaagctcacttgggaggaagtcccatatctatctttgtatatatctttacttttccttgttgttcttgatgcattctggtagtgtactgatgggttcaatccattggcatgttttgtaatcattcgttgtggcctgtgatcctcactccatataatttaccccctggtatgtgcatgaatacatagtacttatttcttactattctgaattctggaccaaatcatcctcgagctagtcttgatgtcttcctccaacatcttattgaggagctaaaagagttgtggtctactggagtcgatgcgtacgatatttcattgagtcagaattttaatctaaaagctgtattactttggacgattaccgactttccggtgtatagcatattatcaagatggactactcatggtaaattgtcttgtccagtttgcatggaaagtacaaagtctttttatctacccaatggacggaagacatgctggttttattgtcactatagatttcttcctcatggtcatccatcctgtaggaataaaaaagactttctgaaaggaagagatgcttctcgcgagtatccacccaagtctttgacaggggagcaagtttagtacgagcggttggctagtgtaaatccaccaaaaacgaaggatgttggtgggaacggtcatgaaaagaagatgcgaggctatgggaaggaacataattggcacaaggaaagcatcttgtgggagttgccttactggaaggacctcaatcttcgacataatattgatgtgatgcataccgagaagaattttcttgacaacatcatgaacactctcatgagtgttaagggtaagtcaaaagataacatcatgtcaagattggatattaagaaattttgttctcggccaggcttacacattgatagtaagggtaaagctccaattccagcgtatacactgacagaagaagctaaacagagtttatttcaatgtgtgaaacatgatgtttgatttctagatggttattcttcagatttggttagttgtgtagatctggagaattcaaagttttcaggcatgaagagtcatgattgtcatgtttttttggagcgactacttccatttatctttgctgagctccttgattaaaatgtccaccttgcattatgaggtataatacttactattttttttccaacacttttttatctaatcatttaacttgcacatatattttaggaattgtaacatttttccgggacctatgtttgagaactttacagacaagtcgcgttcaaattctcaaacagaacatagttttaatcatctgtaacttgaaaaagatctttctaccattattttttgatgttatggaacacttacctatccatctctcatacgaagctgaattgggtggtgatataacccgattttcaccaattttatctataatttaggtataggattttgattctttatgttatttctcgagtctttttaatgtcttttcaggtattctatgcaatgggacaacaatggagataaggacacattttggagcaaaacctaaggaaaaggaagctaaggacgattttggttcaggaatcagcgaggagtgtcgaccgacacactcttggtgtcgatcgacaccagttttggccccgtaaaaaccctatatgcttttgagtttccagaagctcaagtctgccccagaagatttctctatttacattattagtccctggacgtttttagggtctatatatatatattgtttttagacctaagtttcttttatcaagtcttttatcaagttctttgcaaaaacctattgtgagagacataagctattcatcccttgttcttcagagttttcattcagatctatatacagtgaagagttcctttcttttcccctctttatttactgtgtttatgctttttaattcaaccatgttttttgcttcatccaatatgcctgagtaatctgcttgttaggaatagggtttctcattagggattcatatggtttagtagattgccccttttgctaggttatctatagaattcttcatctttagttatacctaatgctagatctagagtaattaactagatcttgaatccagacaatagatatgcccgccataggtatctgtagttggatctattatttgatgagtctggtctataggtgtgtaataaaaatcggcctatttactaagatgaacaattgaactcgttaagaatgcatacctaaaggttcttatgaaaaatggtgatttgacaaatcttcgattaaattttttggaaatcttacaatttcttgagtcacaaaagtttttgtaatatatcacagctgtatctatgaatccactttagaaagcttccatgtaaaatgttcttacgaaaaatggtgatttgacaaatcttacaatttcttgactcacaaaaaaatatgttcacctaaatgttttacgaaaatggtgatttatcatatcttattagaattcttacaatttattgactcatgaaatatatatatgtatatacactttctctacgaacattcatgtgttcttttatctcacagttttcatattgaaaatgtaaaatgtacataaaaaaaaagtaatatgtgtgtttgtaaaacataaaatttacataaaataaaaatataaaatatacatataataaaagtacaaaactataagaacacaagagaaagggaaagagatggcgcaccattgataaatttgtaagtgtattttcttaactttatatgttaactatatttttcaactttctcgttatgagatttcaacacatgtccccacctttttgttgcttgaatttttaattatcatgtcatttgcttgtaagaagagttttacgagttatatttttgtgtcacaggtgtacatcttcaaacatgtatcgagcccatcatggagatcaagaagtccttgaagaaacagaaagaaatgtattacatgatgacgagttggatgctgacattattttgttggtgctcctgatttcttttcggatgttgtatttgaggaaatgcctacgacatcgaccttaatattctattcgtcgtgcgatcacaagaggcagagaaatctttatagaaaatgtgcaaaagcaaaaccttatgcattttcgacagttgtgtcgaatatatccacaaatatttctgaagttatgtgaacaactccgggagctgacaagtttatgcgatacgaaatatattagtgttgaagaaatggttgcaactttccttctagtagtcggccaaaattcaaggtattgttatacaaaagacacttttaataggtcaacgtttgcaacaagcgtgaactttcacaaagtgttgctgactcttaatcaaattgctctaagtgtaatggctaagcccgagattgcagtgcctagaaaaattagagaaagtacgaagttttatctgtattttaaagtatatctttcataaagttatgtttttgctttttcattatctttcatgatataaaactttattgtttatttaggattgtgttggagctattgatggtacacatatccttgcaatggtatcacaaaaaaaaacaccttctttctgtaacagaaaaggtgttatattgtaaaatgtgttggcttcttgtaattttgatcttgcatgcatgtatgtgattagtggatgggaaggttcagctcatgactcaaaagtattaaatgatgctttcacaaggaacagtaatcgactaccagttctagaagataagtacatgtctttatattgtaaatatgtttttttcaacaagacaagtgctatatattattgtatcttttataagttattactatatttcaggaaagttgtatgtagtagattgtggatttctaaatcgtcgaaactttttagctccgtatcgtggtgtcagatatcatctacaagaatattctggtcaaaattcacaacaaccagatgcaaaagagttgtttaaccatcgtcatgcatccttaagaaacgtggttgaaagaatatttggtatttttaaatctcgatttctaatctttaaatctgcacctccctttccttataagacgcagacagagattgtacttgcatgtgttggtttacatgattttcttcgaaagttttgtcgaacggataattttttggaagaagacgaaagtgcagaagaagttgtcgaagaaattaataacaataatgatgaagttcttacaacccaagatcaatagagagaatatgccaattagtggagagaaacaatagcatcaaacatgtggagtgattcaattgagaattcatagatcagaacgtgacagattatttcttaaagattgtaatattttaattttataatccttttgtatgaatttaatatctgctttgtttgactttaaattccactttatttgactttcaaatcgggaaaaatgtcaaaaaaagcatgaactttcaaatttggaacgaaaaaaatatgaacttccaaaatgccactaaaatcgtaaacttttgtttgacttttgataaaatggtcaagttttgttgactttgccattttaagcatgtcgttaagttttcgttaaacaaataacaggtagagtcgaactagtgaccttttcgattctattgaaggactaaaccattgagccacatttatttttggaagtatagtaaacatatacatacatatatacgtaattaattaaaaataaccaactaaaataaatcaataatatagaaaattacctaaaatttacacaatccttctcatataaatataggattaatctatacatgcacatagaatttcattcaacttcactttatatatagttttatttataataaaacatatatttgataaattaatttgataaatatttgataaaagataaatataagatcattattccatcttcaaatcaaatttttattcataattagatggaaagtatataaaaaattattttttggtaatatatttataggttctatatttcacaagtttcatttttatataatttaagagaaatttttttaattcaatacgtttaataaaaagatttacatttttatttgggaatatatattaatggtaggtgtatttaatatttttacatgtttggttattggttttatagttcgatcaactggaattcgatccaacgcactcccgcacccagaaggtgttcgatggaatgcttgctctactagttcttgagatatgcgtctctatcccaagggattggccgtttagagtgtttattgacttcatcaatcggttcttattgcctgcatagttagatttcgttaatgggaattagtctgtgctagctttgcttgaggatttctatcacgggagtgaattaatcagttgttgaacatattgtctagggagagcttgattgtgcttgttaaccatccgaatagggtaggataccactccattcgattaccccatccttagcaatttctcgtctatatgatttctctatttcatcgttatcgcttaatcgttctcattgcttgtttcttagtttttgcatttactagactaacttactcgaccacacccagtgtctggcaacagactgtgcagtcgagtatagttgttttattttttgcctgttactcgaccacatcttgcttcttgcataagccagttgtggtcgagtgatttgtgtaattatgttttctgcatgttcacttacgactgttagaaactccaaaacctgttattcttggcttgacacccatttggattgacaccataagtactacaacgacatgatagtgctattggattaattgactaaaaacctattatgagcaagcagtcgtgagtggtttctcgaaggtctggttctgaattctactctttgactgaactacactaacatcctctttgttgatctgagcattcaagtcttgaacaacatcgtacagactatcaatctgttgatttgtcatcactgggctcttgagaatctgttcaagcatgcattccatcatactcgtagaagtgggttaagggtgggcttggtgagtagaatagctggaatgactagcatagaacatatcatgcgtgttgtagtcatcaagttgaatagcacgtccatctacaactatgtatccgccttggtgtcgatcgtcagcctcggcaaaatcaggtatcaggtttccctgctcatcgattttctgaccatcctcgttgtatgcttggctagctctgtcctttaacactcctgcagcatcaggtattactatcaacatattggtcttgcaattgaattcttgaagctcctaaaacacaagaaaaaaaaaaactgaattagtaatgaaagaaaagaaagtctagacttaaatcgacacctagtctagtggtgaagcaaagagaactttgacaacgacgtcaaatttgatgtaggtcaaattaatcctaagaccactatttcaaatagacagatcgtcgttagcacttaagggtcgaattccactgagctctcgatgttcacacaatagacttatgatgatttcaattaagctagacaaagtatatgaatgtaaaagacagtaaagcaataaaatgagttgtatattctggagattaaagtgtcgggtctaaggaattgtcttgggaaatagataaattgcagatctagctaatcttaggattgttatcgcaccgttctcgaactcaaactaagattttagaataatctctatgcctagaataatcggtggcgttccgcaaaattctctatgcctagaataatcggtggcgttccgcaaaattctctatgcctagaataatcggtaaccagagaagccgagaaatcttatacgaaagcatgcattattatcaactttgattagttcacctagtatataaacaagagcccttctatgagccgacctgttctttcttgaatacttaggcccatctatgatagttctgataacaactacctatggcgggtatacctattatctaatatcaagttctaggtgatcaatctaaaactagcagtaagaacaatcaatatgaagaagtttaagaataatcctaagggatattcgatctagtattccatctaaatccatattgagactccctaaacccaacaaggtgattacttagacgtgattaaagtaacacacaacaaagtctgaataagaaatcaataataacaacagtaagagtaaggaagatcttctccaaagggagtctccatagggttttgctccaaaagtacaaaagagataaggatattagcctctccaagcttagctctaaacaatgacctttaaaactatatatatgacctaaaaaaatgtgatggaccttctttagaaataaggaaaagttctgggccgaattttgaaatcttcaaaacatcaataacttgcgtctttgactaagttatttcttcagcagcataagttccctgttttcccccagaattctctattatcttctattatctccaaatgaatctcaaacatgtaaagacctgaaaaagactagaaaagactctaaaaataacaaatagactctaaaacgtatacctcaaacatagttaaaactggtaaaaataaggatatatcagctgtcgagtttcaaagtgaccgtccgaccgagaaatcgtgaaaagtgttaccatcgagaaactatgcccgtgatcaagatcctttgtccgtaacttattatttcctgtccgtgatcatgaaaacctgtttgtggatgagaaatccctgtccgtgaccgagaatcattgaagctaaccttaaaccttcatccgaatctctgtgagtctcgagcgtgtgatattgcacatgataggtttgggtgattgattgcttgtttagttgcatgatcatatactcttgcattcattgaatgatttcatgaattatatgagaattgattaatggtgtgaatggtgatagtaagctgcatatgagatcttttagattcttatgcttataggcttatggttgggaggttgtggtgagtaaggatattgatgattctatgtgtttcagtaaccatatgtctcataatatcttaaaatgttcggtcttgatgtgtggtgctcgtggtaggaggcagagaccataagtgtatcaaaatcgtggtatatctgaccttcgtagtgaaccgtgctatcgtggggtcttgttaacgtgttagtcgatcaccatgtagtgccaagggctcggaaagacggttttgaaacatcaataacttgcgtatttgactaagttatttcttcagcagcataagttccctgttttcctccagaattctctattatcttctattatctccaaatgaatctcaaacatgtaaagacctgaaaaagactagaaaagactctaaaaataacaaatagactctaaaacgtatacctcaaacatagttaaaactggtaaaaataaggatatatcagctgtcgagtttcaaagtgaccgtccgaccgagaaatcgtgaaaagtgttaccatcgagaaactatgcccgtgatcaagatcctttgtccgtaacttattatttcctgtccgtgatcaagaaaacctgtttgtggatgagaaatccctgtccgtgaccgagaatcattgaagctaaccttaaaccttcatccgaatctctgtgagtctcgagcgtgtgatattgcacatgataggtttgggtgattgattgcttgtttagttgcatgattatatactcttgcattcattgaatgatttcatgaattatatgagtattgattaatggtgtgaatggtgatagtaagccgcatatgagatcttttagattcttatgcttataggcttatggttgggaggttgtggtgagtaaggatattgatgattctatgtgtttcagtaaccatatgtctcataatatcttaaaatgttcggtcttgatgtgtggtgctcgtggtaggaggcagagaccataagtgtatcaaaatcgtggtatatctgactttcgtagtgaaccgtgctattgtggggtcttgttaacgtgttagtcgatcaccattcgataaaagtgggttgatatattcggagatggaccgatatcaatgaaatttggatctagtcggaacttgactaagatcgggtacagacttagtctggatttgactatttctggggttttgatcttatcaaaaattgaccaagatcatggaaaaatgacaaggtcggaaagagacctatgtcggaaatattgaccgagtccggtggggaccaaggtcggaaatattgacaaagtcggaaaaagactttagtcgagaatatgatcgagtccgggaaaggaccaggatcagaaatttgatcgaatgtcggaagagacaaagatcagaaaacgttaatcaaatccaggaaaggacaaagattggaaaacgttgatcaagtccaggaaaggacaaagatcgggaaataatgatcgagtccgggaaaggaccaggatcaaaaatttgatcgaatgtcggaagagacaaagatcagaaaacgttgatcaagtccaggaaaggacaaagattggaaaacgttgatcaagtccaagaaaggacaaagatcgcaaaacattgatcaagtccaggaaaggacaaagatcgggaaataatgatcgagtccgggagaggaccaggatcaggaatttgatcgagtgtcgtaagagacaaagatcgggaaacttgatcaaactcggaaatagagatttgatcaaatgtgatatctaaagtctcggagagactaaagatgggaaagcattaaggagtaaacaagatcttacacccgctgaattcgaggacgaattcagtttaaggggggtagacttgtaacgcccgtgtcccgagttagggagtaagcaagatcttacacacgccgaattcgaggacgaattcagtttaaggggggtagacttgtaacgaccgcgtcccgcgttcataaagaggccaggttgttttaggagaaaactataccatggtcaagaaacggactaaaatacttagtcagaagaaagagaaagttcaaagctcaaccagctaggtgagctggacaagctaggatgaactagctagctaagctaggtgagctaaaccagctggaagactagctagctcagctaggtgagctgaccgacagctcgactgagctcggtgaactgatcgtgtactgacccagctgggtggttcggtcagctgacactcgagctggtggactgtggtagctcacgggtgaagaggtgtctcgcccaaaaggtgtaaggtcgagcgggtaccaacgaacggatgcatcgcctaatagatgcaaggaacggatgcatcgcctaatagatgcaaggaacggatgtgaccttttggaaggatgcaaggaacggatgtgacctttcagaagggtgcaaggaacggatgtgatgcttcgggaagcatccattcgccccctatataagggagaacgcccaaggcctttggaataatctcacatcatctcacaataatctcatatcatcccacaacatccaaaacaccataaaacattcttaaaggagtctcaacacatcctagagttgttggtcggaaagggggtgcggctcggcgagtataactcgaccgaactgatgcgcatgctacctcccggtccaacggttcgatggagtgtagaggatggagagggtagaccattcgtcttagagacgaatcggatctggtagaccgatcgttggatcggatcggccagaccgatcgtcaaacggatcggatcggccagacggatcggacagaccgatcgtcggacgggtcggatgggacaggccgatcgtctgacggaacgggtcggacagaccgatcgtcggatgggatggatcgagaaaagtgttcgaggaagcacaaggataagtgcatccgaacacacccaagggtcacccatggatgcaatcttaccggtaaagggagaaagcaccaagaatgggtaaggaacgtgattcactatataggatcaacatcgcggccgccttcatgtatctatctcctcagccatggtgaaaccgatcagagattggtaagaccaaagggtgactcgacggataaccaacgggaaagtccatggtgggaaccgatggacaaaacggatattggacccgcgagcaaacctaaggccgacggaagaaggatttcatgggctagcctacgatgatccagtggatgaatccaaggacccttgggtgtgataaggatatagttcagatcgtatggatggatcaataagccgaaagctttatcgaccaccatagaccggacggataaatggttagtaaaccatgggcggtcgtagtaaatgaacagatcggaaacatggatggttcgataagccaagggctcaatcgtccaccatggaaccgaaggggagtacgtttggaggacggatggaccaataagccaagagcttgattcgaccatcgtgaaccaagggaatcgtacgatccccaatctctatcgttgtacttagaccagtggggttggttggttgtatggctaagtaacgatagggattggttcatcaattcacgaccgatgataagtcgttgaacgaatggagtaaggcgacaaacgggctaaggaatcaaatccgcatattggccaaggtatgtaacgatctagcttattagttaagatagacgtttggtaattgaccgtgaaagtaggataaaggaatatgcgattgtttggcttagaatggttagcgaaaatatgcatgtcttgaccgagaaaaggatcgatctaagtctaagggacaaagacgatgaaaccggtacaagagttggttagaattaaaccaaggttagaaagacttccgctgtgtaataagagagcgattatagaatttagcctcataaaggcaattctatgttgaatcgcgaaaagttaagaggttcggccacccctacagacccaaattgtgttagtaggagttccggtggttatccagtatacgatcctttcggtgaacctcttggtaatcccgatggaaaggttcgaagttatccttgggatggattggttgtcaggatatcatgcccatttggattgcgggcggagcagagtagtgttcgaactaaggaatcgaccacgactcacttactgtggaatcaatccaagtaagattgcttcgttcgtgtcagcactaaggttgagaatttactaagggaaggagaagtctaccttgtcactttaaccgccgttggtggagaagttgaaagtgactcaaggatttaagagatcccggtggtgaacaaatttgatgatgtgttcaagcccttggaaggattacctctgccgagaaatcatccgtttaccattaatcttgaacctgggatgattcgaattgcaaggacactgtaacacccccagtccgaactagaactcagccagtccggcacggcccagacacgccacaatgaaaatgaattcccatagagtagtcgaggttctgaaacacatttcgacccttagccactcaaggttacccatttccccatttgggatccatttaggcttgccaaccctaacttcacccaaatgttgtgtcgactcggacaaagtcttatcagtttgaaacccgtaaagtataaaataaatactgatttcattatcaaagagttatgaaaatacaaggaaaaaccacaacataaacattgtttttatggccaaggcatgaggcccaaaagtacactatactaaaatacatactttgagttttacaaaaggacactgaaaaactactttggattccctagtgttcaccactccctctaattccctttaaggttacctgcaaaacaagtagagtcatgagtaatctagcattactcaatgagctcggattcctcaagaaaacgttagtctaatccccacccataatccccacatgaataacatgaataatcagagtacacagagaaggtagtaaaccacacaaacacaagcaagaaataacgtttcttaaagttttaattagggcatgaatgcactcccttcctcaacacacgtgaacacccgagttataaccacaaaggcatataaccggaacatcaccttggctacaccgtcgtgaaagcgacaccggcccttgggtagctaacccagtctctctgggtccttcgaaccccttgggtagctaacccagtctctctgggtccttctgactctaggacaaaacttgctcaccaagttagctcgcccgggtggattcggctccaagttggctaaggcgtggggtcgaagttgggcttgcatggcttgggagaaaacttggtcaccaagtcagctctgcccgaatggatttggctccacgttttaaaacttgggctctactctggcttccgcggattataaattggcagcccttcttctcatttcactcaccattctctcttcttcttctcttgcccttctttcttgctcggggtcaatgagcggggtactacatgcaccatataggttggtgccagctgagcttgcagaacttcagaaacaattggaggatctactcgaaaagggatttatttgtccaagttcatcgccatggggagctccggtattgtttgttaagaagaaagatggaagtatgtagttatgtatagactaccgaggtcttaacaacatgaccattaaggataagtaccaattgccatgagttaatgagctaatggatcagttgggaggagcaagttggttctcaaaaattgatctggcctttgggtatcatcaaatttcaatctcgggatcggatgtaatgaagactgcctttcagacgaggaatgggcaatataaatttgtagtcatgccatttggacttacaaatgcgcccgcagccttcatgagacttatgaacgaggtattacacgattatctggatagcttcgttatcatatttatcgatgatatcttggtatattcacagagtgcggaagtgcatcgtgaacatttggggaaagtgttggatagacttagggaacaacggttgttcgctaagtttagcaagtgtaagttccggcaacgagaaattggatttcttggctaccgaatttcaggacaaggagttacggcggatccagaaaagattactgtaatatagcaatggccgcaacctacatccgttacagaagtacggagcttcttaggattggcaggctattatcgtaagtttgtcaagggattttcatccattactaagcctttgacccgacttactggtaaaggtgtacccttcatatggagtaaggatgttgaggaagcctttgttaagttgaaaacggaattaacaaccgccccaaatctagcattgccaaagccaaataaaccatatgatatctacacggatgcctcgcgagttggcttggtatgtgtccttatgcaagaaggaaaggtgattgcctacgcatcatggccattaagatggcatgaggagaattatcccactcatgatttagagatggccgctgtagtattttcgttgaaagcatttgagatcctacctgtatggagagacggtacgagtatttacggaccaccaaagtcttaaatacttattcacgcagccagatctgaatttacgataatgaagatggatggagttaattgccgattttgatttgaaaattcaatatcacccgggaaaggctaatgtagtagcagacgccttaagtcgccggaaaatggaagtagatgttggaaaggatctagagtcgttatctgatgagctaaagaaggtaactttgttagctctagagggtgaatctagtgagcccttgggtttacaagttgtgactcaagcaaacctacttcaccaaatccgagaggaacaagcgcaagatgaaaagttgcagaaaatcgtggaggagttaaaaacattagatggaccaaacgctagtggcaaccatctagctgatgacggcaccttattactcaatgggagaattacagtgcctgatcgtaaaggattacgataagaaattttaagggcggctcatacttctttattgagcattcatccgggaagtataaaaatgtacaaggatataaggaagtattaccattggcctgggatgaagagatcagtggcgaaatgggtaagccaatgtgagtcatgccaaagagttaaggtggaacaccaagtgccgacaggtttattgcataacctaccaattcctgcatggaaatgggagtcaatatcaatggtttttatcactgaattaccaacaagaccaggacgtagcaatgaggctatatgggtagtagtagatcgcttgaccaagacgactcatttggtatcaatgaaaagcattgatcagtcacctatcctggcagaaaagtatattgatgaaatcttaagactccatggggtaccaactaatatagtatctgatcgagatcctaagttctcatctttattttgccaagacctccatcgtgctttagggactgatgttcccatgagcacgacattccatccaaaaactgacaggcaaactgaaaggaccatccgaaccataaaagatatgatttgactatgtgcactagagtgggctggtgattgggaagactacatgcctttaattgaattttcttccaataacagctatcactcgagcatcggtatgtcgccatttgaagcaatgtatgggaggccatgtcgaactcctctttgttggactgaagtaggagagaggacgagttttaataatcggttgatcgatgagtctacggagaaaattcagttcatccgagacaatatgaagaaagctcaagattgacagaaaaagtatgctgaccgaaacaagaaggcgacatggtttatcttaaggtaaccgcgttaaaagggaatgatcgctttggaaagattggaaagctcgctgtaagatttattggtccatataaaattgagaagaaaatcggggaggtatcctaccgtttgtttatgccggaagaaatgcgattacataaagtttttcatgtgtcgcaactaaggaagcatgttccggatcctaatgctatcatacccaagccaatacaagagttgagaacgaatctcacatatcccgaaggacctcttggtattggtgaaagacgaatgcgggagctaaagaatagaaggattccgcaaattcaagtgttctggggaaggcacagttgtaaggttactacttgggaagatgaggaaaagttctggacgaaatagcctcagtttttcgaaccagggaacgcagaggatgaagacggaccgtctaatccttctggaattcgggacgaattctagtaagggggggagaatgtagtgacccgctgactcgctcaagcacttgacacgtgggcatgctgaatcgcctttcccttgcttatataagccgaactcgaccccaattgttttgtgaagagaaactgagtggaagtgagaggctgccaagttgaaaccgtccgtccgattcaagttaaggtcccatagccgaaaactctacccgaatcgttggaaactttctgttggttactgagtgagttctggataatggtttaagtttcatattcatattctcatgcattcttgattgattttgtgagttatatgaatagtgtaaatggttatattggaatgcatatgtgatctttagattcttatgctattatttatggttgggaggttttgttgggatattgatgattctatgtgtttgatttaaccatatgtttcataatatcttaaactttggggtcttggtacgtggtgcttgtggtaggaggcaaaaaccataagcgtgccaagatcgtgatgtgtctgaccttcatagtgaaccgtgctatcgtggggtcttgtaacgttgttacttgatcgccatgtagtgcgaagaacttggagagacgaggctagctatcctgcccgagtgtctacacgacggtgtagcgtttggtagtgatgctccagttgcatacctttgtggttgtaatgcgggagatcacgagagtgtgtgtgtttggtgttgggttggaaggcagcatgtcgagcccttaaaaacttaatgaaactggagtcttaatgcatgttcatgtttttgtagtttgcttcggcaagataccttatgttgccattctctgttgcgtgtttcatgttgggtattcgggttggggtaaactaatgtctgttgcagggaatcccgagctcactgagtaaccttagtaatcgcgatggccttcataaaacttttaaatgtttggtaacatgttgtgtaatatttatacttatgaaataaatcagatttcttgtacaaatttgcaagtaatgacttataatgacttagtccgggtcggcacaacacttaaatatcgagagtggtcgtcaatacgccggccaagggttgagattggttcctgaacctcgattggatgttgatgatcaatctcaatgtggcgttttcggggcgccaatgacttgtccggtcatagagcgtctcgagggcgttatagtcgatggatatcgttggactactgcactggtcaacccaaggtgtacaatatcttttggttttaactgattatttttcgaagtggattgaggccgaagcatacgtgaacatcaaagactcggcggtaaaaaccttcatttggaaaaacatcatatgccgacacggtgtcccatacgagatagttacagacaacggaccacaattcatctcacacgagtttgatgctttctgtacggattggggaatcaaagttagttactccactctgcggtatccacaaggaaataatcaagccgaagcttcaatcttaaaaagcgtctaaatcatttgaaaggaggatggtacgacgagcttcaacctgttttatgggcgtatcgcacaacttctagacgttctaccggagaaaccccattctcattggtatacgggatggaggcagtcgttccagccaaactcaacgtgcctggactacgccgaacggaggctcctttaaatgaagatgaaaattcagcaatgctcgacgattcgttagataccatcaacgagaggcgagatcaagctttaatccgaattcagaattaccaacaggcagcagctcgatattacaattccaagatcaatagtagacctttcttcatgggagattatgttctaaagcgtgtttttgacaataagaaagaagaaggagcaggcaaactcggcataaattgggaaggaccttacatcgttaccgaagtggttcggaatggtgtttttggcttaaaagatctagaagacaggccagtcaaacgtccttggaatatggtgaatttaaagaagttttatgtttaagtaacatgcgttttttgttatgtacacgaactacggtgtggctttatcccgaaatgggtatgtaggcagctcggaaacgagttcaactactaataaatttgttttattcatttgaaaaagggagttcgactgtatgaacgaacaaggcaaagaagttcggatgtgcgaacatacaaaaacaagaaacaaaactacgtttattcaaagcagtaagtaaagaagacgaagtcccaacatgcgtgcccttcgaagtaagaaactatttttgtcttgcaaaacacttggactccttcgccggcgaggtcaagaataggcatcatacagtttggtatgcgagcaaactcggagattccgagtttgatccaatccccgggaagagagttaagggtgtgaagctcccttgatatcacggtgaccgtcgccggagaggaacagagggctgccggggtgaagaagagaaacagtggaggctgcttcgttctccatttgtgtattgtttatcaagtaaatttctgaaatcatacttggagaatttggtggcagatgggacctctatttatagagggttagggtttttccttggaaccacaagtttaataactgtggcgtgtccgaatggtttaaaccatttttgggaatcaagaaaaagcaattattacctcaaaggcgtgaagctttttcttgtttctcgagaaaggagatggcaaccgtcgcattaaagacaaaaagcccattaaatataaagaaaacagttaaggcccaagcctagtaaataagctgaattgattaaacccgagttggggaattcgcgttcaaaaccgagctcggttctcgcgttttaagagaaaggtatgatcaacctaaaaatctcgaaacttagccacatggccaaaagatatataaagacggactattgcaaaatcatagttttaaaaggtttaaaagcctcctcaggcaaatacttgttcaaaaataaagcctccttaggcagcaacatatttatccaaatttaatttctagttttggaagtgtttgggaaagcccccaattaaagtagatacaaccactaggaatccgtaatcttctcggggtcaacgatagccggatcggcttcggttggttcaacaacagctgactcagttttggttggttcactggcagagagtagcttagaagagtttcccggctcagttccggcttcatgttcaacatccgggatgatcactgtctcactgttcacgaccggacagtagtatcgaccagttcactagagcctgaagcgaacgtttcaagtcagcaaaaaacacaaatacaacaactatagattataaggattcagatgtaaaagtttaccagcccaatctaagcctgattcactcaaaggcagtgattcgatgtaaaaatcctcgaagtgttgagggttaaaggacaaggtgggaagagaagcaaggtggcctcttttctcagctaaaacagcctccagtttggacctttcttgttcctcagagaaatcttcctcaagggtttggtccaacagaagcaggttactttcgtgctccttaatgtctgactccagctccgatctggccttctcagtttgaatgaagaggatagccccttgaatcaattccatcccgcgacctttcacctctcttctggcttttgacgtagacttggctaattcagcatctcaaagcttagcaattgctttgtacttagccttaagttcggtgaactgattgttcaaatcataagtggccgatttagattcagagagcctgtctcgagcagtcgagagttcatcctagagcttgtcgtatctttggtactgatcatgcaactcgccattcgatctcatgagcttagaagatagatggtcgactcgatcctctagtttctgtttaaagtcagaggaggagcggagatcggcctcgagggaagaaaacttgcctttccaagcatcaatatcctgttctatactgagcagtaatccttcatagtgctcgatcatgtcgttaagctcgttgttcgcctaagcaagagttttatatccaaaaaagtaaattagcatgcgtataaataagcgatatcggaataggcgaaaacgagactaacccgagatgaatgatgagcatggagtaaaaatcgctcgcgaattgtaggtcgccatttgtcgaaggtgggcaggatcgtgtctttccaggttttgaagcaccgaaagacgttgccctctttctccatcgctaatagggagtgaaagatgtgttactaaaagttcgaattataccgaaagcgagggaaataaaaccatcgtttgaacctataagcgattttgtttgaggaacgagaacgaccttcgactagggatgagtatctcggggctcagcatcttcttgtcgaggagtagcactttgatcagtcttctcaccactaggtcgaagagaaggagatgtgatacaggaagaggaggagaacccatcgatcaagatggaggagatgatcgaggagagcgatcagttcgagcccttgacttttccctccaaggagaagagctgttgcgagctggtctctctctctttttgcaaatcaagtcagcgattggcttgctgctcagtccatcacgggctgaagtcccgtgtggtttgggaggaagcggtggaagatgatggagttgtccaggaggactcattttgagattccatatagcttcaaaaaatcggtcgagggtaaacaaattccaaagggtttcaccttcgatgaccactttgaagaactcgatttattcttcagtcggaagagtcgcagcaatgaaagctgcacaaaaacaaaaacaaattcgggttaggaaaagaacgtgtaaacgaacagaagacaaatatgtttctgccctaatttctaccaggtttcgtggaccattttgatggaagcacttcggaaaggctctcaattgaagcaatggttttctttattaagaactaaggatggtgcgagttctcgtttttgttcgggagatgggaaatgaggtttctgttggcatttaggtatgccgagaagtaaccaactttcttcgacgaacttcttacgctaagaagctcgttcaattcgggaactccaattatgtacccagccaccaccgcgacggtgataatccctagaatagattggagaaggttggaggttaattgaggtagagcaatttcaagagcggccaagtaccgaacgagtgccttgggaagaggaaaggtcagtccgtataccgcgaggtgaatgagaagtcgggattaaaggtggttagattaaagggcctttgggctggaaggggaaagcccaggaagctcgaagtcaattcaaattcgaacgtttgaacaatgaattcgaagatcgaaacggatacatttaagatagaataattgtgtgtaaatgagaattaattgtaattcttaggtataaataatagggccaagggccataagagacacacgcatttgtttgcaaacttagtatacatattttcttacaaaactcatagctttctccataatcaatagttctttacacttatttttgtcctcaagaataatccgtctcactatacaaataaatatttgagtgtgtgaatccgacatccacaattgacaccccctataactgcatcgacatgttagtgtttaagggaattgaactaaaccacacttcagcatataactaggcgtaaaaacctagttatcaatttggcgccgttgccaattcattgttgcattgttacattcaagatatcagaaaaagttaagatcaagttcttttacattactcaagttactaactcatcttttcgtctgtttgtttttgtggtacaggtactaatatttgtgcatgcaaactcggtccaaaggttctgcacacatactacctttcaaagacaaaatagaaagaatagctcgtgagttacaagcaaaaaaaccaaaagcagactgtgatcaacaaagaccagttgctatggatcaacagaacagaccagttgatatacaagacccacctaatgttaacaaccaagatcaagattacgcaacaacataactgggcaaccaacttttaactgaagtaaatggttaggtaatccagaaatcttgattttattgagaaaatcaggcgtatatacggggtttttatctgcacgtgtgtcagaaggatcaatagaatcagaacttcgataaatcttttcttcacctgcaaagagtagtagttcattgtcatctactctattatatgtataattttgagtaatattcaaagttaattcactaacatgttagtttggaaagcatatgatcgttaattgagttaacatcatcattggttggacacaaaatagctctgtcttggaaaaactttggatctctctcttcagcaaaggatgtaccatagactgctttaatgatcgattctatagggtcgtcttcttcaagtataagaatatcatctggtatttgtatcttagttactccgtcgttaggctcatttagtttcccctcgctgactgcaaggatccatttcgaaaaatcctcaatctcacgtgcctcatttatgtctatatcttggagaagcctcatgttcttggtcaacttcaaaactttgcaatgctgccaaagataagacgaattgagtgacgatttgaagatcagttccctaccggttgcagggatgacaggaaagatttgcctaaaatcacctccgaaaagaattacttttccaccaaacggcatgtcttctggagtcgatagaatatcttttaaacttttatctaatgactcaaaacagtacttactcatcagaggagcttcatcccaaataatcaacttagctgctgttactaattgagcaagatcactaccacgctccatgttgcatgttgaggtctcatgaggagttagaggaataccaaacctagaatgtgcagttcggccaccttctaataacagagatgcaatgccacttgacgcaacgtttaaacaaatatctcctttacatcttatcgttgtggatagaaccttccacaaaaaggttttccctgctcctccaaaaccatataagaaaaaaacacctcctttgtcattaaggacagcatccataatttcatcatataccttcttttgttccctagatagcatctttaaccaatcatcatgtttttttttcaatgtttcacgattctagtagcgctcatcgagtatcaactgattaaaggaaggttcatcgccaggttcaagctgcggcaacatcttatacctccaaagatctgctccatgccgtttcaatattttttgcaactcttttaaacataaccgaatcctcaaataagatggaacctcctcagcaaccgcagccctctgctgcacctccgccactcgtggcgcaactggagtctgcactggtaccacacctggtaaccgctccaacaactgcctcagcaggcccgccaaactaacctctggaacctgggctcctctggctgcggcacccatcactcctgggccctcaacacaaccggcatgcacaccggcaccgacaccagctccaccagcccccactccggctgcaccagctatatcggcacaaagaccgtccccaaccccgagctccacaaactcaggctacgaatccacactctgctcaaccgtggcactgtggtcgtcactctcgccagtaccctcgaggactcgtcctctaccacgaccacgaccacgaccacaaccacgaccacgaccacgaccacgaccacaaccacgaccacgaccacgaactccagctccactaaccatctgcgctgctcaagaacaaaaggctaagaaactagaacaacaaatatatcacaaacaacttacaatggaatctcatttaaggctcggagaagatgatgctaggactccgacaacacacaattgactaaacactccataatcaatcctcaatatgctaacaccctagctcatcccacatcaatcatcaggaaaataattcatcaattaagttttctacacatcctagaaccgtgatccctctgataccaaattgaaacaacccgacccatttttaaaaaaaatataattaaatattcccataaatatctaattaaaccaaccaataaaataacaattaaaccgcaagttaaaaatactattttatgaataaataaataattcaaccaacaaaaccaagaataactaacaatcctaaccgggttccaataaccaaaaacacaaaaaataaaacaaacgagttcctagatcatcctctcttcattgccatgattccacgatcacactttatctttaccttcatcaacaacacaatgagatgcgtaagtattaacataaatacttagtgaggcgatcctcccatctacgagctatacacacaagcaaataaaagggtataatcacaaatacaacacaaataaatcagtcattgaacaattcacccaaaacacattcaccgcacctacttatcatcacacaaaacaaattacacaacccaatcgctcagataagctcatggtcacacactcaccttaacaaattaattctaataacaattaaacccgggagagactctcctagcgtctgaaagagtccagaaacgtcctacaacaagtcacaaccaaaagcaaccttgaagcaaactgtacatgaaaaacagaaacaatcaacctcaaagacgaaaacctaaaatacaaactaaccgttaactattaaatcgctccagtgaaacgttagccctagacgtcacgaagcttcccacaaaatattgtcccgatcggaaaacaaccgataccacgatcgcaatttcaatctccgctggtcctaattcgcgtctgagaaaacgtgtctcactaaactgcgaataactcaaattgttttaatccaaatccagttctgtaaactggagaataacgataaacgacttgggaataattctactaaatttcgttaccttttaccatgatttgatatgaccaaactgatttttcccaaaccctaacgattctgctccttttccttttctctctttttctcctttataaaacgaaaagttgctaactaaagccctaatttcgagtttccttcttttataggcacactttaggatttccaattaacccaaccaattaaaccggatgatttaaaaacaaaccctaaccgattttccggttcacgggtgttacaattctctgtatgttttatgaacaacaccctcgacggttttgatatcattatttgtttctcctacattgttttgctcggagacaacttcttttcgatgaggctctatagagacggttacacgatcaggtcccttgttaacatacttgaataagtatttaagagagacggattggttaaaccactctacattgatgtgagccctgtatttccgtaataggacatcgttatatggaacaacatactggttgtcacatggatacttattcttctcgatgaaacgaccagtatctttgcgcctatatttggataaccttcattgtcaagagacgtgtcctcaacatggttctttggataatacttggaacatttaccattttccatgcatggcgaattaggattaaccaatcggcatggtccatgaatcatacattctgagacagcttgatatagctctggatctttttctttatctggaatttcggcaaaaataatcttgtcaacatgatcagccgtaggaaacttgtatctaggatccatccaaacaattatgtgagcatgtggaagacctcttttttgaaattctactgtatacataactgtttcaacataataattatgagttaatgtcacttgtaagttaaaattcatgaaatatatgtataaaaatatgaaataatgtagtacctgatttggttttgccaaagatatgattctttgttatatcatccatcaagttgtcgagtttcattttataaatcctacaaatgatatccggcctgtcctcagcattcaacttccgctcttttacaaatcttgtgatctctggccacttaggattacatgtgaaggttataaataggtcgggaaagccgaaatgtttacaggtacccattgcatctaagtagttctgctgcatataagctggaccaccgctgaaagatggaggaataataacactttttcctttattagaaagatcattacccccagcatcagaagcatcttgaactgcctgcttgttggtactgcgcagcttcgtctgattttttttaataaatcttagccgattagactctatcattgtaaaagcgtcaactatgaattgttgaagtaaacgttttgagcaaaggaggatgtgcttctcatcttttctctcttgtaaacggtagtcaaaccactgcctcatactaacatcttcctgcttcttctttccttttgaagttttggtaggagttttttttattccaagctt

SEQ ID NO: 1334 - DNA, 96583 bp, Arabidopsis thaliana
aagcttcttaggaatgatcttcttttgtatgatagcactgcattcatgactcaataccaccataccttgcacttcttgaattctctccacgatcaagtctttcagaaacttgtgagagtctgggattagcgctagagcgtcaacaagaggtatccgcaactcaacctccttaatattcttggcaaacatagctctatatttatctgccaacgctttcttgtgacggccaggaaatggaagctgtggtttgtagggaggagggacaaagaccttttctttgtttttaacagcaactggttttggagcagttggtgatgctgctgggaagataggtcgagttgttggtcgagtaacgttgtcaagtggcagatcgagtggttgctcgagtgactggtcgagtgactggtcgagtggttgctcgagtgactggttgagtggttgctcgagtgactggtcgagtgatccgcgctttgatctccttcctgtgtttgtcatcagagtcagctgtgcctctgacggtcctatcacagtcctcgttgtaattgccatctgattgagcaaggttctctaccaaatcctagccttcttcaacatccttgttctggaaattttcattgctggcggtatccagaagcattctgatgcgtggtaggactcctctataaagagtgctgagcagagaggctttagtaaagccatgatgagggcattggttggtgtaatccttgaaacgctcccatgcttcacagaagctttcagcagtcttctgtgagaaaccagagatctcatttctgagtcttgcagttctggcattggagaagaactttgatagaaaagccttcttgcaatcatcccaggtggtgattgaatcatggggcagattcttctcccagatgtgtgctttgtcgcccaaggagaatgggaacagacggagcttgaatccgtcttcactgacaccattgatctttgtcaggttgtagagccaatcgaattcatcaaggtggtcgagtggatcctccattggcagaccatggaatttgttcccctgaatcatggagatgagaccactcttaatctcgaagttgttgttctggatagcaggaggtgcaattcctttcctctgacgatgatcacgtggtgcatctccagcaccaatgttggcagggccattttgttgattctgttcgtcagccatttcgagtggttgctgaggtacagggttgactgtgtttcacctttctctaagctcgcgagctatgcggtcaatgttgtcgttgaaaaggaggttctgattgcctgttgatcgagttcgcatacagtagaggtgtacctggatcaagaagacaacaagaaagacacaaagttagtaaccgaaaagaaaatttgaaaaagaacttgatctaagcaagtctgaaatgtcaaatgtaaaaaacagacacccaattggcaacggcgccaaattgataatagatttttcagtcaattaaacctaaagcactatcatgtcgttgtagtactgaaggttgtcaatccaaatgggtgtgatgctaacaattaagatgtgatcaaaagtccctaagtcaagccaagcaataacaggttgtggtgtgttctagcaattctaagtgaacatgcagaaaatagaaattcaagcagaaacagtaaaacactcgaccaacacagctctttgcagagcactaggtgaggagtaacacacagaaaataaaacacagatacttgactgcacagtctgttgccagacaacttggtggtcgagtatgaggttgagtaacaagaaagaaccgcagaaattaagcgacagataacaagatgcagtaaacaacagtagagtaaacaaaaaattcaatcagataaagaattcccgaggatggggtaattgagtagtttcgtttcctcagtttacaggtgattgacatgctcaataaattaaccctagacaacaagttcattaaccaaatctaagtgccaccgcaatagagactctcaagttaacctagtcccagactcaatcaccattgacgagagctaacctaacaggcattacgaatcaacaagttaaagccaaaacgctccctgcaaccaataccttggtacagggccacaagtctctagaattagtggttcagacatttcatcgaacaccttttgggcgcggaaatgtctgggctcaaattccagttgatcagaaagcaataggcattaagaacaactaatccataagggatctatcaatcaatactcaatcacctagcatactgagaattctacactattctaacccatcctcagaaacctattcactactcagacatcagaacagaaagcataaacgttgaacaagctaaaaacatgataacaacagtgtaatagaagggtgataacagaatgaacaacagtaaacgaaagcaagaccaaaagctgaatactgaatactgaatactgaatattgaatagataaagagaaatccggattacaaaaggtctagaacacaaggtctgcggaataaaactaaataaaaaacttgtttgcgaaaatgtgaagtacatgctacttatagccaaatattccgaaaccctaatacttaaaacgatgcagtattgggacggattaagaattgtactcgactcatgtggtcgagtggggatcgagtgaatagctggagtcttcttttcttccttgtgctcgagtgtctggttgagtgcggaatgaagaagactctgaagcttgccatcgagtgtgtagtcgagtggtggtgatggtgatactcgacttccaggtagagtgatggggtcgagtgatgattaggtaatggtggtaaagacactcgacctcagggtcgagtgatgtggtcgagtgatggtcaggtgatggagatgaggacactcgaccttgtggccgagtggtgaggtgaagtggtgatgtcttctactcgacctgggggtcgagtggtctgttgagatcttgaagctcctactcgacctctgggtcgagtggtttgtcatgatcaggtccgcttcttccagttagctcgtcaacagctccaaatcacctgaaatcaacacaaatatgcaacatgcatgcaaacctatcctaaacatgtaaagtgatgataaatgatgagaaatgatataaaacagtgatgatatgatgctaaaatgatgacaaatggatgctcaaaacatgcaaaatacacacttatcagtatctcatctacgttgaccttattcccaccagcatcatttagcgtttatcggagttcttatctgccgcctcagatccgccgcaccatcaccatcctctgccacactgttgccttgttagggttcctcttaatgggccactgttcttcgagcccattaaccaaatttaggcccatcccccaaaacaattgcccatctccactaatggattggcccagcccctccaaacggtctccgcaaaatcataggtttgacccaaactcctttttgtcttctcttagcttttatttgcgtcgattcatgataccaattgctaatggacatcaattgaatcataatcgaacattgctgctatgttggtacaaaaatcctttgagaaccttgccattagaatctataggtgtactattcatgttgctaattccttgaagaagatcggcatgatgatcccgtctccaaggagcagtgattaccgtagtttcttcaagttttcatctccgattcattttattattgatttcatacttgatatatttagctacatcatgggtactattcttgaaagtaaaagtttgatgaataatggcattatgatcccgtctccttggatatgaattagtgctttaggtttaattgatcttaaaaaacctattatcatctccgttcctcattggcttatcaaacctatctttttttccttattgttagctttcgttattcggagttttttgtaaccctttgtatgcttgaagatcttgtaaactttacctttaggagatgcattgaatgaaatacaaggcttgtttgacaaaaaaataagaataaataaaaagtatcaactgaaaaaagcattcgtttatgcaatataacaacgtattcgatgattcaattttaattaaaaaaaattctaacaacattctcaacaatgcatcatacacataattcagaaacaacattgatcttaaaccaatttaacagagggtagtgttggattctaaaaacctaagaatttgatgatggagctctttacgtattcttcacactcagtggtttattatataaatatcaatttaagagaatataaatatcaatttaagagaataacttactcaaatcattaagtaatccacaactattatacactcatactttgagtttggattacaagaaaaaaacaaacttcgggtataagaaaactattaaaatggttttattgaaaaatcatgtaatattaaaataaatttagtaataatacaattaaatatgtaaaataaaataataaatatatcattaacctataaattagaagttgaagagcttacattaattatttaatagacacatggcaaatggtaaagtgatgatgtgtcaatcatatggagagagttggccaactttcatatatatgatttataaaccatgtgaggttcaaaccccttggtttatatttgcttaatagtataaagtcgtggtcgtataacttttatgccggcaggatgttggtattgacgttatgctgcccgactattatactttgattgttagataactaggattagccaaatcatgaggatcccatccgtatgttgtgcatcgcgtgtaactccgttccattatggcatacgaaggcaggggctggttcaataccgaccggatgcttcatgacgatgtagtataaggaatggcaatcttctttagactttgtgtctaggagtgtgcaggccattgcctcgggttatcatgtgttcgtaaaaggccttacttaagtagttaggagcatgtttaggcatagtagtttcgctgcatatagttgctagttgcattgcatttgattgcctgtttgctttttgtttgggggttgggttgggttttatttttagagatcccagatttattgagtaatactagattactcagacactactttttttttacaggcaacctttagtaggaagaccttagggggcgaaggatgttagactaaccggtgtagatttgctttgcctttgtaatatatagttttgcgtatagtatgtaagactcgatatttttataaagctctgattttattaaaaccccatatctcccaatgatatatttagtcttgtctagactatcacaactcgcgtccgcggtacgggttgcaaagccttaggccatgttcgtgagaaacgggactcgcggtcggacggctcgggcgaacggatttgttctgggaatatgggttggctgactacgggcgtgcacgtgacgctctcattctatcctaggcctaggacggggtaggagtgttacagttactagctgcaaagtatgcttcaagagaaattcctaaagtggacgtctcaaagatcgagctagctcagcctcaatctgaggcagtagagtccaaagagacgttacccccgaacaagaaataaaagagcgactcaactcccgtgactactaaagggctaaagaaaatggtcaaggtaattatgggatgattctatcaatgcaatcaagcaacacaagagaaaagtcgttactccgatggaaaaaagcctaaaacgagccgtgctaactggcccgaggaagaaaccagcaaccttgataagcctcatgatgatgccctcgtagttactcttgacattgcgaactgtgaagtctaaaggatactcattgacaccaggagttcggttgatctgatttttctcgaaacactcgtgagaatgggaatttccaagaaggatattaagggagctccaagcccacttgtatcttttaccagcaaaaccttgatgtcagttttcacaataacgcttcatgttaccgcacaagaggtcgttaagatgatcgagttctctgtctttgaccgaccggcggcttacaatgtaattctcggaacacttggttgtacaagatgaaggcagtcccataaacttaccatcagtgcgttaagttcccaacccctactggagtcaggcaaatcatgggaaatcagtgcacctcgagaatgtgctatttgactgggcacaagctcaaaatccaatagcaaccacaactcaaggtatctttgaatgtgatcaaaaaagtaggggataaccacgtagaaaaggtggtcataaacgtggagcacctggatcaacttgtcagcattggggctagtctaagtgagagcttccgaagcgaagtgattcaatttctcaaaaataataagggcacctttgcatggactatcgaagagatgactggaattagtacgaaggtcatttcacacgagctgaacgtagacccaacattcaaactggtcaagcaaaagcgtcgaaagcttggtttggatagcgtaaaaccggtgaacaccgaagtcgtctgacttctcaaagcaggctcgatccgtgaagtcaagtatccaaaatggcttgctaaccccgtagtggttaagaagaaaaatggcaagtggcgtgtatgtgtggattttaccgacctcaacaaagcttgtccaaaagattgttttccacttccccacatcgaccgtcttgtagagtccactacgggacatgaaatgttatcctttatggatgctttttcatgtaataatcaaatcttgatgaaatcggaagatcaagaaaaaacgtctttcatcacggagcgcggaacctactgttataaggtgatgccattcgggctgaaaaatgttgatgccacatatcatcgtctagtgaacacaatgttcaaggatctcctcggtaaaacaatggaggtttacatcatggacatgtttgtgaagtcagccgtctctacttcgcatctcgagcatcttcaggaatgtttaacttttttgaatgagttcggaatgaagctaaacactttgaagtgcaccttcgctgtcccttcgggagagtttctcaggtacattatcaccgagcatggaatcgaagcaaacccaatgcagataaatgtgttcatgtcgatgactttgcctcgcagtataagagaagttcagcgtctaacaggtcgagtttccgcactgaacaagttcatatccctatctattgacaagtgcctacctttctacacattactgcggaaatcgaaagcggggtttgtttgggttgaacactgtgaggaggcattaagcagctgaaaagctatctgtccaaaccaccaattcttgccaagcccgagtttggtgaacagctctttctatatatttctgtcttggaaagcgtagtgactggcgttctagtgcgagttgaacggagtgacaagcgtccaatcttttacgttagcaagtcattctccgacgcagaaaccagatatccaatgatggaaaagctagctctagttgttgtaacgtcagctctgaagctgaggccatattttcagtcgcacccgatcatcgtcttgacatcgttgccacttcggaccatcctccacagtccaactcagtccggaagatcagcaaactgggcaatcaagttaagtgaatttgacctagagtttcacgcgcgaacaagcttaaaatctcaacttctcgtagatttcctgatcgagctgcccttggctactcccgaacctgacattccggaccaacctaggattcttcatttggatggagcttcttctaaacaagggtccaatgtcatagtttgcttgaagtcttatactagagaaattcttgaacaatcattttggctcgctttcaaaggctaaaacaacgaagctaaatacgagtcacttttggtcggactttgcctcgccatcacggtaggagttcgtaatctgcaagctcattgtgattcactgcttgttgccaatcagtatttcggggactacaaagcgaaggatattcgcatggaagcatacccggattgagccctggaactgacaaagaaatttgaaaagttcgagctatctagagttcctcgtgtagagaattctgctgtcaatgcactagctgccttagcttcaacttccgacgtaaaaatgaccaggatgattcttgttgaaacaattagccaaccgagcgtacgtctgaaaacggtgagtttcgtcaccactcaggccatgcgcagacggctcgaagctcaaatggatgattctggaccttagcagtttgacaaaaatggggcgattcccgacataacgtagcttgaggcgaaccaagagagtccaaattgtctaattccaaatagccacgaagtccctgatgctggtcaaccacctcatgactggggggggggggcagactagagagagcctattcggaattacattctctctggagtaattcccgccgataaatgggaagctgaaaagttaaaagccactagtgcgcgtttatgtgtagcaaacgacgttttttacaaacgattaatttcggctccggatgttgtttgcatctttgtggagcatacccgtactatgatgaaagaaatccacgacggtacgtgcggaaatcactcaaagtaaaaaaaatatggttatttttggtaaacaatgattgcagactaggaagcatacgcacttaaatgtgagcaatccctgaggcatgcaccattcatcttgcagcccgctgaacttcttagtttggtgtccgcaccttatccgtttatgaagtggtccatggacatcatcggattacacctcgctatccgcagagaaaaggtcaggctaaagcgatgaacaaaataatcatttctaatctcaaaaagaagttgaacgagtacaagggcgcttagttaggagaattacaaaacgttctatgggcaatccgtacgattctgagaagagctaccggtgaaacacctttccttagtttacggaatggaggtagtcatcccgaccgaaatcaaagtcccaagtgcgagaggaatcagaaatccacagagtgaagctgcgaaccgcaaaatgatggttgatgtcattgatactattgatgagtgtcgcgatcaagccttagtccgcatgcaaaactaccacaacgttgcagcccgctattacaattgaacgtctaaaacagatcattcgaggtgggaactctagttctacgtcggtttcaacagaaaacgacagagaaaggagcaggcaagttagggatcagctgggaaagtccttacagaatcacacacgtagtttggaatggagtctaccgcctcgtgaaatgtttttacatttaaattcatctttgtcattgaactacgttagacttgatccccacctttgagtacgtaggcagcccgtacattgggtccagtctctaaattcttaaaatcaataaaaccgagttttgtcgtatactaagtctttcatttcttactctgtacagtttcaggtagattccattagaatctcacctccgcctcggaaatacacaaactaagctaatacttagtcgtcgcgatccttactgttttcccaaaatttataaaccgagtctaactcgtaaaggaaaagcattctttggtcattttttccaactcaaaagttaaaaccaagtccatctcgtaattcggaaaatagactagcaatcaaaactaaaataagactgtctcagtgaatttaaataagtttaagtaattaaaaagcctctgtggccaacaaaagcaaaaacaaaataaacttttcataaaacaaagcgggggttccaaaggaccagaacaaccccgaggtaattcttactccgctgtttgggagtctttctgaacatctattgggaacattaccgctatcccgggttgcaaagcagaattcttgttagaacctgttcattgttgaccaaaacctcgtcaggagtggttgtctccgcgactgtctagggaggggtgtcgtccaggagagaagtgagttcaaccaggtcaggttggggggtcttcggttcagcagccttctctgggtacttaacttcatcggctcgaactgattccaactccccctttttatctcttaaagtagttcctgattcactctggtctccgcaactgataccttcagtgcttcaacctcttctgactccttgaagaagctcccgtatttcgaagaaaagtcatggaactgagcccgaacttttctcctttcctccttcctcgcagcgttcaacatcgcggactgctcttcctcgagtttcttcagcttctcctcgcagactttgagattagctctagctcgcttctcattctcgatagcagcaaagtaggcatttttgcctaactcgagttttgcggataggtcgatattggtcacctcgaggctatgaaccctcgcttcggcagctttcatccggctcagaacttttttggccttatccaagaaaccggcattttcctcttctatccttttgaaaacgtcaatttcactctctttgttggagagctagtcttcgtggctacaaaaggtggagttgaactccaagattaactttaaaagtcataaggtttggttaaaacaccgacttgcgtgttaaactgaatatttccgaagatcaactgctagctttttggcaaaacgaagatagttcttccggttaacagccttcattttgtcaaagggagcaatggcaattccgggagggacgaaagtcctgattgtgtccgcgaaagatgctggaggagatgaaaacaagtcaaagcggtatgagtcgccaattcttgttttacattaaaaaatgaaatttgttatctagaggaggtgatgtgtcatggtgctccaagctacgaggacaagactcccgataggagaggatcacagatcttgagggtcccccttcttgttctctcctttctgtatgctcgcacttgtagtttttcctcaatgcgatgacgagatgtgcgaggagagggacgaacatcatcctgtagttgcttcatcttcttctcagtatcccgttttgcggattctttgctggaagaattcttgacacaagtccttgcctccgaggtgggagtcgcagattttttcccagttgaagaagaagcccttcctacaatttgacaaggttcgaccccatcatcgacgattggcttctttgacttttcggcatctcggagcttactctctttgaggattcccgacatcacgactttgtcggatttaatttgagctttcacctgattagccctctctctttccaatctcttctcttcgcgttatgaaatggaagacatgtcagctttggaaagaatttgtggttggaagggagaagttaaggcagcaagatcggtacgatattgaagccgtctacctgatgctctgatcatgtccgacgtgagagattcttaacctaagtcttgacgacaatgtgtgtgagactgggggtttgtcgactttaactgtaagagaacagaagtggttagctcgtagaatgcgagatgaatcgcaaaagggtacgacgaaatgaaaaatggcatcctaagttcattatctatcggcccgagctgtccattcagacccaaacaagtctgtcttcttgccgtacgtgagttcattcacagggaaaaagaagtaagacttcctccattgttcatccttttctgggaagtcatcaaacactcaaaaacccttccagggtgacaggagaaaggttccatttgtgtgacccttcttcactgtgtatagttgaagaaggtcgggcagcgacagcatgaagccgtcttcttcggctaaagtaaggaagcacataatggtacagatgacattcagacataactggggcagagcaattttgaaatcatgcataaaatcaataagaaagcagaaagtaaagtccgcattccaagaagaaaatctcgaaagcgcaagtatgaccaggaggcagtgattcggtgaaacggttggttcgggggataacaggttgatttggggagaagtttagtgggccccctttaaaaggttaagtttgcccggagtcgttagggaagtcatatatttcccaaactgaccgttaatcgagaatctttcgggtttaatctttctcggaggcataattaacactgcgaaatcgtgtcgcggatggtgaggaaggtctgggaagtttttggctcaagaacatgttgaagatcttcccaaaatctgaagaacactcaataaattatcaccggaatccggtggttagcagttcagagcgccggtaggctcgacgacagatgacggattacaggcggtgaaagagaaaccggtggttaaaacgatgaatttcttcaaaatcaaagttgaaaatctgagaaaccgataaggaatcatgtcctaaaacagcctgttcaaatcctaagcaattctaagcttaataaacatgctggatcttctaacgaactaaacgatttaactgaaacaagtttaagaggaagagagaagaatcgaggctttacttttagcggtgaatgagctccagcaagttataagcgatattaggaagctgataaggttcaaattacctagaactactctctcaaataagagatcaattgcagtatttaaggatcgaattcacggagttctttgttcaaacagtgagttgaatgtcgagattaagctagcaggtgatgattaaaatagtaagaaaacaaaataaaaagacagcaagttgattgtgatgtaaacgattaaataaagagctaggaacagggtattctcaggaaactattggttagtagatctaatgaaagctaggttgttatcaaaccattcttgaactcaaactctaattatggaataaccggtggcgttccgcaaaactccctatatctatagctaagaataatcggagaagccgagaaattatcaacctaaatatacattcttaacgagttcgattgttcaccttagtagataggccgattcttattacacacctataaaccaggctcatcaaataatagatccaactacaaatacctatggcgggcatatctattgtctggattcaagatctagttaattactctagatctagcattaagcataattaaagatgaagaattctacagataacctagcaagggggcaatctactaaaccatatgaatccctaatgagaaaccctcttcctaacaagcagattactcagacatattgattgaagtaaacaacatattgagtatgaaaacataaacacaacaaatagattaagggaaagaagggatctcttcactgtattaagatctgaatcaatctctgaaaagaatcgatgaatagcttatgtctctcagtaacagggtttgcaaaaagctttataagaacttgatagaaaactggatgatgaaaacataggtctaaacaatgtatataaaccctataaaacgtccaaggactaataatgcaaatacggaagtcttctggggcaaattcctcttctctaaacttgaaagcgtcttggactttgctgggccgaaactggtgtcgatcgacaccaagagtgtgtcgatcgacagtcctcgctgattcctgaatccaaaatcgtccttggcttcctttccttagcttttgctccagaatgtcttctcatctccattgttgtcccactgcatagaatacctgaaaagacactaaaacgactcgggaaataatataaagactcgaaatcctatacctaaaacatagataaaatcagtgaaaacagagatatatcagaagccaagagtttaacctcgatatataaagcgtcagaagagcgagaaaaaggaaaatcctaggatcacaaagcgtcacactctttccaagaataatctcgaaaatcgcgatattttgtttcctttccctacttcggaggatatacgcgcctgttgaggatcctgaaaattacggcattacttcaagatagtatgttgaaattgatctaagtccccgaattgaattcatttttgagacttggggggtaaattgtggatgtcggatcacgtctattcgacccgacccgcaatccgtcgatatgtcctagatcgggtgaataacaagttcgacccattcaggatgagatgggcttcaggagcccatttaatgaggcgagatctgcggcgtgatacgagcattcatttactttctgtagatttgtcttcattgtataaatagaacttagcctgtaattatagaggggcagaaaaaattatactgaaataattccgatttacttaaacactttttcgatttgatcttggctcgactgacaaggcttaagaacctcgttaatatccataaatttttaattgcggatttcaacatccacaatgggtatcacataagccttccaagggtaccatgacacattcgatcaagaagaagaagttaactatgttggagcccaaggatgctttaagaatcgcggctacaacaacaacttcaacaacaactttagaggtagtcctagtctttcttacagaaacccgaatgttgagaatcctcaggatcaaaactatccgtgttggtgtcggatcccaaaccgatcgtccggttccaaccaaagattgccacgtcaacaaaagggggtttgccaaggattcaacctagaggataccccaaatcgaacaaggagtttgactttgtgcaaggtgaagaaccttgtcgagataggaggcagttcagatagttgctatgggcctaatgtcgaagcccaagaagaagtcaaaggaattcaaattcgaacgttaaggcatttaaccaaagaatctaaacggatgcattgaagggaaattagtgtagataattgtgaataattatagtattgatgtatatatactgagtccaaaatggagtaatacacacacattcttgcaaacatactttaagctaatacaataccagtttcagttttatcattcaaaaggtgttctctattttattatattttcattcgatttttgtccttaagagatttccttctcatagataaataaatatttgagtgtgcaagtccgagatccacattttggcgatgtctattgggacggaggattcttgagtcatcagatatctttgacgacatacccaaggaaggcggcaatggccgaagaaagctttgtcaatgtgtccatggctaaaacactctagagcatccagaaaaccgtttcgggcatggcgcaaaagttttcagacgtggaaaaggttgtgagcactttgaaagcaactcaagtatctcttagccaaaatttcaatattatgcaatctcgggttcgatctttgaggaaaggaaaccctcaaggagtccggaggagcatgttcagttcaccatagtcccatacagggaataaaactggcggacagatgactccggatgcaactgatcccagaactcaaccaaatgtcgtggaagtacaacctgatggtgaagaacaactcgggagtctcgtgagcaagaaaactatgagcagtttgaacctatgaagaaggttagccgtaaactgaaagagataaaatcaaagttccatcaggccaccagttcggaactagacatcgatcgagtcatcgaagcaacaaggtggacgcatttcacccctcatattgcgagcataagaatcaagattcccggaagctcaaccgcgagccctataatgggctagaagatcctaaaagctatctcgtggctttcctgatagccgtcgggcgagtcgatttggacgaagctaaacaggatgcaggatactgcaagctttaatacgagaacctggctagacaagcctagatatggttcacccagctcgaaccaggctctatcatgaacttcaacgaattatccgttgtgttcctgaagcagtacaccatccttatgggtaaaagcacttcagacactaacctttggaatctacagcaagggccaaattagtcactccaaactttcatcacaaaattcaaagctgtactttcaaagctcatgagggtgtttccctatggcaagtctgatgaccaaggaatcgttatgataactgtcaagactgttcttctagctttcttcgagcatgataacatcgtttggtcggtcgaaaggtctcgaccagttgctacttgagtcgactcgtttctgataagctttgcttgcagctaaggtgtggaggcaatacgctgatccacccattatggtaaaaatcctctatcgggttccacttggttctgcgtcgattgcccttcgatcgctttggattctcttcggattctctgatagtaggattttactcaattaatcctaaaacactatcgtgtcgttgtagtattttaggttgtcaatccaatccggtgtgatgcaaacagatgagatatgattgaaagctctaagtcaagccaagtagagagttggttggttctaactatcctagtatgcaataacataaatgaaatgaaactaaaagaagaaatggcaataacaggcaggtgaataacaaagcagaaataataacaggcagtcaaatggataaacgattcctaaggatggggtaatcgaatagtgtgatctccttaatctattcaggcggttgacaaaacttcacagaagctatccctagacaacaagttcaacaacagattaattcactcccgtgatagaaatcttcaagcaaagctagacactgacctaattcccattagcgatctctaactaagcaggcaatatcgaatcaacttattaaagccaataccttctctacaagccaatcccttggggtagaggcgaatatctctggaattaatagatctgacattctatcgaacaccttttgagcgcgggaatgtctggattcatattccacattagccagtgaaacaagcaataagcgcaactaatctagaagggattctagtattctaaactcaaccacctaaaacgaccaagtaaaccacaactactctatctcatcatcagaaatacggttcactactgagacataatcaaagacaatagcaaagcaacgattgaaaacatgataactacttgaaagtgaatatcaaatatttgaaagtgaatagaaagtcgcaggagaaacactgcggcaagaaaagttgtatgaataacggatgccctggggaaaacccttaaaggaagtttatataagcaaaactatgaatcaaataaggaaactagatagatagcgaatcttcacgtcaggaccatgcgatcaagtatgtcattggcatctgatgggctgaaatgggcttccctgtgattgagtatgtcattgatcaaactgggattcagggactccgccttgcgatcgagtggatgtcatgaggttgtgatcgagtggttgctttagcttctcttctcttctttgttctcagtttgtctggttgaatgcagaacgagcagataggcctccttgtgatcgagtggtgtaagatgggtgattcctccggctttgcgattgagtaaaactgattgttagcttctccggggttgcgatagagtggtttgccttggcagggctccgaggctgcaatagagtactttggctgaaggcgtcattgtgaaaccaaagtacctgaaaaacaaccaaatatacaatgcacatgcaatcctaatgcgaaaccatcctaagtatgcaaaacacactaaaacgactcctaatgagatgaaatgtggatgaaacaatgacaaactggtgaagaatgaatgcctaaatcatgcaaattatagacatatcagtctccgtgtctctcggctcatgatctaccacagggtcagcctgcttgggccggacatgtcttgcttgtaggtccttgtgggtgatgtttcctagagcttcgcggctagaaatttagctgctaattttgctctaaggctttgacacttagaagtataatgcccaaaggtcttgtggagttaccaatacctttgcttgttgtttgacggttggtctcttttcggcctgtatctacttggtaatcgtgtgctccagagaagttacgtctctcatgatgtacgaatggtccgctctgaatgcccctcttctgggtcaggaagtttgtgtgtactttctcggctcgtgcttccttgctagcagctccatgtcctttttgtgggcgacgtaatacaaagcgcgaagcagggcgtctcggattgtcaaaggcttagacaaatttaactcttttcagaattcagatttgtacgaaatggccttccttagggccgagagggcagcgacgtcgcttattcattcgactttagccagggttgacttaaacgttgcgacaaagtcccttagtggctcattaggttgttgagataatgaccaaagatatgcgtcggatgtccatgggtcgattagcatggagtactgcatgagaaagagcgtcaacggctcttggaaactctcaaccaaattccgatccaaactagagaacaaatcttgtgcagttcctttgaggtgtccacgaacaacaaacacaagctggcgtctctctctcctagtttgaatctgcctcatctaacagctatcatgaaagacttttatatgtccctttgggtcgtatgacccgttcaaatactcgatcttgagctttcacaggtcagagatcgtggcctaagtgatcatgcgtgtgaatggcgtattgtacgattcttccgggatgcggtcaatatggaggccgaggaggccatgctatgcatctgcgaattcacgagcttcatgtcagcctcaacattggctagcgaggcttttatcacgtcgatctcatactccctttcgtactcctcggtccatttgatgttttcctcagcttcttcatcgttagtgacttcaatctgtttgattgcattagcctctgcttggggatgcagttcttgatggttgccaagctcgtccgtttagtttgatgcgtctaaatctaacggctcagcatgattgttacagtaggggatgtcgagcggtttcttaacttggctcggcatcccctactgtaattcgtatgatcccgaggtaatccataaccattggcgtttggctcggtctcattaagtgggtgaaatctgaccctaacaattatgcttagtcaatttccattctttttacacctaaccctttatttcgataagagggttttgcaaaacccaacactgaaacccttctccgtaatttctcaactccaacacttaacccacttttttcttatctcatatgagctctattatacaaaccagaacatgacagcttaaaaaacagagcacaaacgctcatcaacaaaacacatatgccttaactctgaaaaaaaaaaaactaaatcatcctcctcgtttttcctcttcaattcgtgaatgtaaccaccacggttttataaccaaattctactaatatgtaaagtccaatagttccacgatcttggcaatacaaagtgatgagaaatagaaacccaatctcaaatgcttataactactactttcattaaaataaaactacttaattccacgatctgacaacgttctaccgactggtttcgagaatcaactaccacactccaaaatatcacatatgcaaatcaggttgaaatccaccagtttcgtcttagaaaagccataagaagacatcttctagcctttatcatcttaacccgatttcttaacaaaaacgtttgtctaagacctatatgaagtactcttcatagtaattgacaaatatattactcccacataaaagtggaaccaatcgactatgagacataggaaatcaatcaatggtaaatgaaaatcgaattgaaatcctagttgaatctaaaacgaatactattagaaccagaaaagccgattcaacaaagatgaaaaagatccaactcaaatcagaaattatatgtttaacaaaaaaaacttgcgttttcattaaccagatatcacattctctctagaaaatataattgagataagagagatctaatgcaaactattttttataattacgtttcaaaaattgtactatactacaaactcaccctaacttttaggcctgggagttcggattaaaccgatcaaaccggcacgatcaacccgaaattttcggttctcggcttagaccgaagagattaaaccaaaccgaacggcaaattaatttgggcaatcagatgtcggtttgggtcggtttggtaatcagttatcgatcgattacttcgggtttaaaggaacattgtataaaaacataaaaccctagatctaattcatttcatctcttctcctccttttcgcctctcctttacgatccttctttttccactctcctcctctccttacgatcttccttgttctttcttcttctccttccttctcttctaaactcttctacatcttaatcttcttcgttttcgtctcagccttccatgacatttaccgacgtgaggttcgtgttgggatttgattattggtgttacttgattttttcgtagtgattgttttttcaagttctagatcttagaaatcgtttttattttattgatttaattgttttctttcttctttcagtgagaatgctaaaaacacattcatcaacctcattcaatgcaatctcgcttcaaggaataaatgtctggaatgccactatgtgcgaaaaagtaaccaggaatgccactcttctaattcttattttttgccgaattaaaaataaatgagagaaaatccaaataattggcaaaagaccaaaaacccagacgacccaacaaagtatccgatccaattaagatccatgcccagcgacccaaaactcatcccaaacacttaagcgaaatccctaatttctaaaatcaaaccgtttctgctctcagaaaattcaaattttccaaaatcaaattcataatttctcgcctttcacgattttccgacgaattcttgattcgtgtaatagtttgatggctcgtgttagagacggtattgctggccctttatatgattcgacggagaagtcgtcgtccggtgaagtttcgacatccgaaccagttacttcaaaaattgagaacgacggagatgtcgccgacttggttccgaccgaacctgcaggtccgacagaaccagaaacacgagatgttgcggcgaatgatactacaaaagaaaccgctgaaattgaaaaggctatggaggaaccgcgtgatggtgatgagggttctgaaattgaaaaggctatggaggaaccgcttgttggtgatgaggcttctccaaaagaaactgctgaaattgaaaaggctatggaggaaccgcatgatggtgatgagggttctgaaattaaaaaggctatggaggaaccgcgtgttggtgatgaggcttctcctaaaggaaccgccgaaattgaagagaatcagacagggacaactttgaaacctctaattgacgctgtcattcaacaattcgaagaagcgaaagacgggaatggggaggagttggaggaggaggaaatggtgaatacaatttcaaaagaaggggtagagaatgttaatcgtcaggtatatacaattgaatctctatgacacacatttgttttgtttgagtattagttctcgtattagttagaaatgttcaactagttcatctatgacacatgtttgatttaagtaatttgatggaactagttcaattggtacatatgaattattagtttggtacatatgaattcttcaattggttaatgtttattgaatttgcaggatacttgtgaggccgaggatgatgaggtttctgttaaagagacagaggaagatgaggctggcaatgatggtttggaggatgatgatttagattctcagccactgccgccacagaccatgcattttcctttttcagaatacggcaaagtgtgcaagataagcagtaggtgccaggtcacgcagacagttgaactgatagagaggaagtttaaagaagaagttgtatggttcaaaagacacgatcagttcaagcatatattccacatccctcaggagcctaaccaccagacgcaaggcatgtgggtgcttatgctgcgcacagtgaagacagatttgctcgaggaggcttggtttgtggtaaatggagtacctattaggtattccattaaagagcatgcgttgttaagtgggtttgattgccacaattacccaaaagaactaaatccaatggggaatattaactttgtgaagaggatatttaaaaaagaatctgggataaaggttgtagatgttcttgctaagtgctcgaagatgaagcatggttcagataggttgaagttagtgctgttgtaattcttgggcaaggtagtaaaagctggtgcaaagaatgatggaaacattgaagagtttctgttaaggattattggcaatttgaatgcgtgcgagacgtttccgtggggccgttacacctttttggaatgtatggcaggaataaggaaaatgatgaagaacatgaatggtttcgtgaaaccaaaagctcaaccttgctttagtggattcattgtgcctcttgagataagtaatttatgatcattatatgagaataaggtgtaatgtacatgttttatgatattaacattgttttgttatttgtagattctggcttatgaggctattccacagcttggactgaaatttaagagtcccttgcgctccgctttgaatgactgtccaaggatgtgcaagcataagtttaaagaatgtagcacgaaaggtgtcccgttggaagttatatataaagagcttgggaatagtaaggttagagtttctgtatttacttcattgtgtgtctagtctctcatgagattgattgattgctaaatgaatttcttttaacaggattttccacgcattttggtacctgcctatcatgagaaatatttgttgaaaaatctcttaaacaatgatgttgatgatgactgcggtccaatagatattgttattgacagttggagagagcgagtattagtagagaagaagaggatatggtggaaaggaatgtgtgagatggacatttcttctagatgtattgtaaatgatatttcggatgaggaagtccatgagattgagaatgaggtccccgagaaagatgtccccctgactgctgtccctccttgattccctgatttagatacagttgtggcatctataacctcactgacgcagatgatgaccaaaggcttttatgaaacaaaagataagattgatgtcattgatgtgagagtgcagtctattgagttatttgtggcagatctgaaggaaagggaacatgggaagcaaacagaggaggcaagtcaacatgggcattcaacagacgatgacgtgttatttgcttcgcccgatggttttgtgaccaccggcaggatgcaacaacgggatgtagtgatctacagagaacattctccagaggttgcagaaaatagtaagtataataattaatgtcaattgggtataaaaatgtgaatatatgacttaggttttgttttaaaatgtgtgcaggtaataaagagacaaacacgacggagaaagagctgaaaggaaaagcgaagaagaatggcgggggcaagaagaagcaggaggtgccacctgtaatagaaaccggaaagaagtgaacaagggtagcatcccgccttattaaatcaccgtttgtgacggataataagaagcgtaagagaatgcggaaggcagattgatccagttaatggtagttgtggaacaattggtttacttaaaaacgtttggcttgatttgcattgtaatgatgtctacttttgtgaatttttaaacatttggcttgtaattggtcttttaggttcaactgtttattttggttcctctactatggttcaactgtttattttggttcatctactatggttcaactggaatgttactaagtcacaacggatagttcagatagttcaacactaggattatccggttcgacttattagttcaaatggttcactttggttcaaccgattagttcatccggttcaactgctagttcaaatagttcatccggttcgactgattagttcaaatagttcagatagttcaacactaggattatccggttcgacttattagttccaatggttcaatttggttcgactgattagatcaaatggttcaaatgtgttcgactagttagttcaaacggttcgacctgtatagttcatccggttcgactaattagttcaaatagttcatccggttcgactaaagtccaaatggctcgactaagaagtccaaatggttcgaccaataaagtacatccgttcgactgattatataattgttagcaaaatttactttcaaaacacagatagttatattcaaacatttagattcatacattgtattcaaaacatagatagttagcaaaataaagattttaaacaacaatttagatttagatttatcttacaaacttaaacaaaacaaaggcataatgtttattgaaagagagagtcaggaggatactcgcgtggaggctcatccactctccagtagtaacttccatcatctggttcatcgtcctcctcaatgggatttggctccgcgaaaaacgaccaattcggtgacgatccatcgtgctcaacacaccatctccttagtggcagtggaatgtcagcaactttgtcgaaaccgtatctcacccagtctttcggatgagcctccaaccgcctcatacctctctccaggtcttgcaacttaatgagtagttggcggtgacgccttcgataagcctggtgttgattatccacctgtccaacaatagaaatgtcaatttctcgctaaatatccatcaatacaactataccaccactatatgattcacctaatataaccaacaatcaacacaactaaaccctaaacctgaaatttgattaaaccctaaacctaaccaaacgagcaacaacgaaacactattcttacatttaccttttgaatgaacatttgacatgcgtcatgcatctcattggatagattcgtttgaccaaaaaactttccgggccaaataacttcacctgggacaaaatctcttggggctggaacaaaatccggccccatatctcctggtaaaggagacttcatccacggtaccgtcggctccactgctccagggggattacacggtgaagcggaacccccaaatgtcggcaaattatctcgatgtcaactaactactcaggtggtggtggagaagaacaatccagtgatgttggagtcggagacgcaggagaggaaggcgccgacgttcttactctctgaatgctccggcgatgagccatgtagttcaccggtgaacagtttcaatttcttgaattctctggtttcgtgtaaaattaaaagcaaacgagtaaattgaatagacatgactcttcggctgtctcatctgaactttgacgccgaacgattaagaaaatgggttgggcttaggcctttcgtttactaggggttgtagcatccctaaaataagtatccgttttgggtcttttgccatctttaatgggcttataaattacaaaaaacaaaatccaataaatttcaaaatatagagtctgctttatgcaaaattcataattcaaaattcgaaaaggcaaaaacgatttcaatccctaaatcgaaaaattcgaattccaattccgaattgcaaaattgatttagggttttgtgagtgccttctctaactactccgatgagttcaagttcagtgtcagtgtcatctggtgttgatggagcccgtggttttccggtgaattgtgcgtgtggagcagatgtgacgatcttcacatccaagagtcaagacaatcccggaagacctttttccggtgtaaaaccaaaagagatccgaaaatgtggacaaacaaaagagatgtaagtagagttggtggttataatgtgtatttatgtagttgctaaacttgtcggatttggttcgtgggttgtgcaatagggtcatttgtttaagtgggttgaggatgctgtgcaagaagaggtcgaagatgctttagaaaaatttggagtcattgcaaatgagcttaacaaaatcaaatctgaggcgaaagagctacatgtgatgttacaagaactgaaagaagaagcagaattgggcaaaaaagaattccgcaagtggaaagtttgcttaacaatgtgttttgtgtggctttgcttgatcaccattgccattgtttacgtaatgtttggtaataaaaagaaacaggactttgtaatgtcggatttgtgaccttattattccctgattttataatacttttgatttgtgactttgtaatgttatttcattggttcgactgaactagagatagttcatctggttcgaaacagtttagttcaaatggttcatctttcgtcacattaccctgttcaactgtatattttggttgcacatcgtaataaatcataaatacttgcatatttaaaacaaagtggttcacaaggttcatacataaatacacttgcataattaaaacaaagtggttcacatggttcaaaagtaaatacttgcataatgaaaacaacgtggttcacatggttcatacatggttcaacgagaaccacgccctcctctagctcggaggatactaatagcactcctcattgatcgtagttccttgaataattgggtctcaagctcagtgatccggtcaatcataatgcgtatcttctcgtggatggctcgaacatcggaacttgccaagcaggaggtccttcttctcgcttgtccttccggctacagtacttcgaaaactcctcttcaatggcttcctcccaccacttatgcaagtgttctccatccacctcggtcagatttagtggacttcggaatcttgttttcccgtggagattgccaccaaccacattacccttttcaacgtcttttccacagtagcacttagtcagaatgccccaattcctgtcccgtattgcattgtagtagtcgaaaccgtcagatttctcactaggagaggagtcggagcttccgttaaaagagataggcatgtctgtcaaatacaaaatataaaactatctaatacttgactaaaccctagatcttgactaaaataaaccctagatcttgactattataaaccctagatcttgactaaaataaaccacataaaccctatatctttaatagaaaagatctaaccttgtgaagaaatgacgtcgtttgccggaaaaatctcgtcgcccgaaaatacttgacgccgctaaagaatcgccgccgtcttcttcagcagagggttttctcgaattttcgatttttcacacaagtaaatgattaaatatagatgaaaatcctcaaaaccctaccattaaaaaaaaatattttaaacatagggacccaccaaaatctaacttgagttgataaatccagacatttattccttgagttgatatacagtatgccagctggaattatgcggtatgccagctggaattatcaagttcatccgctaaaattttacacataattgtacagctgaactatcatacacatagatgtacttttcactgttttcatatattgcagctgaactttaatgtacatacttgataactatgtcgaacccaacctaactgtgatttattttgcatattcaaagttttggcataatcatatttgatatacgaccatattcacgtaatttacttcatttgaggtgatctcatagtaactactccttatcatataagaggttgtatatgtgaacacataccacgatttcaatttttataaaataatatttatcaatgacactttaatagtaatagtagattttttgttgagctagtagtaaacttcaaacgtttctacatattataaaatcgttaaacacattttactaagtgattatagttgaacgagctgaacctgttgtactaggcttacagatttcgggaattacaaaggaaacatagaaagacttgttattagttaaaataataaagtcagattacaaattccttcgtttatacgaataatacaaagtacccaaaaactaaaatactacattataaatttcatcaacttccgaaatttccagattaccaaacaccttcgacacgaggccatgactcacaagcttcggtttagaatgaccgctcacacgccagcaaacgagtacaaccacaattccccgagtacaaagactccgaaagtgagcttgaaagtccaaagcttgttgattgtgtgcttcacaatagagaacttcattgctgcaattcatagaaattatttacttgatcagaaattgtgaacatgactatctgaaccaggtctgctgaaccatttgaactatagcacttgaaccatcagaatagaccaagtgaaccatgtgaactatagcaatttgaaccatttgaactagagtaggtgcaccatgtgaactatagcaattttaaccatttgaactagattaggtgaacatgtgaactaaagcatttgaaccatttgaactagaataggtgcaccatgtgaactaaaataggtgaaccgttaaaactatatcatttgaaccatttgaactaatcccaaaatagaaaccaagtttcattataataagttaagatggaggcacttactgttgattcattatcttgaaagaaaacttcacaccctcgatgccttcggtcaatcggctctgccaaataatcgcacctaccgcatcttgtgtataataatagaagtaagtattcgtacaatttctcaaagaaaatactataaaattgtcaaaataactcaccgaccaacacattcttgtaaaccgtcttctctatgatattgtcgaaaggagtaaaattccaaaacaagagtgcatccgttcgcaaagctttagtaacaatagtttgttcaataaaccatatctggtagtcatgggatgttgctctcacagactcagcgtcgtttcggaccgagaaattagtggtaattatccactcatactcatattctcgtattcgatcaaggtaaaatgacgcaaggcgacgaggaatggtagccttgattcgggaacggggaccctacaccaaataattttaactatatacctgcaagttatgtgaaagaaacaaaattaaacatattcgcaatatattaccgtttgatctgccaatatgacgcccagttcgaactcatccggtgccacaaacttcttgaacacattcacaacaaaaacgcaaatagtcccatccactgatagtcagacaaagttcggaaacagaatgatatccatccatgttgacaaacaacggcttcctttattagtggggtgggctctttttgttggataggatgaaatatgaatggtgtaaaatcgattgtaatcctgtcttaaataatattccaaccgacgcgacgattggtactcgcagtgccacctgtcactgctaatatttcaactgacgcgttgactaggatgccacccgtgtttatagtagacgcagatgaacctgttgtactaggtttgccaaacaacgactggttcgtagttgaacctgttgaactatgtttggcaattctgttgaattaaaaaacttaactatgcttaaaaattccgaaaacacaaatttaaacacaaaggattgttcttaattgaacctgtcgaacaatatttgacaattccgagaaacacaaatttacacacaaagactttatcgtagttgaactccttgtactagttgacgagttaacgtcaatcatcattggtttcaggctgcaaccacctctccaagttgatgccacgcgtagctttgttatttgtcttctttcggcgcttctcacctgtggatggaaaccgggtttcttgattccttcctttttttggagtgtaatccggcggttttgcgaccttctccacataatcaggaggaaagaaccagtgagcctgatgcggcaccacataaattgttctgtaatatgccaatgcccacgtctcgatcaagtaatacttcgagcaaagaccatagatacttacattcaagattgaacggctattctaatccatctagatcgctttatggttgcagctatagcatggacgcacgggtacttgtctatatcaaattctctgcaagaacaagtattcctttccaagtccaccaaataagaacaacatcaattccaattacgttgtattcttgtcggaaactgtttagttcagttgcatttagctttgcaccaattggacagcgcgtatgtaatatattctccacaacatgcaccacttgccttgtgttcgatgtagacgcggaatctttgcgatgtgtgttgaaccactcagaaaacttcttcaaaatcgcatcgatcatcggtaacagatggtacttccttacttctgaaaacacaacgttcattgactctgcggagttgctagtatctatgttgtacttgtctccctaaaaatagcacctagcccatttctcaatcccaattgcccgatccagataggtggttacattaggatgctttctcctaaattctgcatacctagtgttgaacttagtcgcagtataaatatgagctaattccctaaatttggccatacctgcttctttgtcacctgccagcattttcttaatgttttgagacaaatgccatacacaatgtccatgtgatgccttcgggaacacatccgcgactcccttgatgatgcttccatgtctgtcgcttatgaaaaccaatttcgggtcatccggtataatggaaatcaattttctgaaaaaccagttccaactagcatgattctcgctatcaattacaccaaacgcaatggggtaatgaagatgattaggatcctgagatgttgcaataactaacatccctccatatatggttttcagaaaagttgcatcgatcactataactttcctcattgccttaaacccttcaatgcttgctcccaaaacgatgaataggaacttaaacctgtcatctgcatccaattccacttccgttattgtcccatgattcacagaccttaaaatgtgcagataagcaaacaataacttgtagctagtttcagggctcccacgcacatcactaacatgttttttttttcctcttaaagctgtggagtatgaacaatccaaaccatgtcttcctttaacaatactcattttttgttaaggtttcagagtattaagaggacccggatagtcctcatgcaacacatctgctactaatcgcggtgtggctttttgtttttcatatctagttgcttccggacatcaagagcatttatgtatttgtgtgtgtttcttcacaaaccaaaaatctgtgctcgaagttttggtaactcttaaataccaatcacaacccaatgatgtttgactgcattctaacataagacggcccgggtcagatttaatagttttcacaccaaacacttcctctttcgaagctctattaatcaaatcccatactgcctctttagaacgaaattcttgacctactaaatcaccaataccatcttcccattctttgacaacggcagccacactttcttgtaccggacctgcaagacgaacatatttgatatgtctataatatgcatgttttcaatgtccattcatcatcgttttgagtccagtttcgtatcattcatcactgttttatatcatttctcatcattcttgcatactttgcatgattatgatggctttgcatacatattgcatttctgagttgttttcaggtgatttggagctgtttgcgagcaaattggaagaaacgaggcagaaccagaagacatactcgaccaccaggtcgtgtgcatccagcaccatactcgaccccctggtcgagtgactttggagccattcttcccatcttctcgaccccttggtcgagtaacctcagctcaggccactcgatgatgccactcgaccccctggtcgagtatcacttcgccacaccacctgaccacactcggccattcactctaccaaattactcgaccccctggtcgagtatcatcactcaccaccatcaccatcactcgaccggacactcgatcacgtcttcacagtctactcaaatccgcactcaaccagacaagctaagcacaaggaagagaagaggagaagacaaagtgtttggaagcggcctggacctccatcgaatcacgaagcccatctcggcccattatcactctgtgggccgggcgattaggttattggcccgtctactatcattttatttcgttttgtataaatagatgtcttagggttctgtcctgagacatctagtcgacattgagtttttgcttcagttttattttttgttttactctgctgcgccgcttttgcttctgcaacctgtaattcgagatttttccaagttattcagattccgcatttgatttcatttgtcatcctgtttctctactctttatctctttacttatgcaatattatcatttatctacgtttatgtctttgagcatgttgtctgagtagtgacttagaattcttagggatgggatagagtagttgtggaattcgtagtctgtagagtggttaagttttagaattgattgaatccctttaggactacttgcgtttactgcttatttctttctgatcaactggaattcgatcccaagcattccagcacccagaaggtgttcgatgaaatgcttgatccactagttcctgagatatgcgtctctatcccaagggattggccgtttagagcgtttattgactttatcagtctgtttttattgcctgcatagttagattccgttaatgggaattagtctgggctagctttgcttgaggatttctatcacgggagtgaattgatctgttgttgaacctgttgtctagggataacttgattgcgcttgttaaccattcggataggctaggataccactatactcgattaccccatccttaggaatttctcgtctatattatttctctgttttatcgttatcgcttaatcattctcattgcttgtttcttagtttttgcaattactcaaccaacttactcgaccacacccagtgtctggcaacagactgtgcagtcgagtacagttatcttgtttcctgtctgttactcgaccagtatactcgaccacacccagtgtctggcaacagactgtgcagtcgagtatatctgtttcatatcatgtctgttactcgaccagttactcgaccacatcctacttctggcatcagcctgttgtagtcgagtgattttagtaattctgttattgtttctgttttctgcatgttcgcttaggactgttagaaaccccaaaactgttattgcttggcttgacttagtgacttctgatcacatctcatttgtttgtatcacactcatttggattgacacctaaaatactacaacgacaggatagtgttttagaattaattgactaaaaacctattatcaatattcttccctaacataatcattatcagaatcttcattaaccccacactctatcatcagcggttcaataacagtttcagaaactccattctctagcatcataggttcactaactgtctcacgctgttcctctagttcaataataggttcactaactgtctcacgctgttcctctagttcaataataagttcattagtactcagaattcctgtatttacatccgcaaccattacaacattggcagccaattccccataatttacaccgcatgaacttcttcgctctactattggaacttgcctattattactttccaaatcactgcataactctacatgcaaaacaggtctaaatccctctttatccaatgacgttaaatatatcaacacatcctcattatctacaatataagactctctccatgctttacatatcttgtaactcaatttcagattccttttctctccacctagagcaatctttctacagatcttatctattaaatccgcatatgttattctctccaaagatgatgtcttaaacactataccgtatattgaatttttgcaacttcactcatggtctgctgtatagtaccctccatagtcaaagtgtaggttcatctggatcctcttcttcatcgcctcctacaaatataaacactatattagtaccagttgaaccacgagatgtaccagtgtctgattcaatttcagttcgtccatccattgtattatgcaaatatggtttgattctgcttacacattgattcaattcaattacattgtactaactataatacttacaggagatggaagaactaaagaaggatcgtttccagagtagccgcagcaaagatcaataaagaattcgatccaatagtatcgactcacgtagcacgcagcaccggagaaatcgacggccggagaattggattagctgacctagcaaagtttccccagactcgacggagccaatgtcaaaaatcaccgatgttggaagttaatcggaaatcgcctatctcgtcggaattaaatgaattgggtcggaattaattgggttgggtcgggataatttcgatttcgatttggattttgtttttgatttttcttttaaaattaattgatataattcattaagggtaaataggtattatccactacaagagtggcatgcagatcaaaagatggcacgccggattcaaatttccagtttagtggcattgttgattaggactccttcaagttggaataggacggtcggagatcgccgtggtttttaccgtcgctgtcacaatcacagccagagccgcagtcactttgctcattcctttgcaaaaccctaaaaaaattattgggttgggcttttgattgtatgttgggttttttaattgtattgggcttttatattatttgtaatggtttattttagtagggtgaattacaaaaatgacggtttttgaaaaagttattaaatatatagcaccataatgtgtgtaattcatttgatagcacatgtcagttgtgaaaatacacccaactccttcccaacgatgcgcttggagagaaagagaagccacaggaggaaagagaaatatatatgagtaatatatattcacccctcttgattttgtttactttattagtttaacaatattacttggttaaagttaaagatactattgaaaaaacagattttttttttgtttatctaatatgatttgaattttaaaaatcggaaacgaatttcttaaaaaatgaatagtggtatcaaattctatacagatcatcatagaaagatagaatattatatatttgttcaaatagaaacgtttgttccgatgaatccaaataatcaattaaatactttttgatggaaggatactaaaccctaagataatatatagggaacccaagacttttaatataaaacactaatcaaatcacttaatatccttaatcaaaacaaacaattcattttaaaacatatatagtacaaggtatacgtaaatagtatacccaaaaagtacaacgacgccaataaattagagagacccaaaaaaagaaatcaaatgaaggaaacagaaaacagagattgatcaaattcagcgcttattagcgagaatctcgactaattcaatttcaaaaaataaaaccaaagtctcttaaaaaaaaccaaagactccaacaaaatctgaagtcttgcctgtgtaaatcaaaacctctaattcaatttcgagcaaaaccgaaatgtcatttccgaaaattaactgtcttgcttctgtgcccaatacacctctgttaatcgttggcaaaatcaaaagcttcataaacggtggactgaaatttattagagccaaacccatgttcaaaagttaatagttagtgaaagagaataattggttttctatggaagggagaagatgaagagcgtgtatttcaaacagggatagtattggcattattacagaaaatacaaacaatattggttacttttttttagagtgttagttacctaattataatatttttgtaggttataaatgtaaatttcccattttagtattttactagatttgtgtttgtaatagagtaattgtaatatgtaaaccaaaatgaaaaaatctataaaccaagaaaaatacaaaatccagttcatgttcagaacataaattttagctaataaccgatccgaattaaccgactaccgaactgatccgaaccgaattttaattcgagtctattcagtgaaattttcaaaaccctgaattttccttaaaccgaataacccgatccgaccaacccgatttagtcgaactcccgggcctactaacttttgtagcgtttaacggaacaaccggaccggttttagtaatttccctaattcaaattcactcttccctcagtttgaaatctctaaactggtaattccaatacagtcttttcttaaaatcgcactagcttaaaccagtagatcctaaaccgattcatttaaacaacaaaaaaccacttacagagttcgttcgccggcggcggcgagtcatcgtcatcaatgtcaaacatcgttgttctagacaacggcggtggtctaatcaaagccggacaaggcggcgagcgtgatcccaccaccgtaatcccgaactgtctctacaaacctctctcttccaaaaaattcatccacccatcaccactcaccactctctccgacgaaatcgacctcacctccgccgccgtacgccgcccaatcgaccgtggctacctcataaactccgacctacaacgcgaaatctggtcacacctattcacttccctcctccacatagctccttcctcctcctctctcctcctcaccgaagcaccactctcaatcccttccgttcaacgaaccaccgacgaactcgtcttcgaagatttcggattctcttctctctatatagctcatcctcaatctcttgttcatctctatgaagctagtcgtcagcctgattcaatcctctcaaagactcagtgtagtctcgttgttgattgtggtttctccttcactcacgctgttcctgttcttcacaatttcactcttaatcacgccattaagaggattgatttaggaggaaaagcttttactaattacttgaaggaattggtttcttatagatctattaatgttatggatgaaacttttttagttgatgatgctaaagagaagctttgttttgtttcacttgatcttcttcgtgatctccgccttgctagaaatgggaacactcttatcaagtctacttatgttcttcctgatggtgttacacataccaaaggctatgttaaagaccctcaagctgctaagaggtttcttagtttgtcagagaaagagtctgtggtggtgatggataaggttggggagagaaagaaggctgacatgaacaaaaatgtaaactttttttcgattcttttgtctctgtggtggtggtagggatttctctcaagtttgaggttttttttttgtctttgcaggagattgatttaacgaatgagcgttttcttgtacctgagacgttattccagcctgcagatttaggtttgtgttgatgaatgttagaatgtagttgtagatagaagatgatgatgagatggtattttattttgttttgggatagggatgaatcaggcgggacttgcagagtgcattgtccgagctataaactcatgccattcttacttgcaaccagttttgtatcaaaggtggttttcaaatggattacttatttttaatcttctgctgttattgaatgagctttgatgtctaatgtttgatgttttaccgcagcattatcttaactggtggaagtacattatttccacaacttaaggagagactgtaaggctaaatttatgtgatgaatcattcattagtactgctttattattagagaagttgatggtctgagacattattgcagagaaggagagcttcgaccacttgtcccagatcactttgatgtgaagataacaactcaggaggagtaaacaacctcaatcctttttttttttttttttttactctttatatttgcagctctttctttgttattttaactccttttgtatttgcagccccatactaggtgtatggagaggtggttcacttttggcttccagcccggatttcgagtccatgtgtgtcaccaaggctgagtacgaagaacttggatcagctcggtgtcgtagacgattctttcattgaggctaaccaaaacaatatcacatgagttggttgtaagttgaaattcttcacattatttgtcgtatattgtaatgcatgtattgtttttcttcttcctctaatttgataaacttcaaaccgtttaagtaataaccaaacaacaagagaaaattatcttgtcttcttaaatcaagtttacacagaagaagggtttagggtacaacatgcagaaacattatctatatcacaaatacagtaatatttaaatgcaaaaacttgtttttgttgttgttcttcaaagatgatttcatgtgcgtaattttgcatagccaacgaaagagtttggtagtatagtttcctcatcagtcggtgtagggttgagagtccatgcacaaatgcactagctttctctggtactgttgaaagtattcacaaaccgctgtcacttcttccttccctgattcaagaccaggcagatcgggcagcggtactgtgccatcaccagaagcagattcagactcctcgtcttgggttgatagctcggttatgatttctgaatgaatctcctgacacgcgaggacaaacatggctactgtatcaggctgttgcacctctctgagagctgcaagcgcctcttgcagggaaccagcagccacatataaaataagggccctgcattaataaaatgaaattcttttctcatcatcggaactgtttgaggaatttatgtcacatttaaattttctaagttaaactgtattgaatgtgagcatgatgataaagtaccgccagacgttgtgctccgcatggagaacatgatcagcccacctttgcaataccctgagtagatagagagataggagtagttacaacgactagtaaccaataataggaaataataattagatctagaagtaaaccgtagaagaaaagacctggcataatccgatccttctaaatgtgttgcggccaaggtagcagcatcggtccatcgtccagaatcttggagctgcatattaaaaagtataaaatattctgtgtctaaaacgttgcctattattaaaccaagctaagaatattctcgaataactaatgaaatgacaatttcagtggaagcatagttccgaagaatatgcaatatgtagtatgaccaaggaaacaaagaaagctaacctgtgaacaagcttcttggtgcctaccaacggcacataaaagatgagtaccagtgagtgaattgtcggtccttaccatgttggctgcaacaacctacgtgtggaacaaatgtgatggaatgatttttttacaaggacacgaaagattatccaatatagcaaagacagatacctttagtgcaaggtcgagaagagatttagacacagcagaagcgagtgcaacagctcggagagcatttggatagaagtatggagaatctggagctgaagaaagcagcaaactaacagcagcttccaaatttccaactgatatcagcctggtcaaagaggttaccgatacaagatcaacacaactactttttctctcagcttaagatgcttctaaaatatatagtttccattttacacaggagctactactaaaacaaaaccgtaatttcaagtaataaattgaaaggacaataaacagtaaagacaagctaatggtgaaatactaactcgtgtacttgtttctgaatgcaatcttctccgtctaatttttcatgccaaggaagacgttcattggcacgcgtccgtaattcttctcgctcaaaagccatcaatctaagtgaaccatcacactgttcgagaaaatgtagaatataagctcaccaacaaacactaagcaaatggaaatttctaatccaaaccgacttcaaataagaaagctccattaagctagcagaaaattacaaagtgaaggagctccagttccaaaataaataaatctcgtctctgcatcctggtagaagggaatggctagaatgcatgatcttttgaaaggaaaaaaaaaattattttgaaactgaccatagagtctatcttcctggcttcaggtgacgataatccagtagatggtattttactcggcatagctacttcatcagctcctgagtctaaagtaggggaagagattttctgcggagaccttctcgttagcttgttcatcagatggcgaatggcttgaggaagttgcaaccagaaaagtgcttctgaggtttcaccaaaaacagaagctgcaaaagcaaatcttgcagcataacctttcttgaccacatcagcgtaaagttttgctctttcatcgtccagcaagcaacctaggatacaagaaattagagaaggtaagaaaatagaatacttaaacaggtatcttaacagagagaggctagtctgtggtgacaaatgagatcaaccttctttccgataaggttctagtatcttcaacagcatttcgggcactacagggtcccctaaaggcggtaactgaatcatgtaactccgtagatccttagaggatgaagccatcccacggattaaatgaggcctcttctccaaagttgtgctagacgtattaaaccaagatggtttcactcctaactgtaaaatcatccgcagtgcctgcatgtataataataatcagacacattgtcaagagtaatcggaatctcatttctcagaacctgtcttgggagattatacggatatacagataatgcaataattagtatcttctggattacatgaattcagaactaaaccaagattgacttcagaatcaagaagtactccaaagcaaagaaagttaccagcgcatgtggcacaggaagtaagataggggaatacataggcataggacgaaacctctcctttactgatttagactggggcacaaagccagctttcttttcatttctgcaaaatccggaagaaaaagttggaaattaaagatcgcagaagtaaatgattgtagccaattcaaacttggatcaataataatggaccctcagaaaaaaaacagtatttatatgccctaacctaggcatgcctaagtcctaacctgggggaaagggcgcctagttgtcaaccccactaatccatctacacggccttgttttaggcacagtcctctggtgagcaaaatagataaacctagacatgtctattctatacagttaagttatacggggagaaacaacatgctgaaaaaaactaatcctaatctgaaagcattcatgggactctgcatacgaataaagttttacacatacacagtaacctcaacgagccggaaggtgctatcagccccggcaatgcatagaacaagcggatcatttttatcagttctcagaggcagccaatcaagttccagtacaagggtgccaggaatttgaggctggagaagtgattgggctaacggatctggtgaatcctgcagcaattttcaaaagcaagtgtcagaaagagtcattttgagttgacagacaatttcaaacaagtatcaataaaaccagtcctgttcttgttttctcttcacactacacaatattagtacaccacctttgaaaccacaagacatgtgcacaaattgaaggaaaatactgaatcctcttaagactcaccagatcaaatacagagaatgtattgtcattaaatagcacagctacacgccctctgctgcgatctccagcaacaacaggagaaaatttgatcctccgtattccatctctgtgactattaaatgcagatgactgtcctgttgttacatcccaccatcttatgtttcctgatctatctcccataacctgaaaagagagagcaaaatatgatctctcataaaaataagagacagaactggaaggtaaaaagaaacgaaccacatgaggcaagcgatatgccatggctgtaaccaatccatctgagggaacgaatgaagtagatggccatttaggtctagaaatagaggcgggatcgtctatacgtcagtgaatataggaagaagattacacagcaatcaaggttcaagaaggtgagtgctaatttatgtaaaggcggctactaacaactatcaggtagtgaattttctgcactttctgaaattggacaataaagatctactccctatctcgcaattttttaagaagaatttaatgacagatggcaaagaaacagattgaaaaacaagcatggaataagtgaaaaggaactctacagcaggtaagcaataatgtgcaatcactatttcatattatcttctcagaatcagagagatattcagaagcccttaactatgatcagcattgtgacaaaaataaaaacgcagctataatgtattactacggaaagaagaattctgaaaaaaaattgagttaacggaactctgattagttttacctgaaatctcgaattcgacgtccttggacttcaaatactccaagagcaccatttactagtgcaaatgcaaaactctctacagtttcttcttgcgatccatctgagcccactgatgctgaaaatatgtcaattaccgccccttagaaaaaaatgaatcaaagacttgggtatattcaggataacacagtttgaattgtcataaacatctcacaagagtctcctgaagcagttactccttcggatgctgagagcgattgtttggacggaccgccttgacctgggcgcggaacagctggaagcgtccattccactaccgtgaaaggaagagctaatgatctaagctacacgattaagagaaataagaaacataatataattgattagaatacataacctcaaaaagatactaaacactccacaagttagatacgacatatttaaacaagatgcaagagtatatttatataaagaacgcttttagttctcatttgacccattctccataccatcattactttcttcttaaaagttcacaagaatagatattggcatggcaagaaaggcttgttagcacttgcaaaaggggggagccaagaaaagaagccacatagagaatgttgttataagtaaatctcctcaaaaaatttaaagggacaagctttatcaattttatgcataatcgttcttattaggcattatgatgttcaagacctaacatgagccagtgattatttggtgccaattactcaatttcacatgcaaaaagtgtaaggtgggcaaggcattattacgtgaaagtaaatggccatacgaagaaagtattacaggaatgagagagtaagatatatagaatgggacatctaaagaaaaaagtcagaatgtaaaattgcaaattctaagcttgcaaacataagagagaaaaagttattgtcatccactcactgagactaacttaagtagaaaaagtaaatattttggggtttgagctcactcaccataactggatgcttggtcattgcccaaacttctacaggagcatcacggaaaagaattagaagatacctgcaacaggacagaaaaaacgaattctcagcatcagaagaggtatctagaagctcgggtccaaagtaataacttccaattttacaatagttcctcatctttgaaatagtgaaggagtatcctcgatgatctgaattgacatttgtcatcttataaaggaacatattttcaatactgaaagacgatgttcttaagcttaaattattagtgagaagctgatagcttgaagagcacaagcatttagttacattatttataggcatcaaatactcaagcaggtaaaaaaacattaaaatcaaaccttccggaagaagaagttctaagagctcttatgggagtgcgctctggcttttgtaaatcacgaaatggtttattcaacccacttctaaggcaggtaacaacaagcctatttatgtagcctctgcttttgtcattcacctgaaaccacaaaccagtgcatgatgccggatgtcactttcctaattctattattttttataaaaaaacaactggaaattaaactaaacctaatactattcttaaaccaactgtagattggaaatcactacgaaaaaatagaagaaagcgatgcgacgtaacatgttggattattaaaatatatttgcacacctgactgtaagaaaatgaaactaatcttgaatttccaagccaccgaaggcctctaacaacaccagtatgaaccgaagtgcttgcagcaacagcattcgttgatacatcaacaacatcgattgtcccactctgagttcccaaagcaaccaacggaacagctgcagcaggaatgttaccccctccttcatttaaaatcaatccataaatcaatcatttgagtttcttatgaacacttttagtattacaaatacaagggagaacaaaacaaacttgctagggttgctgtaagagacggagatggtacagcaagtgtagagactgtggaagagagaagctgaagctgtccagtcaggctgatctgcattgagcgaagtaaacaagtataagccctgttaagtagaaaaataatgaaaagaccaataaacacatactgtggaaaacacaaccctaatgatgaggaacctggtaacgccaaacttctaccctctggcggaatagtcatatagtgattaaggaactagttaacccaaaaaccttccagccaccaaccttaaatgatagatctgatttttccatggaggaacctgatgtgtgacctctgcttcgatttgtaggtgcaacaactaattcatcatccagacttgaggaatcattttcctgaatagctccaggaagtgctgcttcagtggctccaatacccatgtccaagtctgatgcatttttcagagcatcttcaacaccttcagcacttaagacccacttccatattttgccatcatcagatagggagataaaagttgtcttagaaacaagaagactttcgtcataaaagtcaaatgggttatcaaaatctatagaagaggttccatccgggtgaatttttgtaatggtttgcattgtggagtctgaatgactgagtagaacagccagagcggaaggagacgggatggacattccaatagatggcataaactcttccatggtacacatgacatgcacctgttctcctctgcaatgatatgtaacgagctatagtttagatatgcatccagaacaggggtatccaagtctattcaacataacaagatacaaagtcatattcatatgacgcttttataccatcaatctcagacactataagacaccagatagttcaaatatgaccagataggtagactagactggttgaagcacaaggctattagcatgattaccctaaaatctgatacctaaaatattctatccatattttcccagtgtagattctttaaaagatgatacttctaacatgtaaacggtgattgcttcaaccatctcctggttaacaagcaactcaatctgtatagtgactggaaacacaaaaccctgaaccatcaaaagctaaaatgaagccacccttaaaggacatagatatcttactctttccgacgccaaatgctgagcctgccatcgacatgaccacaataaagcaactccttgtttggatcaggcaagatatcaagaaacttggcgcaaccacgaggtaatggcgtagtcgagaggggcgtctcatattgcagatcaaacaccaatagctccctaggaaacgtcacaaagagtatattcttccaatgtggcgagaaggcaaatctagcaaagtataacggaaatgcggctgaagcaggcgaagacgatgatgaattgccattactagctgcctctctttccaacctcggtagctcactgaaatctgtctttatctgcatctcctgaatcacaacatcgttctcactatctccaagtaccttaaccgacaataggaatcctttaaggccaagcacacagaaatggcgagaatcatagggatcgcggcggagacaggagagaatctccgtgccggcatcgtacttccagaaaagtccaccggaggtcgtgtagagcgagagaaacgaagatccagaaatcgcagcgaggacatgagaatcgtggcgagcttgaacccaacaaaggtcttgaattccgagcttgggatcggaggaaggattaagccagacgacgacggagcgaagatggaagtcaacgagagcgacacggccgtggcgatctgcaacggcgaggagaaggtgagaggcggagggttcggtggagagtagatcgcgggggagagggagaggaatccaacggacggaagtgacgaagggagagagagcaccgggaggaggagggagagggatagtggaaacgagctggagagaacgagaatcgacgacagagacggaggagccagaggcaaaggcgaagagaccggagggactgagatcggcggatccgaagttgttacggctgggaggaccggggagagtagaatcccaggtatcggttggtgatggcttcgatgctgccattgttgcagctttctaccaacttaatttctctcgatttcaatttcaattgtctcatttgtaaacttccaaaggtgagttgaaatctatacatgaaccagcatgtacagaggaccattctatttttaattttttttcacaaagtgttctttttgtttagaaacagagagattccaaacattataaaagtgggtacaaccacctacaacctttaaagcctgctaactattacaagttttggattatcaaacagagtactgacaatccctacttcaacagaaccaaaagtatcctaagttacttgaagctcgaccataacatcttgaacattcaaggattaatgagctcgcaatgagaataaccaaggatcattagaagactctacaacataggctagtcttcatcttttacctgaaagttaacacacacaaattcctaaaaactggattaaagaaaaaaaacgaaacaaccttttcctgctttgtcgaaactacgtgataccaaaaagtggatgacagtatttgtagagtgatattatctcttctttggaggtatctcaactccccaaactgatgttcttgaaactttcattatttttttcttcagttcattatctgtcacaattgatagatatttagatgactccccaacctcaatctttgtgtcatctcatctatcagtcctcactctttacaaagttctttgctgcccaacaatgctttctttggcaaattgatccgacaatcattgaggatgactgctagcaacataagattgaagtcttaatcttgttatcactacaacaaatatccacattaatagcacaagaggatacattgatagcacaagaggataactcattttccgttactgctatgaaagattaatttttattttgattattttgtaatagcgtttgataaacactatgatagaaaatcactaagcggaaagctaaaatcatctattccgccaatatatatgcgaaaaaatcacttaagcgccttatgtctcagatctaaaaatattaagcgacaaaacgctaaacacatcttaagaaaaaaaaaaatcccccaaattgattccttcaaaccctaaatttcttctttgaaaatctctaattccacttcttacatcccaaattctacattgttcttcacctttctctcctcctttctctcttctttcactcatcctctcacgtttcagatggaaaaggtttgttgattttgtctctcttttccctttgaatctatagcttctaatccttgtttgttggttgtatcgctcctctgttggttttgtctctcctctttttttgaatttgcagctcaaaagggtaacgtttttgaagtgtttttgtgcacacaaggtgttcgacgaattgactgtgagacaaaaaccaagaaaagactcaacatctctttctctgggttcgtttctctcttctccaaggttgtggtatatctcaaatcactatgattcataaacctaattacaaatactttatctataacatcttaagtgttcttcctcatgttgaattatgttgtgtatatggttcgacattgcattcagccgtggatattgtagtatcttaggtcattaagcaaggtctctttgttagcatatgtagcataaaaaagattttgttttgttctttatgttgtttcgtgctaatatatttcacaaattctcattgctttctctcatgattctctaaattgttgttactctctttggatttctttaatctgtttccatggatgattacgtttagctactttaattgtatttctacatcgagtttataatgatttggttatatgattaatagttttccttctaataatgacttataattttctctatttcagtttactattgacaatatacttagcttcaattaagctactaggagaccgagttttggtaagaccaaagagacagagaaaaagacttgacttttgaatatagagaattgagagatgggtgatagtcaaggtagcatcaaacttgcttaattggtttggtttctgaaacttcattttgtcgattcttagtggttagcaagattagctagattgatttcacttatgtggtttgtcatttttgttttcagaattctcagaagttcctgatctaagtcaatggtgttcgagttatatctatgagtcaccgatgatggatacaagtgatggtcttgggtttgcttttcttggagaaagtaaaagtataaaggaaatggaattagtctcttctcacgctaaagatatgtctcagtcccaaattgagttttcaggtgagtaaaaagatttgtttactaataatgtgacttaataagtttgtgttcaagaagccgaaattttacttgttttatttcatgttctaacagaagatattatgaatctcgtcgttgaggacagtgagatagatgaagacaacagtctttggggaaaacctaagagaaaaggtagcaatgttttccgaaaacctaagagaaaggatgagactacaacaacctatgaagctgagctaaattacttgaagaaccgagtctaatatctagaaaacgaagtaaggattttgcatgatctcatcaataacttcattggcaaaagtagtatatagaagttaggatattagtttaagtgttggattgagacttgtgttatgtatgaattgatttttggtttatgaaatggtgtatactttttggatgtttattattatatatgtattggttattttgaaaactaaacatgttccaccaaatgcaaatagattaaaacaaccgcataaaattagagtcatgacactgaatattatagcattataaacattatagatcatagcctatatatatcgctattataagtcaataaatgaaagcgttttactaatgctatggtagaatattctatcataacatacggaaaaaatgctatcgtatatggagggtctaccataacaggggcataacacagcgtttatgaaaaagctattaatgatattttatagcgtttctctcgtgataagaatgtggatatttgttgtagtgtatcacactgttagctattttcgcagctcctctattacaacttgaaggctccaacaagatgaaccaatgaggcttattttttgtgtaacttaaaagctcagctatatgaccttctatagctggccaatcttttggtttagcaatagcttgaatgatgtctactgaagaagctccaaacgtaactttctctaaatgatgcttattcatgctatctaaagcccactcccaactctttaattttgcatcaaataatgaaagcacctgagaataagatcttctgctatgtagcaacacatggccattaggatcacgaactatccataatgcaccagtgatatgtctataatttgcatgatttaggcaatcattcttcaccactttatcattgtttcatccacatttcgtctcattaggagtcgttttagtgtgttttacatacttaggacgattttgcgttaggattgcatgtgcattgcatatttggttgttttcaggtactttggatgcttttggagttcaaacaaaagagaaacagaacgagaagtcagaatgccgaatgacgccttcagcaaaagtactctatcgcagcctcggggccctgccaggcatatcactctatcgcaaccccggagaagctagcagctcagtttcactcaatcgcgaagccggaggaatcaccccatcagaaccactcgatcaccactcgatcaccagaaggcctatctgctcgttctgcactcaaccagacaagctgagaacgaagaagagaagagaagtcgaagcaaccactcgatcaccacctcatgacatccactcgatcgcactcgatcacagggtcgctggaccattcaatctcgacttcactaaatctcactcgatcgcaaggcggagcccctgaagcccagtttgatcaatgacatactcgatcacaaggaaactcattttagcccgtcagaggccaatgacaaattcggtcgcaggatcatgacgtgaagattcgctatatatttagtttccttatttgttttatttctcgcttatataaactgcctcttaaggttttccctagggcatccgttatttatctcgcttttacatttcgcaactttgatagcggcagtgtttctcttgtgactttgtatttgtgcactttcaagtatttgatattcagttttcgtctaagtctttcatcatttctgttatcatgttttcaatcgttgctttgctattctctttgagtatgtctgagtagtgaactgtatttttgaggatgggatagattagttttggtttacttggtcgttttaggtggttgagtttagaatactagaatcccttctggattagttgcgcttattgcttgtttcactggctaatgtggagtatgagtccagacgtccagcgctcataaggcgtttaatgggcgttggatcctattaattccagagatatctgactctaccccaagggattggctgtagagagggtattggctttaacatgttgattcgataatgcctgcttagttagagatcgctaaagggatttagattagtgtctagctttgcttgaagatttctatcacgggagtgaattaatctgttgttgaacttgttgtctagggatagcttttgtgaagttttgtcaaccgcctgaatagattaagtagaccacactattcgattaccccatccttaggaatcgtttatccatttgattgcctgttatcatttctgctttgttattcacctgcctgctattgccatttctgcttttagtttcatttcatttctgttattgcatactagaactgttagaaccaaacaactttctgcttggcttgactagagcattctgatcatatctcatctgtttgcatcacaccggattggattgacatcctaaactactacaacgacaggatagtattttaggattaattgactaaaaacctattatcaatttggcgtcgttgctagtttggtgtttgtttgctatatttgagatcattagaaacgttaagatcaagttcgtttttgttacacaagttactaacattgtgccttttctgtctttgtgtttcaggtcccttgcaacccgctttacagacgcatctctgattcgtctgttatagtccagctgctatttgctgcatgcatacacggtcacaaggaaatcagaacctcctattcaacgataacatcgaccgtattgcttgccaaaagagagaacataaagacacaaacacaatgactgacgttgtagatgagcaagagcaacctacaaacattggtgctggtgactgccctcacaaccacaaccagcgtcatggaattgttccacctccagtacagaacaacaactttgagatcaaaagcggtctcattgcaatggttcaggggaacaagtttcatggcctgccaatggacgatccgctagatcatcttgacgagtttgaaaggctttgtggccttactaaaatcaatggaggtagtgaagatggtttcaagcttcgcttgtttccattctcacttggagataaagcccatctgtgggaaaagacgctaccccagaattcaatcacaacctgggatgactgcaaaaaggccttcttggcaaaattcttctccaattccagaactgcaagactccggaatgagatatccggattcactcaaaagcaaaatgaaagcttctgtgaagcttgggagcgctttaagggttatcaaaccaaatgccctcatcacggatttaagcaagcttctcttctcagcacactctacagaggtgtcttgcctaagataaggatactgcttgacaccgcttcaaataagaaatttttgaagaaggatgttgaagaaggatgggagctagttgaaaacttgctcagtcggatggcaattacaatgaagactatgacagaagtatctgcaccaggtctgactctgatgacaagcaccatagagagatgaaagctctcaatggtaaaccagacaaaatcgtccaaatgcagcacaaacatgtttacttcatctctgaagatgaaccattcccagtacaagagggggagaatgatcagtgggctgaaatcagctatgtttagaatcaagatggctacaacaaggggtataatcattacagaccaaacccaaatctgtcatatagaagcaccaatgtcgccaaccctcaggaccaagtctacgctcagcagcagcagcagcagaaccaacccaaaccgtttgttccttacaaccaaaaccaagggttcattccaaagcagcagtttcaaggaggatatcaacaacagcagccacagcctggtttcacaccacaacaacaacatgcacctacgcctcagaattcagacataatgattatgctccagcagctcattcaaggacaagccacatgagcaatggaaatcgctaagaagctgtctgaagtaaactacaaagtcgaccgacaaggcgtcgaacttaacaacaagttcgaatcaatgagcactaggatgagatatgtggaatgcatccttgcatcaccatctgttaacacaaacccatgccagcttccagggaacgcaatccaaaatccaaaggagtatgccactgcccatgccatcactatcacacatgatcgagccatgccatgtccctacatcaaacactgaggacactgtaattctagagggggaggatttttatcaagatgatgttttggctaacaacacaatcgaagagcccatactcaccagtaatccactcgaccacaagcttccccagctactctctttgttgaaaaaccggaagctgcaaagaccaaagacatagtcttcgtgccacccccttacaaacctccgctttcattccctagtcgtttcaagaaagttctggttgcaaaatatcgagccctccttgaaaaacagataaaggatatgcctttagtggactgtcttgcgctactacctgacgagcacaagtacgtgaaagacctgattacaaaaaggatcaaagaagtccaaggaatggtggtattaagtcatgagtgcagtgctatcactcagcagaagattgttccagaaaagttagaagatccaagatcttttactctaccatgctccattaggcaattgactttcagcaattttctatgtgatctatgagcctcagtcagcataatgccactctctgtggcaaggaagctgggattcgttcagtgcaagccttgtgacctaaccttgattcttgctgataggacttcaaggagaccttttggcctgttagaggatgtgcaagtaatgatgaatggagtagaggtccctactgattttgttgtgcttaagatggatgaagaatctaaggatcctctaatcttaggaagacctttcttggcttcagctggagcagtcatagatgttaagcaaggaaacattaatcttaatctgggggaggatttccaaatgaagtttgaaattagggacactatgaagaagccaacaatagaaggacaaagcttcttagttgaagaaatgggtcagctagctaatgaactgctagaggagcttactgacaaagatcacctacaaactgctttgaccaaaagtaatgaagctggatttctctctagtgagaccttgagctatgagatgtcaatagactcacacaacaaagtaccaggatcagagatctttaaaggtgtcattgcgttagaaagagaggatgttgcattgaacgaggaaggctcaattgatactcgactaaagtgctcaaccaaacagctaaagtcaagcatgagggcatcaaatgattggttagaattcaaggagaggtctaaatggcatgacagagctataagagagctaacacacactgtgaaagagctgaaggatcaagtcaaagagctccatgggaaagccaaccaagcaccactcgacatcaaggacgtcccaaatgatgaagttattcctatggttagaaaagaaggatgtgaattcacattagaatagtatagaaaagatgattatccagatgatgaaaaatgagcttaccaagaaagggccattgagtactcaattacatacttgtcacgagagcatgctgaatttgatgttgtatctactaaggaaggagaggagacgtcaattctactctatcaccctccttgagcctaatgagtgtgaggagtcaagctagagacttaaaacaagctcacttgggaggaagtcccacgtctatccctgtatatagtttttattttattttattttgttacttttgatttgttttggttttggttttgattctcaggaaatgaataacagctagagcaacatcagggatgcaaccgagtgttcaaataaaaaattacaattttttttgatgaatcacttgatcgcaagatgggagtaaaagctcgggagtgcgatctagtagtttttggacaacatctttctcaaagacaatgtcaaactactcgatcgtaacatggaagtggtgtgattgagtgatcttctagtggaattgcccaaaccactcaatcgcaaggagaagtgaaaatgcccgacatgacttcaatgacaacccgcctgaagacatgccatccagctgccaggacattgcccaacaaaaggaaatccacctattaacagagggaccacaccgttccgcaagctcccgcaaggcactcgtctcatgagccaatggaacacaggaggaagaatgctagaactgtacattcatcaagtaaaggccggataatgtcgggccgaagaacacatgatcatcgtgctccacaacctgctggggttgcgatcgagcacaatgacgaggagatggccgagccacatcaagaacttgtcatgcatgcggagtacactcaagcagatatggatgactacatctccaggacattctactgaggtaacacaccaaaaccctttgtaaatactgcttttgtttttgtttctgtgtttatcttgaattctttcacaaattttgattacacaagggactgtgtaatttaagtttgagggaggattcaagacgtaattgacttgttttttgtgaatatcatttgagtctgcatatcatctaagtcatagaaaaaaaaaaaaaaattgaaattttttgaaaatgaattccacaaaaacagagtgatcatttagttgcattacatttaggatagagtctagagtgtttcatataggattgttgcatatgcataggggataatgaggaaatagccttgtaagcatgatgattcactaaaatgagttattagttctctgaggcatttgaatgactttgaagtaaaaccgcaccatgttctatagaaaccactcagtgcatgtaatgacacctttccctgtcaatttgaacttgaatctgacttataattatcatgtttgcatcgcttttgaactcaaggatagaatacatatttggattttctttcacttattcaccactcttgttaatccaagtagctgcttctattattggagtagttcccccacccttaaccaacccttctttcaagccatgttattttgtgagagcatgtgaagcctattttcaggattgagcttggtagaacgtgttaggtttgagccgacaagagtagtatctcatgtagttccaatccgcgttttcggacttggtaggactaggtgggaatttatttggggattgagattgagtgtgaaaagaaaacgaaagaaaaataaaaaataatgggttagagtccttaggagaaggaagctgaaaatcatattgaggtctagtaaatgtttgggaagcatagaattgttaagacttgctctaaaaaatagatggcagcaaaaacagaaaaaaaattataagagccataatagtttaagaaaaactcaattcactagactagactcatagagtttaagaaaagcttctccttaagaacaagagccaaagaaaagaaaaggaaacattgatccaagaaaaaaaatcaaaatatgcctttagtgcaaaatggtagacttaggatcatcattgggtttagagataggaccatctacttgttattcacggtttatgtcattgggtagatgtggtgctattcttgtatgcataggttggcacttacctttagcattcttctaaagcttagtcctttttcattgagagtcccctgctattaaaatctgaaccacttaaaagggaccatctttgtctcataacctgtcattagccaaatgagttcactagcgattcatatcttgattcatgttttcgaacttaatgaatgttaaagggattggttgatcttgacgcattgtgcatttgagtgtaggtttggatcataacagagcatggctaaagtttttaagtagaagtcgatcacctcgcattttagaactgttagttggtacattgatcttaattgtcatatctcatgctttggttctgaatccccaacttcaaacatctccttccgcttatgtcttcttgtttgcttgagggcaagcaaagactaagtttgggggagttgatatgtctataatttgcatgatttaggcaatcattcttcaccactttatcattgtttcatccacatttcgtctcattaggagtcgttttagtgcgttttacatacttaggacgattttgcattaggattgcatgtgcattgcatatttagttgttttcaggtactttggatgcttttggagttcaaacagaggagaaacagaacgggaagtcataatgcccaatgacgccttcagcaaaagtactctatcgcagcctcggagccttgccagggcaaatcactctatcgcaaccccggagaagctagcagctcaatttcactcaatcgcgaagccggaggaatcaccccatcagaaccactcgatcaccactcgatcaccagaaggcctatctgctcgttctgcactcaaccagacaagctgagaacgaagaagagaagagaagccgaagcaaccactcgatcaccatctcatgacatccactcgatcacactcgatcacagggtcgctggaccattcaatctcgacttcactacatctcactcgatcgcaaggcggagcccctgaagcccagtttgatcaatgacacactcgatcacaaggaaactcatttcagcccgttagatgccaatgacaaattcggtcgcaggatcatgacgtgaagattcgctatatatttagtttccttatttgtttcatttctcgcttatataaactgcctcttagggttttccctagggcatccgttatttatctcgcttttacatttcgcaactttgatagccgcaatgtttctcttgcgactttgtatttttgcactttcaagtatttgatattcaattttcgtctaagtctttcatcatttctgttatcatgtttgcaaacgttgctttgctattgtctttgattatgtctgagtagtgaactgtatttctgaggatgggatagattagttgtggtttacttggtcgttttaggtggttgagtttagaatactagaatcccttctggattagttgcgcttattgcttgtttcactggctaatgtggagtatgagtccagacgtccagcgctcataaggcgtttaatgggcgttggatcctataatttccagagatatctgactctaccccaaaggattggctgtagagagggtattggctttaacatgttgattcgataatgcctgcttagttagagatcgctaaagggatttaggtcagtgtctagctttgcttgaggatttctatcacgggagtgaattaatatgttgttgaacttgttatctagggatagcttctgtgaagttttgtcaaccacctgaatagattaaggagaccacactattcgattaccccatccttaggaatcgtttatccatttgattgcctgttatcatttctgctttgttattcacctgcctgctattgccatttctgcttttagtttcatttcatttctgttattgcatacgaggacagttagaaccaaccaactttctgcttggcttgacttagagctttctgatcatatctcatttgtttgcatcacaccggattggattaacatcctaaaatactacaacgacatgatagtgttttaggattaattgactaaaatcctactatcaaccagccaatcttttcgtttttgaccaagcaaaaccaatattacacttcaattctcgagagacaggaggaatccaattagcattttgctctctaatcaactttccattttgtttgatgttttttgggcaaatagccattgattcccatcaccaaaagctttagcaacaattttatttgccaaagcaccctctccttcaaaaagaagcttatttctattcttccatagaacccacataatccaagaattgccaaatcttagatcttaaggaatagctctaaccttagacagttgcagcaaatgactaatatttgcaaaaattgatctcccaaaacctgaaactagaaatggaacattggataaggcccacatttgcctagcaagggggcattgaaacaaaatatgattgactgtttcaatcttttcctcatacatcaaacatccatcttggactttaattcctcttgttcttagtctatcttcaactacaatagctcctttcaacgctttccaaataaatacctttatttttggagctgtttgaattttccaaattgaatcaaacaaaggacttaatgatggacttgtttcagcatccgtaaacaaattacgatgtgcttttctactgctcaaatcataaccagacttaactgaatataacccattttttgttcctgaccaacaaaaagaatcttcctttgaaggcataggtcgttgttgtgagatgatctgaatctcttcaagtggaaacagtttctttactcgactccagtaccaatttctcatgtgtggatcaatgagactcttaaccttcaaagaaatatccattaaagaatgaagattcatagcccttctagattttccatcaaaaacccacttatcaatccaaacacacgtattttccccattaccaatgaccctctttaatccctggattaacaactctcgaacatataaaatgcttctcctagcgtatgaaggacgagttccatatggtgcattaagaaagtcagaatttaagaagtatcggctcttgaaaatctggtaaaacaagctatccttttaagtgagtaacctccatgcttgctgataagtgtgcattttacatgttttgagcatctatttgtcatcactttagcatcatgatatatgtcaaattaatcctaagaccactctctcaaataaagaggtcaattgcagcaattagggatcgaattcacaaagttctcggatcacgcaatagactaatggcaaatcgaattacgctaagtaaaatagtaaataaaataaagagaaacaaaagtaagcaatagaagattggttcgttgtgaaacaagatattaaaagcgtcaggcttagggtttctcaggagataaatgatagtagatatagaaatagctaagttgttatcaaaccgttctcgaactcaaactatgattttagagtaaccggtggcgttccacgaaactctctatacttagagctaagataaccggagaagccgagaaatcctatactaaagcatgcattcttatcaagtttgattaattcacctagaatctaaactagagcccttctatgagcctacctgttctttcttaaatgcctaggctcatctatgatggatcaaatagcaagtacctatggtgggcatacttactatctaatatcaagttctagttagctactctagaactagcattaagaacaatcaagaattcctacagataaccttgcaagggggcaatctacaaaatcatctataactctaatgagaaaccctaaacctgacaagaaaactactcaagcatgatgaatgaagcaaacaacaagattagaatagaaatcaatgaataaaacaagaagaaaatagagtaagaaagatccaaatggagtttccacaaggttttgctcctaaagtacaaaagagataaagggaatcgcccccaaagcttaggtctaaacaatgaccctaaaaacctaattatatgtctaaaacacgtgatgggccttcattaaacataagagaaagttctgggccgaatttggaaatcttcaaaacatcaataagttgcgtctcgaaattgccgtcaggaattggtgtcgctcgacaccaggggtggtgtcatttgacacctacgtgcattttcgtctccggatttctacaacagcttaagttgtcttttgatctccagaatgctccataatctccaaatgcatcccaaacatgtaaagacctaaaaaggactagaaaagactctagaaataacaattagactctaaaacttatatctaaatcatagctaaaatcggtaaaaatagagttatatcaactcccccacacttacctttgcttgccctcaagcaaaacacaaaagccgaacccgtgaaagaggtttgaaaacacatgaactcccaacattctctagtttattgccaagataaatctaaccaaatccatatgcctagcaagtctaatcaaatcctaaccaacatgtacttctctgcaagcttacacaacattctagattccatacctaagttccacaactatatccaccaggctttcatcgctgggtctcatcaaacaagctaatattcaagatctttctagactcattcctatattataccgtgataaatcgaccattctttatatgtatgtttttctttgtgtcctttctctcccctagacttattttttttagagagtaaaacaaaggggaactcgcatactagatcgaccccctcggcattttgccaacctttgtaattgatcatcccaaataatgtataataatggggtcatagaaaacattcctacccttatacactatctaaaaatcgtctcaatctctcattatattttttttttataaggggcgaagaacatattctttttatcacattggtctcaatatcaggtgaacaaggagtcaagatctatcaatactaaccgtttgaaaaggtaaaaggaagagcagtgagattagctccagccttagtggttgagttggaaactaggatatcctcaagtctgttggtttgccatctaaattttccaatagtcggattgactcgaacctgcaacactcatcaatcaggcaataaacaagagaaatatagatcatgattcctaactaaactaatcaaaacctcttttttttttaaaaaaaaaaaaaaatgactcaataaactcaaaaacgaaaaattataagaataaaaaataaaggcaatgttagtaagaacctcccccagacttaaacgacattgtccccagtggcattcaaatccaaagaaggtgggaaaagtaaatcaaaaataaaagaaaagaaagaaagggaaaagaaaaatcaaacttagtgggttgcctcccactaagcgcttgtttagagtcaatagcttgactttggtggagtttgaggatcatgtgaatcagatggaggaagtaaatacttcctcgtagaacctcgcatcatccaaggtggcgtataagcagccagtgtgtgcggtctaccaaggaagtgaggaatgttagcaggacaggacagaggtatgggtggtctactccggtttcctgaacaatcatcaaaagaaagaacaagcgctcgacaagaaactcatggcttgcttaaccgtaaaacagtttttagaaattttaaactcttattgatgaaatcaggaggtttaggaggaggagatgagtaccttagccgtttaggaggtggatcaatgagtagaggtgcagtgggtgacgtgaccgtagtgactggcgtatcagtagtgaactcaacacgaaaaccagctctaataaggaactctggctcagcctgtgtggggtgtcacttggctcttgagaatctgttctagcatgcattccatcctactcgtagaagtgggtgaagggtgggcttggtgagtagaatagcttgaatgactaacctagaacatagcaggcctgttgtagtcatcaagttgaatggcacgtccatctacaacagctgcagctctgtatccggcttggtgtcgagcaacaccctggtggtgtcgatcgtcaccctcggcaaaatcaggtagcaggtttccctactcatcgattttctgaccatcctcattgtatgcctgaccagctctgaaccttaacactcctgcaacatcaggtattactatcaacatcttggtgttgcaatttaattcctgaagctcctgaaacagaagaaaaaagaaaacaaaaagaaaaactgaattagtaatgaaagaaaagaagagtctagacttaaatcgacacctagtctaatggtgaagcaaagagaacttcggcaaaggcgccaaatttgatataggttaaattaatcttaagaccatctctcaaataaagaggtcagttgcagcacttagggatccaattcacaaagatctcggatcacgcaatagactaatggtaaatcgaattacgctaagtaaaatagtaaataaaataaagagaaacaaaagtaagcaatagaagattggttggttgtgaaacaagatattaaaagcgtcaggcttagggtattctcaagagatagatgatagtagatctagaaatagctaagttgttatcaaaccgttttcaaactcaaactatgattttagagtaaccggtggcgttccgcgaaattctctatacttagagctaagacaaccggagaagccgagaaatcctatactaaagcatgcattattatcaagtttgattagttcacctagtatctaagccagagcccttctatgagcctacatgttctttcttaaatgcctaggctcatctatgatggatcaagtagcaagtacctatggtgggcatacctattatctaatatcaagttctagttagctactctagaactagcattaataacaatcaaaatgaagaattcctacagataacctagcaagggggcaatctactaaatcatctataactctaatgagaaaccctaaacctaacaagaaaactactcaagcatgatgaataaaacaaacaacatgattagaatagaaatcaatgaataaaacaagaagataatagagtaagaaagatccaaagggagttccacagggttttgctcccaaagtacagaagagataaagggaatcgcccccaaagcttaggtctaaacaatgaccctaaaaacctaattatatgtctaaaacacgtgatgggccttcattaaacatagaagaaagttataggccgaatttgaaaatctttaaaacatcaataagttgcgtctcgaaattgccgtcaggaattggtgttgctcgacaccaggggtggtatcgttcgaaacctacgtgcattttcgtctctggatttcttcaacagcttaagttgtctgttgatctccagaatgctccataatctccaaattcatcccaaacatgtaaagacctgaaaaagactagaaaagactctagaaataacaattagactctaaaatctatacataaatcatagctaaaatcggtttaaatagggttatatcacatcatatcatcacgattttatataatttctcatcatttgtcaccactttgcatgtttaggatagttttgcatgcatgttgcatatttgtgttgtcttcaggtgatttggagctgttggcgagctaattggaagaagcggacctgatcacaacaaaacactctaccccctggtcgagtagattagatggctccacgacttcaaaaaaccacttgaccccttggtcgagtagaagacctcatcacttcatgtcaccactcgtcccccttgtcgagtaccaccatgagagtcactcgatcacatccactcggccgcatggtcgagtatcatcatctccatcacctgaccatcactcgatcacacaactcgaccacctggtcgggtacctctatcaccttcactcgatcactctaccaccaagccgagtaccaccatctctatcactcgacttcgtactcgattgccagcttcagattcttctccattccgcactcaacaagacactcgagcacaatgaagggaagaagactctagcttatcactcgaccattcactcgaccacctgggtcgagtgtcgttcttaattcgtcccaatactgtgtcgttttgagtattcgggtttcggaatatttcgctataagtagcatatattttacatttttgtaacaaaacgttttattctgcagacactgtgttcttgacgtttttgtaatccggatatctattaatttattcagtatttgttttttatttcgtttactaagttgttcaccatgttatcatcctgctattactctgttgctatcatgttttcattctcttcatcgtttatgttctctgcaatgatgtctgagtagtgactaggtttctgaggatgggttaaagtagtttagaattctcagtatgctaggtggttgagtttgatttgtagatccttctggattagttgttcttaatgcttattgctttttgatcaactggaatttgtgcctagacatttccgcgcccaaaaggtgttcgataaaatgtctgaacccctagttccagagatcgtggttctgtaccaaggtattggttacagggagcgttttggctttaacttgttgattcgtaatgcatgttaggttagctctcgtcaatggtgattgagtctgggactggtttaacttgagggtctctgttgcggtggcacttagatttggttatcgaacttgttgtctggggataatttattgagcatgtcaatcacctgtaaactgaagaaacgaaactactcaattaccccatcctcagaaattcttaatctaattgatttctttgtttattctgctgttgtttactgcatcttgttacatattgcttagtttttgcatttttcctgttactcgacctgatactcgaccacccagttttctgacaacagactgtgcagtcgaggggaaaacgggattttcatactcatacttttattcagagtgtattttcatacctaaacaaatttgtaaggtattttcatacctaaactgtatatttatttgaatttcatacctcaacttaagaaaaagtgcaaaattcaaagtcaaactaacgggtgttagtcaaatccgtaaagatgctgagtcagcggacatgtgaattatgacatgtctagaacgacgtcgttttgcataacagacgtttataaatgataaaaaatttgaaacagacgggaattgaacccacgtcgtttaaacctttacccggagaatctaaccatttttaccaacaaactttattggttataactcaaacgtttcaatatataaggataacagttttgtgttaaattgtttgcaaaacaaaggtgtcgaacttgcatcctcaatgtcttttaacggagtgtctaaacattccatctccattttcattggttatatcccaaacgttttaaaatataagggtaattattttgtgttttctcattaataaaaattattttgtattaggaggaatgaattaaattttatggtttgtaattgaaattctagaatatgaaaaatcaatttcaaatacaaaccctaagtttattcatttccctcaattcaaaacgttttcgttttattaatgagaaaatacaaaactattataaaatttattcagtttcagtttagaaagattttacattctaaattttttaacattctacattttagaatttttcaaattgaaatcgatttttcacattctataatttgatttcaattagaaacactaaaatttgattcatttcccccaattcaaaacgacttcgttttattaatgagaaaacacaaaatcattaccgttatatatttaaacgtttgacgtataaccaataaatattgttggttaaaatggtttggtaatcagtaacgatgctcttagggcgtgggttcgattcccgtctgttgcaagttttttttttttcttttttttttatcattttaacgtctattatgcaaaacaacgtcgttttagacacgtcataatccacgtgtccgttgactcatcgttttcacgaagttgacaaacacccgttagtttgactttgaattttatactttttcttaagttgaggtatgaaattcaaataaatatacggtttaggtatgaaaatacccgacaaatttgtttaggtatgaaaatacactccaaaaaaggtacgggtatgaaaatccccttttccctgcagtcgagtatctctgttacattttctgtctgttactcgaccacacccagtgcttggcaacaagctgtgttggtcaagtgttttaattgtctgcttgaatttctgtttcctgcatgttcacttaggactgctagaacaccccaaaacctgttcttgcttgacttgactctgtgaactctgattgcatcttgattgctagcatcacactcatttggattgacaaccttcagtactacaacgacatgatagtgctttaggattaattgatcttaaaaacctattatcacttgcttagctaagagagcttgattaaaaaattgaagatctttaaaaccaaaccctcctagtaagttaggcattgtaagcttctgccaacttacccaatgaattttctttgtattttgcaaattgttccacaaataatccatcataatacttgtaagatctttgtagagactaacatgcaacttaaaacgcgtcatagccctagtagagccattgcaatcgatttcaacaaaacctccttgccaccttgagataaagattttgcataccatcctgacatccggtcctgtaacttgtctttgataaaaccaaacaattggtgcttagatccactgaggcactctggtagccccaaataacgacctgttccaccttctaaatgaatcccagatcttcgcttgatccactctttcatctcttgttccacttttactccaaaggtaattgcagatatatctaaattgatcatctgtccagaaactctttcatacttagacaaacaattcaacatttcttcacattcttctttattacctttacaaacaaacaatgtatcattagcaaagaggcgatgattaacaaatggcattgaattattgaattgaatacccgcagctttaccttctcggcttgtttgattgagaaaatgaatcaaggcctcaatacacaagataaaaagcaaaggagacaaaagatctccttgtctaatgcctcttttaggtttaatgtaaccaaaaggttgcccattgatcatgactgattaagaaacagaagatacccaacccataatccatgaaatccacttcttatcaaagcctagagctaacagaattccttccaaaaaacttcattctactctatcataagttttagacatgtctgttttaaaagtcattaactcattggatagcacattattagactgaagaccatgcatgatttcatgagcaattagaatgttatcagatactaacctctcagccacataagcagattgcgtcggtgagactatctctggaagatagactgtcagtctactcgaaatgatcttagaaacaatcttgtataagactaagcataaattgatcggttgaatatctgtcattctctaaggattcaaattttttggaatgagacataagtgtgtatgattccactgttctggaagaacacctgatttaaagaatcccaatacctcctcaataacttgaaccttcacaactgaccagtatttctgaaagaaaagtgctgtaaacccatctggaccaagagcactttcaccattaattgaaaaaatagcattataaatctcctctttagttacttccttagttaaccgttgattcattgaagcagaaactctagattgaaatccaactaaataaggtgaaagcaaagcaggagaagaagatttaaacaaatcattaaaaaaaatagagaagcaagacgttctttttctctatttaatgtttgttcaacacctttcttatccagcaagaaattcaaggaatttttaactcgagtggatttcacactagcatggaaaaactgagtgttcttatctcctccaaacatccatttctctctgcttttttgtcgccaaaatatttcctcatcactaaaagcaacacccaattgctctttaatcttataaattctttcccagcaaggacatctaacactaagcccatcattcaacacctttctcaatctctgaattctatttttagcattaaaatcggcagatattttccaaatactaatacttctacgatattctacaatactaaaaatagaagagtgagtaccttttgaaatttcactgttccaagaactgtgaataacatttgcaagattaggatcatccgccattcttttgtcaaatcgaaattgcccacaaaacacttcttgatcattaatgaatttgactaacacaggtcgatgattagaacctaatttctccaaaaaccattgatgagaattaggaaacattgcaaaccaagctggatttccaaacatctgtcaagcttacactgaatccattgataattccttatacagccccaagtaaaactattccccgtacttcccaattcatgcatcccacaatcagtaaacatatctttaaagggtctaaaggaagatatcagcctaagaggacctcttgacttttccgcattagaaagaatctcgttaaagtcacctatcatataccacgcttcttttctcttgagaccaaaagtactaattctctcccacaacaaagatctaagactcgccacaggattatcataaacacatgaaacaaaccatctcttactaccatgagagatctgcaaatcaattagatgtttgtcttcaaaaaggaaatctaaatccagattatctttccaaaaaattgccaaacctccactctttccttcaggttctattgtacgatacttatcataacaaagccacctaaaaactttcaaaacaaaatcacctttattctttgtctccatgaggaatagaatatccggaaaatgttattttcgcatttctttcaggtaccgaattgtccagggattcctcaaacccggacaattccaacctagaatgccttactgatccaacggcggttcacttggaaccaccgtagttttatctttctttagacaagcagaagattctgaccatgtaacatggacttttctcttgaacactttagcaaaccgattctcagaatcatcaaaactaacttgatctccctccgacccatccgatttggatttagtttatcgtaacaaagtaattttccttttcttaggatttttctgcttcatacttaaccctgaagaaccagcatcagacatgtttgctttaaaacctgtagataaatcaaaaccagaaaaacctaagaagagatcatcattaaactccttggagaagtccgaattttttgatgaagaagaagccttcatcgcatcagctagtagtataggagtttcttgcttggagatagctttgcctccatcatttataaacaatcctttttgtttatttgtgactttagaaacctcactagaaactaacacatgacttggctgaagaaacagacacaaactcttccctcatgagttagcctttgacaatgaaaacatttaattctctcataatcaaaggttattgcaactatttcaccagtaggaagttgtacttcttttgacttccgaagcggattcctaacatcaaagagaaccctaacacagacataatcctgagcttgagatttttcaggatcaaaaagtaccagtaacaccttcccaacacactctgctacttctttaatcgtctcctttgtgtaatgttaaccggaatattacgaagacgaatccaaactggaatgaacatcaaataatcatctacaggtttttcaatccatctttccattacaacacaccaatcgtcttgtgtccaaacccttgtttttaagatttcatctaactcaacatcagagtttaaaataaactgaaatctctcctgcgataaggcaataccccgaactctagaggacaatctccaaattctaggcatgtctaatattcaattagccattctttgatgtgtaggattcaaaaaccgacccaaaatacaccactgatttctctttatagaaaaaaacttcgaatgatttgagagaataagaggcttctcctctgcaattgacatatcttgaagcgctttatgtatatccatatcagactttagaaacaaactatcaacagaaccaaaccaacacagatctagcagatcgaaacgattaaacagatcaccgactgatcaaacataattacaaacggaagaacagaacaattacaagatgaaatacaccaccgacagaaaatggaaatatctatggacaaaggctcagctcaattcgactatgattgagagagtagttctgaagcccaataaaaatgggacaacgacaataatcacggcgataataacctcaccattctattctgccaccaaaactgaaaaaaattctaacgtgccactagttattgtgagtaccactcaagggtgtgcaattacccttagctccttaatgagtaattgagaataaatgattagtaaaaaaagaaaaaaagaaaaaggttaattccatttcatttacgctccatttcccgcataatgtttatacctccggcgacttaagctccgattttgccggcgacttgagattcgatttcggcggcgacttgagctccgatttcaccgccgagttagctttcggggtcgctgtagcttcaaagacgaaaatctgctcccaaaattagcttcctcctcaccggcaaaagtaaatccgatctccttttgatttgtagattaatgtgaatttcttgtttgagttagttgttaataagataaaattgttgtattgttcattctgggttgttgtatcgttttgaatcatagagttcagtgagtcttcaatcaaaattaacgatttgtaaaaccctgaattgaccaactgggacaaatggtaacactgagacataatagtacaaggggtacaaacaataggacaggtggtacaaatggtattagtgagatataatataggtacaattatgtctaaatctgaatgattacgttattgtgttttaataatttatttgtaattataggaagcgatgaagaacaaacacacattcatacaatttgacaatgagtattattcagaagagcatgagtggatttcaaacaattctttaagcggtgtattgttgaagacgtcaaaggtaacatactcgttgttagtagaaaagatatgcaagaagattggaatagatgaaacctcaaggaaggtgaaattgagttacattctatgcacatctgagagagagacatctattgtagatgatgatgactttttagggtatataatggtagtgaatgctaagggaattagaccagctttgcacgtggaattagtaaataaagaatctgagagggtggaacaaatttcaagggtagagggaagaagttcagttggtgttaattttgaggagttgaatgcatttgatgtggaaaatggtggagtagtgacgatttttggagtagaaattgcaggaggtaattgtgtgaatgatgaaccgattattgaagagcctaattgtgtagaagaggctattgagaatgctgatagccgaatttttgaaaaggctatggagaatgtagttattgaaggtagggagcatgtggatagccagatggatgttgataaagataatggtattgatggtagaattaagtattatgagcttccatgtgctggtgaaggaagtcagagtagtgagaaaagtcagagtgttaaggaatgggaagatggaacggggattgaattgcaccaagaatttgtttctaaggaggtcgtgcaagatttggttaatagagctgcaaataagtattgttttgcgaccgcaactgtagagtcagatccaaagcgactcatgttacgatgtcggcaatctataacaacaggttgtaaatagtatttacgatgtgcaaaagtaaagagctcagattatttcggtgttaaagttcagaggaagatgtactcatgcaagcggtcttttaagacctcaagcaattgtaaacataccggcataccacgattaatcacgtctattttgcatgaggattatccagctgagtttcaaactccaccacctaaaagcataatgagtattgttcggggaagaatgggtttgcattttttgtatgctaccgcgtggagagggaaaaaacaacacattagtgatgtgcgtggtagtcctgaaaaaagctacaccaacttgtactcttatatgtacgtattaaaggaggtgaatcccgagacaatatcatatgtggaagttgatgcacaacaaaagttcaagtacttcttcgttgctttgggtgcttgcattgaagggtttaaagttatgaggaaatttgttattgtggacgccatttttcttaagaccgtatacggcagtatgctagttttcgcaacagcccaagatcctaatcatcacaattatatcattacgtttgctgtaattgatagggagaacgatgctagttggtcgtagttttttaacaagctgaaaaccgttataccggatgaaccaggtttggtttttgtgagtgatagacatcaaagcatcatcaaatcagttatgcatgtgtttccaaacgcgagacttggccattgtgtttgacatttgtctcaaaacgtaaaagtaagggtgaaaactgagaaggaagaagcggcggctaaattcctcatgagataagacaattgatagtcttactgccggataccacaactaaaccagggagaaatcaagaaacccagtttccattaacagtggaacgtcgtcgaaagaagactaataacaagtttcagcctgggattaatatcaacgcgtggttgcagcccgaggagtccgactgataattaaatgtatattttgtgttgtattgtgttgttatgtctgtaccgtgtacttgtaccgtctgtactattgcttcatgtattatgttttcatttttaagtactttggaattttgttaagtgttgttatgtctgtatcgtattcttgtaccgtctgtactagttctttcatgtttatctcttacaacaaaacctctataaattaagactcgataaattaataattgtataaaaatatcaactatatatattagaaagaaatttaattttagtattatttcttttacataaatttgcataagtctttttatttaattttaatatttttcttatatcaaaaactttttttgttgttttctatacatgataattattagggaattttgaaaactaccttgtttatgagtttttgtatgaaaaatacacttctctccacttttaattaaactactagattttaagccgcagtgtaccgcgggaacaatttatttttaaaagttagtatacataaaagtttgtaaattgtatctatctataaaatatttttattttatagtttacaattgttattaagtaacgtcctgccaaacccgtcccgccaacccgtcccgtaaaaaaaccattaattttattaatattgatcttatttatgatatgtttatgaattattgtctaaatattttgtaattttgtagtaagtaaatgctatcaaatatctctgcgatttgatgattataatcggattggtatagtcatggagaaaagcaatatcaaaaatgataattttgtagtaattaaatgatattaaatattttggaagttttattttaggaactaatcgtgtaggtaatgtggagagatttagggaacattgttaaatgttaaatatttaattcgaagatttgttttctaattatcaaaaacaaacattaaaatccagtggcagccattgtaaataagtcccaattacaggatttatttcacaaaatggctgcaaaaatatatatgtagataatttctaatatatttgtaggagaaaaaggaataaactaaattcaaaatcttaattattaattttgactatttatgaaacaaatacagtttatttattttatccactaaaatctatttggttataattttttgtaacaaaacaaaattaatttagtcctacatgttttggtacaaatcatacatggttctgaaacatttattaatcacttatactaattttcatacgatctaaaaaatatttgaaaatattttactcatcaattcaaaaaacacttcttacattatatggtatgcattgtatcatgttggaccaacttgacataaacatggcgaaacgcatatatttatacaaattgtataactaaaacattagattttattattaaacattttatatcatctgtccaactataagttaatgatatttatgaagtccaactctaaatattaaaacttccacaaagtacaaataacttgagaaccgtacaactgaataactgaacaactatggctaatgcgcagtcttttgtctgggcccgcattccacgtttattggtaataactcttgtgtgttcaaactatgtattttaaatttcaattcaaagaagagaatctttctcattaaattacatttctttctctctctttctttcttctcctttcttctctctttttcttctctccttctctgccgagttctcgaacaacagtgctgacgaacattcacgacgaacctccgccgacgccgaccaccgaatctttcgcatcagctgccggatccaagttctctgacatccgtttaagctccagctgtaagttttgggttggattgaaataaattagggttttgattttcccacttttgcatcgaattatggtttgcaatgaattagggttgccgtttatgatagtttgatatctagggttagatttttgattttcttaaagatctagtttggattttagggtttagattttggaatttatcccctttgattttcatgtgtttggctacagcaaataatgccgtttagttattggtcaccttcttcatcagagaaacgatccatcgatgatccttacaaatacgatggtgattttggtgttcccacaaactgtttttttggtaaacaactttacctttcagagcgtattattggcaatcaaaagaagacatttctcaaatgtccaatgagtggtcaagatgataattatcacgttcacgagcattgctttttcatcgacaaacaatttggcgagcacagggaattgattcaaaatgcattcaaatatggaggtgatagtaatcgtctccagattaaccaaatccgtgttgaaattgagtacctcaaagaccgcttggacaagaaagatgcagagatcgcaaggcttatggatgcacttggaaagaagtaaaatgggaattgactcttgatagtatttcctttttatgttacaacaagtatgttaaggtttgaaactatgttgaattcctatttctagagtcatttgtactttcttgacttgttttgaagtaatttgtacctcttttggaattgagttgtacctctctataaactacttgtacctcttgatatattcatttgtacttgttttgaagtcatttgtactatttctgacttgtaatttgcaccgcttttggaattgagttgtacctctctataaactacttggtccttctcatcctctctacggtataaggtggcttgtggaatctcgattgatttaccttacgcttctttttgccaccttcatccgcgtcttcaggatcctcatctctttttttcttgtcattcttcgtatcgttgcacttcccttttcccttcttccctttcttcttcgtttccttcttcgacgtctcatcatcgcctttatccactttcggtctcatcatgaacatgtccttcaaaagaaaagggaaccattcataaccaactaacatcatatattaaaaagatcaaaaattgacaaaaaaacataccttttggagagcctgcagcataaagaacgatggcagtattcagaccctccgtctcaacatcctcgggctcaacaccctcggtctcaacagcctcaggctcaacaccctttgtctcaaaaccctcagtcttaacacgatcagtctcaacaccatcagtctcaacacccacattcacgttcttctcattcttaccaccatctttcttctccttattcacatcggaattcaccttcttctcaaatggaggcacactctcaccggcttgtctcctttcaatggttaaaagcctttaattgtgttccgccaacatctccatcacttccttcaaagagctactgctgcccgaaacatccagaacatgtctcggaacattctctgagacatgttcttcctccatttgctcgccgcttcgagcccgcacatccgcttcaaacatgtccttccaccagattctcttcctctctttgatcaaacggtttctccagctatcgaaaaccggatcaacgaaacctatcccatcatcagcatcatcaccatctacaatgtgtctcaacaaatctttctcttcgttatccggttccaaaatgctagagataacctgtacaaactcaaacatcaaaataatcatattaaagctcatagtcacatgtaataagatataactaggacaactcttacctttacacttccaagctcctcgtttatctcttccaacgagaaccctttcatgacactactagagaatttgctcttacacattctcggacactcattctcgaaccttacagggtctctaaatttttgtcccaaatgtggaatagcctcaaatggcaaaatctacacattcaaattaaaagtcacataagtattagttttaagtctaataatgcatctcattatatataatactctaaattgttacctctaatggaaaaataaatccggagaaacaagtctgcagttttgctttccctttcatgttgttcattaccgacttaatcccttccatacaaccatcaaatgtgaaacgaccccatgggaatgtctcgcatgcatgcacatcatcaacaatcttcagcaagaaacgctaaatgttttcatcagcctttgacttcgcagcaatcaccttgcacaaaaaaagcaagatagccaacttctttctatccgccttcttcctttctccacaattcttcatttcatccaccttcttctcaacatcaatgatcttaatcccaaatacctttttaaagatctttttggcaaacttcaattctgcatccaagatcttaatactcggctgcaattccttcaggtactcatgacaatcaaaaccacataagagcgcatgctctttaatggagtacctagtaggcagtccaataaccacaaaccagcactcccgatccatctctgtttgtgttgtgcgaagcaaaagcatccccatgccttgagtcatgtggcttttctcctcaggcatgtggaatacattcctaaactgtgaatgcgccttgaaccatgacaaatcttctataaacccctccaaatacttcattatctgctgcacagtgtatctcgtccctaccttacacgtcttctggtattcgcttggaccaaagaacatcccttgtggctgcattggttgttcctcatcatcaagttcctgaaatttcatacacaaccataaaattaaaatttcgctgtactacttgtactagttatctcagaccaacattatcaactttgttcagaattcaattttctaatgcaaaccaatgtatgattaatcacgttaacgtataaatccatgcaccaatcacataagttgaaactatactattaagttgtcttaagtgttttctagttgtccttatacactacttttaattttcgaacacaattttcagaaattaatgttacctcagatttttcttcttccccttctttatcctcttcttcagggttttcttccatcccctgaggctgcatttgttcctcgttatcaatttcctgaaaattcatacacaaccataaaattaatatttcgttgtactacttgtaccagttatcttagaacaacattattaacttttctcagaattcaattttctaatgcaaaccaatgtatgattgatcacgttaacgtataaatccatgcaccaatcaaataaacctatactattaacttgtactaattgttttctagttgtccatatacactactttcaaacacaattttcagaaattaatgttacctcagatttttcttcttccccttcttttttcctcttcttcagggctttcttccatcacctgaggttgcattggttcctcatcattaattttctgaaaattcatacacaaccataaaattaatatttcgctgtactacttgtactagttatctcagaacaacattatcaactttttcagaagtcaattttctaatgcaaaccaatgtatgattgatcatgttaacgtatatccatgcaccaatcacacaaaactatactattaaattgtactaattattttatagttgtccctatacactatatcaatattcacataaaattttcagatatttgtatatacctcagatttttcttcttccggttcgttaaggttttccggatgctcttcgtcacagttttcgtcttccactttgttttcctctaccacttcttctcggttcacatccacttcacggatcgtgaccctctcatcttcactctcactcgaagtaggactgactaactttgcacgaaccataattcccttgcaaaccacacaacaatcaaagaaaccgttcaaatcaacacaacaaaaaccacatctaatatttcaaataaaaaaccgttcactttataaactaataagatacttacaagagtatagcggtaacggcggctaaacgacggcggtttggaacgacggcggtgacgaacatcggcggtttggaacgacggcagtgacaaacgtcggcggtttggaacagcagcggtaacgacttagcaaaatcatttggtgaagaagtagagatgaaaccggtgacggtgaactaatcggagaagagaaaacgacaaaattttccaagaatcgccggaataatcgccgtttaagttaatcggagaagagaaagcgacaatattgattttcgaaaaatattagttaggttaaaagttttgatttgggggaaaacctagtgacaatgggtcggatcctggagctatccttggatttgtggttggatcctgtagttttcctaacttaacaaggttatttcgtaatatccctctgcttctctatttaaaaaaaattcaaaacgaaaatcaattttgagattggcaaaatgaaaatttttcccgcagatgatggcagaatagataaaaatccgcatgtacacattaaaaccatttatttaagtaactttttttcaactaaaatctatatgacaaatatatccctataaaaaaatatgataaaaatcaggataattagcagataactgcattattgaaataatatcattaacaaatatagatggagtttgatgtatggatgaaatgatataacgtacaaaccaacttaatatgttaataatatatttgacgatataaacaaattctcagttattaaaccaatgattagatttcaaagactgatatatatgcaaaaaacattatatctactctattatttgagacgtatgttaagtgattctcagttaaaaaaaaatttaccttaaaatcatatgtttaaaatgttaatgtcatgaaaaaaattacctttaactgagaatcacttaacttccgttataatctttgccattcgattgaattgtttgtgtctgttcgatctctcgccttcactttaaaaacacgcggaaccttttgacccaggtttacaatttttgggtcatacgttataatcttggccattcgattgaagtgcttgtgtccgttcgatctctcgccttcacttaaaaaacaagcggatccttttgacccgggtttacaacttttgggttatacgttataatcttggccattcaattaaattgtttttatccgttcgatttcgcggcttcgcttaaaaaaacacgcggatcattttacccggtttgaaactaatgggtattcgcctctaatcttggccattgaattgaattgtttgtatccgttcgattacgtatttcccaaaaaaaaacacgcgcttctttttatcctgttttaaaaaaatgggattctccttttaatcctcgccgttgaatagatttatttcaagctgtccgattttgtagtttcatgcataaattcttccgactatatttcaggaaactaatcgtattaatttcattcaatatcttgcgtatcttcgttaacaattaagtatatatcacttctccataattatccatgaaacagtatttcgtgtggatcttctttgagaattatcttacattttctccataattatagcacatataatatttcgtttggatcttcttttggaattatcttacattttctccataattatagcacatctaatatttctttgcgatcttcttttggaattattttacatttctccataatcctatattcatacctacttttacggaaaatgataaatattttcctataatttactgatttttgatatggaataaacttgaattccaaggataatatcttttgcgcatatttttttgacctaaccactcattcttataaatatcggacgcctcatttcaatctactcactcagcttacactcacacagtttcattttcaatttcatttttttaaaaatgatgctcgacaatcctcttccattcactcccttgaaatcgctaaaaccttacaagaacgcttggcgtattcaggttaaattgcttcatgtttggaggcaatattctgtaaaggctggtgaatccatcgaaatgattttggttgatgaagctgtacgtattatagtttcaactttatattttcataaaccttatagtacaagcatcattttcctttactaattattatttaaattatttttgtcatatatggtgataagatgtatgctgctgtgagaagagagcacatcaagaagttttaaaggtgcttaaccgagggtgtttggaagatcattacgacaatcactctaaatcctacaagtggtcagtatcgtatttctgacttgaaatacaagattggttttgttttcaaaaccactgtctctccatgtgataccgtttctgatgctttgttcctctcacttgctaagtttgatgtgatcctctctagatccgctaactcaaatatcttgcacggttagattcaagttttcattttattttcgaacatacatgcattatctcttatatagtaattatattcatagatgtattctatttgtctatacatatgttatgggtcaggttgtcaatcggtctgaaatccaagatcttaacgctaacaacaagtccaccaaaaaaatcgatttcgatttgaaagatcagcagtacaaacaatctatattcatattcattcttatttaaagtttgttgtttttttactttttattaataaatttattctttccatttttagtgacactcgcttggcatgtacactttgggggaagtatgctgagattgttgaccaagcttgccaggagtcaaccgatggtattgttgtttgcttaatccgatttgcgaagatcaatctctacaacggtaattatattgttatgtgttactacatatctatactattttaaaaaacacgaccttaaatttttaaaacagatagtaggagtgtttccaattctttgatgtttcacaagtcttcgtggatcccacgttggctgagttgggtctttttaagcaaaggtaattgtatttatttgtcactaaatatattagcttctacataatattaagcaaagtatattttcttgatatatagcatactaactgatgggttaactttgggaagttctggatcttttcacaagaggctctatgcaccaagaactggcgatgacgatggtgattatcctaggcaaacaatcaaggaagtcctcacatcttatgatgtacgattcattaatttatgtggtggcaaacctttttattacattttcatattttaaacttagtttgtcaattcctctttatattcatttgaaagtgggtaagtgcaaaacagtttgttttaatccggcaattgatacaaattggccgtggtactatttttgttgtcgtgctcacaacaagaaggttgtcaaagaagaagttatcaaacttgaagatgtcaagctacctcaaaagccaagattttggtgtgaaatatgcaatggttttgcaaaatatgttgttgccaaattagtctttatgaaatccttatattgaatgtattatgatttataatttggtgtttagaagctaataatcctatttaacttttaggatttggttacatctccatattatggaccaaagtggtgaagccagatgcatgttattcgatagtcatgcaaaggaaattcttgccattactgcccatgatttgctttctaggtcatttgatgaggtttattgccttttgaaaaataaactctttcattaaaatgtctacgttcatgttataataatctatatttttctgtagatcgaagacccaactgttttgcctgatgttatcaatggtttgaaagggaagactttttagtttctattgtgcattcaaagggaaaacatatttggtggatatgattcattcactgttgcccgagtctacaccggtaacattgctgatgaaatcgttcaagaagactctgatgcatacgttgatccatcatccttaatttcgatcgaacaggtttgtcaaataacattaaacaattccaatcattaatatttatttcttagggttgtcttattaaactgtttatgtattttcatatagggttcccttatgctcactaatggtgttgacctttctgatgtggatttgtcatcaacctgtactccatcatcaaaacgaaaagaagatgatgttgatggaaatgatcaggcttccataagtaggaagaagtgttctaagatgaccatgtctgaggaagtctccggcgaatgatgctcaatgactactccagcttggatcgtttttttctttcttatttatttgcttaaagtgatgcaagttgttttatttttttaagatctaaactatctttattttattttattttatttcttgggaattaataaagttatttcaattatatgtcgttttgttaacaattttattacttaagttatactccctctgttccactaaattttatttgttatatgttcacacaaattaagaaaacaaatttaatgaaattttattattttgttatttaactataatattattaatatttctctcttctttttattatttaacaataaaatagtaatgattttgatgtagaacatcaattttttggaaacaataaaaaactcaaaacatcaattttccagaaaacaatattgttttttattacgaatccaatgattttatattatactgttaatcatactaaccacaagcaattttgctaattttgtattaaatattaaacaaaatcagaattagcatagattttgtacactaaataatcagtctaactaaacaaacatattcctattttttcatagattcttattataataatgaccattttttgtaacacgctaataaataaatgtcataattattgttcaaacctataagaaatcatattggttgtagatgattcctttcctttttacacatcaattatttcaacgaggagataattgatcaattatcccttaatttgtgttccaatttgcacaataatatagtagaaaaactaaattagaatatacattccgtatactgtgccataatagatttagattatagatattttggttaacaatatattttcatatatattgtttcctattttttagtatggctatgtttatcatattatatttcgtttctcatacatttagctttatactgaaaacaaataaacattttttgttattttttcatcgattacaatgaagaaaagaaaggataatgatgaaaatgatgtacatcaacaacaaaaaaaccagaaaaccaaaaaagaacaagacgtttgttcgatgaaaccaacttttcttcgcataatcaagcacttgggtcgaaaaatttagttcccatcggttctgtttttggtagagtgcttagtgacattaccaatgtcgatcttaccaaaagaagtcaaactcctcatactcccgtgtccttaccgctatacccggcaaataataatgggagttcctcacccattacgcctattaattcgttgaattcaactcttacaggtagtattctcatatatcatcatcatcgtttctttcgactttatattgaaccatatatttttgcacttcaaaggagacagagtaatttataataccccacacacaagagaaaatagagtcaatccatctaatagctcagaagttattaatccaacttttacaagagctgccgcaaaaactagaaaatcaggttagtaagttatatactattcgatatacaacattatcatataaatttaatcataaaaatagtattttatttatatgttattttttatttttatattctttaatgcaggaaatttatcgaaaacaaaaagtataccatcatcacttcgtaagaagaccaatgtcaaaacaaccaacaatggtgatattgttaacaaagcacctattagaagattgtctgctattaaaagaatggccagaaaaatatcaaacccatcaggttataattttttaatatttaatattagatacaatacatattagttaatattattatttttcttaatttggttgttgttttctcaggaggatcaccagacttcttaactcctaatcaaactaccccaaacgtaaacacattgtttggggtagattactctggaaatgtcttatcggatataacaaatatatctggagaatccatcgtctctaccattcgattaatgtccaataagaaggaaaaagtatcaaatgatcaaggttcgatttatatttaaaagtagctatttatgttatgttttagtatgtttgtctaatgtccaatagtcaaacagaaattatattgtttaataaatttttttgttgattgttaggagtcctccattcaactaaattacaatcaaaagagaatgttgcaagtattgtacgtgacaacatgctcaatgacgaagaaattgatcattctgaagcaatatattctgatagtggtataatgttaatcatacttttagaattaccacctttatataaaatgtataaaattgttttatttgtgctactttcatgttttcttctgtcttcagataggtcagaggaattcgatgatcatatatttgactgtagtagtcaagaagagtatgagtcagacaaagtttcaccgagcgatcaagttattggaccaaataatatgattgacatgaaagatttgttaagaaggaatttaaacaaggagtttactgcagcaacttcgaacaaagagcatggcagttcatccactagcggtaataattttaaaacatatattatatatattagaaacaatgaaaaacaacatgtattgatgtttgttcgattcagattatcatgacgaaggtgaagcgaatcacacatgtgtgcattgtggtgcaattttctggtacggtgaaagactaaatagaagaaggaagagtgctaattcggtttatacaggatgttgtatgcaaggtcagattgttctacctatgctaaaagaatcacctaaatatatgtggtggttgtttacaagcgaccatccagatgctaaaaattttagagcaaatgtcataccatacaacatgttgttttcattcacatctcttggtggcaaggtggatcgatcagttaaaaagggacgtggtccatctatgtttgctctacaaggagaaaactatcacttgatacgcgcgttgaaaccaaaacctggcgattatgcaaaatttcaacagctttatatgatggacactgataatgaagttgacaatctaattgaagttatgaggtaactgatagttttataaaagaactttatgaaaaaaaaatattttagaagcagctaatacattgtatttattaaatgtcttttgtaattatacaaaattgcagcaaaggtaataatagtgggatggaaggtggaaaacaaaagttcaagaaagaaacagtttcagctttgctaaagatgttggacaagataaaccctcatgttgcaaattttaggattgcccgtgatagattcaacatagtgaaagaagaggcaaattttcatatgaggattatatctaaccgcgagacagatgacagagtgtataatcttccatctgtagctgaagttgttgcattgatacctggagatttcgacgacaatctagataaaagagatatagttctacagatgaagtctggaaagttaaggagaatacatgaatgtcacgtttcatatctagctctccagtatccattgttatttccaaaaggagaggatgggtataagcttggaataaaaaaaactcctaccaaaacttcaaaaggaaagaagaagcaggaagatgttagtatgaggcagtggtttgactaccgtttacaagagagaaaagatgagaagcacatcctcctttgctcaaaacgtttacttcaacaattcatagttgacgcttttacaatgatagagtctaatcggctaagatttattaaaaaaaatcagacgaagctgcgcagtaccaacaagcaggcagttcaagatgcttctgatgctgggggtaatgatctttctaataaaggaaaaagtgttattattcctccatctttcagcggtggtccagcttatatgcagcagaactacttagatgcaatgggtacctgtaaacatttcggctttcccgacctatttataaccttcacatgtaatcctaagtggccagagatcacaagatttgtaaaagagcggaagttgaatgctgaggacaggccggatatcatttgtaggatttataaaatgaaactcgacaacttgatggatgatataacaaagaatcatatctttggcaaaaccaaatcaggtactacattatttcatatttttatacatatatttcatgaattttaacttacaagtgacattaactcataattattatgttgaaacagttatgtatacagtagaatttcaaaaaagaggtcttccacatgctcacataattgtttggatggatcctagatacaagtttcctacggctgatcatgttgacaagattatttttgccgaaattccagataaagaaaaagatccagagctatatcaagctgtctcagaatgtatgattcatggaccatgccgattggttaatcctaattcgccatgcatggaaaatggtaaatgttccaagtattatccaaagaaccatgttgaggacacgtctcttgacaatgaaggttatccaaatataggcgcaaagatactggtcgtttcatcgagaagaataagtatccatgtgacaaccagtatgttgttccatataacgatgtcctattacggaaatacagggctcacatcaatgtagagtggtttaaccaatccgtctctcttaaatacttattcaagtatgttaacaagggacctgatcgtgtaaccgtctctatagagcctcatcgaaaagaagttgtctccgagcaaaacaatgtaggagaaacaaataatgatatcaaaaccgtcgagggtgttgttcataaaacatacagagaattgtaacacccgtgaaccggaaaatcggttagggtttgtttttaaatcatccggtttaattggttgggttaattggaaatcctaaagtgtgcctataaaagaaggaaactcgaaattagggctttagttagcaacttttcgttttataaaggagaaaaagagagaaaaggaaaaggagcagaatcgttagggtttgggaaaaatcagtttggtcatatcaaatcatggtaaaaggtaacgaaatttagtagaattattcccaagtcgtttatcgttattctccagtttacagaactggatttggattaaaacaatttgagttattcgcagtttagtgagacacgttttctcagacgcgaattaggaccagcggagattgaaattgcgatcgtggtatcggttgttttccgatcgggacaatattttgtgggaagcttcgtgacgtctagggctaacgtttcactggagcgatttaatagttaacggttagtttgtattttaggttttcgtctttgaggttgattgtttctgtttttcatgtacagtttgcttcaaggttgcttttggttgtgacttgttgtaggacgtttctggactctttcagacgctaggagagtctctcccgggtttaattgttattagaattaatttgttaaggtgagtgtgtgaccatgagcttatctgagcgattgggttgtgtaatttgttttgtgtgatgataagtaggtgcggtgaatgtgttttgggtgaattgttcaatgactgatttatttgtgttgtatttgtgattatacccttttatttgcttgtgtgtatagctcgtagatgggaggatcgcctcactaagtatttatgttaatacttacgcatctcattgtgttgttgatgaaggtaaagataaagtgtgatcgtggaatcatggcaatgaagagaggatgatctaggaactcgtttgttttattttttgtgtttttggttattggaacccggttaggattgttagttattcttggttttgttggttgaattatttatttattcataaaatagtatttttaacttgcggtttaattgttattttattggttggtttaattagatatttatgggaatatttaattatattttttttaaaaatgggtcgggttgtttcaatttggtatcagagggatcacggttctaggatgtgtagaaaacttaattgatgaattattttcctgatgattgatgtgggatgagctagggtgttagcatattgaggattgattatggagtgtttagtcaattgtgtgttgtcggagtcctagcatcatcttctccgagccttaaatgagattccattgtaagttgtttgtgatatatttgttgttctagtttcttagccttttgttcttgagcagcgcagatggttagtggagctggagttcgtggtcgtggtcgtggtcgtggttgtggtcgtggtcgtggtcgtggtcgtggttgtggtcgtggtcgtggtcgtggtagaggacgagtcctcgagggtactggcgagagtgacgaccacagtgccacggttgagcagagtgtggattcgtagcctgagtttgtggagctcggggttggggacggtctttgtgccgatatagctggtgcagccggagtgggggctggtggagctggtgtcggtgccggtgtgcatgccggttgtgttgagggcccaggagtgatgggtgccgcagccagaggagcccaggttccagaggttagtttggcgggcctgctgaggcagttgttggagcggttaccaggtgtggtaccagtgcagactccagttgcgccacgagtggcggaggtgcagcagagggctgcggttgctgaggaggttccatcttatttgaggattcggttatgtttaaaagagttgcaaaaaatattgaaacggcatggagcagatctttggaggtataagatgttgccgcagcttgaacctggcgatgaaccttcctttaatcagttgatactcgatgagcgctactagaatcgtgaaacattgaaaaaaaaacatgatgattggttaaagatgctatctagggaacaaaagaaggtatatgatgaaattatggatgctgtccttaatgacaaaggaggtgtttttttcttatatggttttggaggagcagggaaaacctttttgtggaaggttctatccacaacgataagatgtaaaggagatatttgtttaaacgttgcgtcaagtggcattgcatctctgttattagaaggtggccgaactgcacattctaggtttggtattcctctaactcctcatgagacctcaacatgcaacatggagcgtggtagtgatcttgctcaattagtaacagcagctaagttgattatttgggatgaagctcctctgatgagtaagtactgttttgagtcattagataaaagtttaaaagatattctatcgactccagaagacatgccgtttggtggaaaagtaattcttttcggaggtgattttaggcaaatctttcctgtcatccctgcaaccggtagggaactgatcttcaaatcgtcactcaattcgtcttatctttggcagcattgcaaagttttgaagttgaccaagaacatgaggcttctccaagatatagacataaatgaggcacgtgagattgaggatttttcgaaatggatccttgcagtcagcgaggggaaactaaatgagcctaacgacggagtaactaagatacaaataccagatgatattcttatacttgaagaagacgaccctatagaatcgatcattaaagcagtctatggtacatcctttgctgaagagagagatccaaagtttttccaagacagagctattttgtgtccaaccaatgatgatgttaactcaattaacgatcatatgctttccaaactaacatgttagtgaattaactttgaatattactcaaaattatacatataatagagtagatgacaatgaactactactctttgcaggtgaagaaaagatttatcgaagttctgattctattgatccttctgacacacgtgcagataaaaaccccgtatatacgcctgattttctcaataaaatcaagatttctggattacctaaccatttacttcagttaaaagttggttgcccagttatgttgttgcgtaatcttgatcttggttgttaacattaggtgggtcttgtatatcaactggtctgttctgttgatccatagcaactggtctttgttgatcacagtctgcttttggtttttttgcttgtaactcacgagctattctttctattttgtctttgaaaggtagtatgtgtgcagaacctttggaccgagtttgcatgcacaaatattagtacctgtaccacaaaaacaaacagacgaaaagatgagttagtaacttgagtaatgtaaaagaacttgatcttaactttttctgatatcttgaatgtaacaatgcaacaatgaattggcaacggcgccaaattgataactaggtttttacgcctagttatatgctgaagtgtggtttagttcaattcccttaaacactaacatgtcgatgcagttatagggggtgtcaattgtggatgtcggattcacacactcaaatatttatttgtatagtgagacggattattcttgaggacaaaaataagtgtaaagaactattgattatggagaaagctatgagttttgtaagaaaatatgtatactaagtttgcaaacaaatgcgtgtgtctcttatggcccttggccctattatttatacctaagaattacaattaattctcatttacacacaattattctatcttaaatgtatccgtttcgatcttcgaattcattgttcaaacgttcgaatttgaattgacttcgagcttcctgggctttccccttccagcccaaaggccctttaatctaaccacctttaatcccgacttctcattcacctcgcggtatacggactgacctttcctcttcccaaggcactcgttcggtacttggccgctcttgaaattgctctacctcaattaacctccaaccttctccaatctattctagggattatcaccgtcgcggtggtggctgggtacataattggagttcccgaattgaacgagcttcttagcgtaagaagttcgtcgaagaaagttggttacttctcggcatacctaaatgccaacagaaacctcatttcccatctcccgaacaaaaacgagaactcgcaccatccttagttcttaataaagaaaaccattgcttcaattgagagcctttccgaagtgcttccatcaaaatggtccacgaaacctggtagaaattagggcagaaacatatttgtcttctgttcgtttacacgttcttttcctaacccgaatttgtttttgtttttgtgcagctttcattgctgcgactcttccgactgaagaataaatcgagttcttcaaagtggtcatcgaaggtgaaaccctttggaatttgtttaccctcgaccgattttttgaagctatatggaatctcaaaatgagtcctcctggacaactccatcatcttccaccgcttcctcccaaaccacacgggacttcagcccgtgatggactgagcagcaagccaatcgctgacttgatttgcaaaaagagagagagaccagctcgcaacagctcttctccttggagggaaaagtcaagggctcgaactgatcgctctcctcgatcatctcctccatcttgatcgatgggttctcctcctcttcctgtatcacatctccttctcttcgacctagtggtgagaagactgatcaaagtgctactcctcgacaagaagatgctgagccccgagatactcatccctagtcgaaggtcgttctcgttcctcaaacaaaatcgcttataggttcaaacgatggttttatttccctcgctttcggtataattcgaacttttagtaacacatctttcactccctattagcgatggagaaagagggcaacgtctttcggtgcttcaaaacctggaaagacacgatcctgcccaccttcgacaaatggcgacctacaattcgcgagcgatttttactccatgctcatcattcatctcgggttagtctcgttttcgcctattccgatatcgcttatttatacgcatgctaatttacttttttggatataaaactcttgcttaggcgaacaacgagcttaacgacatgatcgagcactatgaaggattactgctcagtatagaacaggatattgatgcttggaaaggcaagttttcttccctcgaggccgatctccgctcctcctctgactttaaacagaaactagaggatcgagtcgaccatctatcttctaagctcatgagatcgaatggcgagttgcatgatcagtaccaaagatacgacaagctctaggatgaactctcgactgctcgagacaggctctctgaatctaaatcggccacttatgatttgaacaatcagttcaccgaacttaaggctaagtacaaagcaattgctaagctttgagatgctgaattagccaagtctacgtcaaaagccagaagagaggtgaaaggtcgcgggatggaattgattcaaggggctatcctcttcattcaaactgagaaggccagatcggagctggagtcagacattaaggagcacgaaagtaacctgcttctgttggaccaaacccttgaggaagatttctctgaggaacaagaaaggtccaaactggaggctgttttagctgagaaaagaggccaccttgcttctcttcccaccttgtcctttaaccctcaacacttcgaggatttttacatcgaatcactgcctttgagtgaatcaggcttagattgggctggtaaacttttacatctgaatccttataatctatagttgttgtatttgtgttttttgctgacttgaaacgttcgcttcaggctctagtgaactggtcgatactactgtccggtcgtgaacagtgagacagtgatcatcccggatgttgaacatgaagccggaactgagccgggaaactcttctaagctactctctgccagtgaaccaaccaaaactgagtcagctgttgttgaaccaaccgaagccgatccggctatcgttgaccccgagaagattacggattcctagtggttgtatctactttaattgggggctttcccaaacacttccaaaactagaaattaaatttggataaatatgttgctgcctaaggaggctttatttttgaacaagtatttgcctgaggaggcttttaaaccttttaaaactatgattttgcaatagtccgtctttatatatcttttggccatgtggctaagtttcgagatttttaggttgatcatacctttctcttaaaacgcgagaaccgagctcggttttgaacgcgaattccccaactcgggtttaatcaattcagcttatttactaggcttgggccttaactgttttctttatatttaatgggctttttgtctttaatgcgacggttgccatctcctttctcgagaaacaagaaaaagcttcacgcctttgaggtaataattgctttttcttgattcccaaaaatggtttaaaccattcggacacgccacagttattaaacttgtggttccaaggaaaaaccctaaccctctataaatagaggtcccatctgccaccaaattctccaagtatgatttcagaaatttacttgataaacaatacacaaatggagaacgaagcagcctccactgtttctcttcttcaccccggcagccctctgttcctctccggcgacggtcaccgtgatatcaagggagcttcacacccttaactctcttcccggggattggatcaaactcggaatctccgagtttgctcgcataccaaactgtatgatgcctattcttgacctcgccggcgaaggagtccaagtgttttgcaagacaaaaatagtttcttacttcgaagggcacgcatgttgggacttcgtcttctttacttactgctttgaataaacgtagttttgtttcttgtttttgtatgttcgcacatccgaacttctttgccttgttcgttcatacagtcgaactccctttttcaaatgaataaaacaaatttattagtagttgaactcgtttccgagctgcctacatacccatttcgggataaagccacaccgtagttcgtgtacataacaaaaaacgcatgttacttaaacataaaacttctttaaattcaccatattccaaggacgtttgactggcctgtcttctagatcttttaagccaaaaacaccattccgaaccacttcggtaacgatgtaaggtccttcccaatttatgccgagtttgcctgctccttcttctttcttattgtcaaaaacacgctttagaacataatctcccatgaagaaaggtctactattgatcttggaattgtaatatcgagctgctgcctgttggtaattctgaattcggattaaagcttgatctcgcctctcgttgatggtatctaacgaatcgtcgagcattgctgaattttcatcttcatttaaaggagcctccgttcggcgtagtccaggcacgttgagtttggctggaacgactgcctccatcccgtataccaatgagaatggggtttctccggtagaacgtctagaagttgtgcgatacgcccataaaacaggttgaagctcgtcgtaccatcctcctttcaaatgatttagacgctttttaagattgaagctt

SEQ ID NO: 1335 - DNA, 76911 bp, Arabidopsis thaliana
  modified_base (946)..(1005): a, c, t, g, unknown or other
  modified_base (1421)..(1421): a, c, t, g, unknown or other
  modified_base (2640)..(2699): a, c, t, g, unknown or other
  modified_base (4539)..(4539): a, c, t, g, unknown or other
  modified_base (4583)..(4642): a, c, t, g, unknown or other
  modified_base (4675)..(4675): a, c, t, g, unknown or other
  modified_base (6144)..(6203): a, c, t, g, unknown or other
  modified_base (7871)..(7930): a, c, t, g, unknown or other
  modified_base (9528)..(9587): a, c, t, g, unknown or other
  modified_base (10372)..(10372): a, c, t, g, unknown or other
  modified_base (41649)..(41708): a, c, t, g, unknown or other
  modified_base (45997)..(46056): a, c, t, g, unknown or other
  modified_base (51917)..(51976): a, c, t, g, unknown or other
  modified_base (52832)..(52832): a, c, t, g, unknown or other
  modified_base (56079)..(56138): a, c, t, g, unknown or other
  modified_base (57436)..(57495): a, c, t, g, unknown or other
  modified_base (59559)..(59618): a, c, t, g, unknown or other
  modified_base (59639)..(59639): a, c, t, g, unknown or other
  modified_base (60768)..(60827): a, c, t, g, unknown or other
  modified_base (73160)..(73219): a, c, t, g, unknown or other
  modified_base (75089)..(75089): a, c, t, g, unknown or other
tttgggcaatgaccaagcatccagttatggtgagtgagctcaaaccccaaaatatttactttttctacttaagttagtctcagtgagtggatgacaataactttttctctcttatgtttgcaagcttagaatttgcaattttacattctgacttttttctttagatgtcccattctatatatcttactctctcattcctgtaatactttcttcgtatggccatttactttcacgtaataatgccttgcccaccttacactttttgcatgtgaaattgagtaattggcaccaaataatcactggctcatgttaggtcttgaacatcataatgcctaataagaacgattatgcataaaattgataaagcttgtccctttaaattttttgaggagatttacttataacaacattctctatgtggcttcttttcttggctccccccttttgcaagtgctaacaagcctttcttgccatgccaatatctattcttgtgaacttttaagaagaaagtaatgatggtatggagaatgggtcaaatgagaactaaaagcgttctttatataaatatactcttgcatcttgtttaaatatgtcgtatctaacttgtggagtgtttagtatctttttgaggttatgtattctaatcaattatattatgtttcttatttctcttaatcgtgtagcttagatcattagctcttcctttcacggtagtggaatggacgcttccagctgttccgcgcccaggtcaaggcggtccgtccaaacaatcgctctcagcatccgaaggagtaactgcttcaggagactcttgtgagatgtttatgacaattcaaactgtgttatcctgaatatacccaagtctttgattcatttttttctaaagggcggtaattgacatattttcagcatcagtgggcttagatggatcgcaagaagaaactgnnnnnnnnnnnnnnnnnnnnnnnnnnnnnnnnnnnnnnnnnnnnnnnnnnnnnnnnnnnnagaatgggaagatggtattggtgatttagtaggtcaagaatttcgtgctaaagaggcagtatgggatttgattaatagagcttcgaaagaggaagtgtttggtgtgaaaactattaaatctgacccgggccgtcttatgttagaatgcagtcaaacatcattgggttgtgattggtatttaagagttaccaaaacttcgagcacggatttttggtttgtgaagaaacacacacaaatacataaatgctcttgatgtccggaagcaactagatatgaaaaacaaaaagccacaccgcgattagtagcagatgtgttgcatgaggactatccgggtcctcttaatactctgaaaccttaacaaaaaatgagtattgttaaaggaagacatggtttggattgttcatactccacagctntaagaggaaaaaaaaaacatgttagtgatgtgcgtgggagccctgaaactagctacaagttattgtttgcttatctgcacattttaaggtctgtgaatcatgggacaataacggaagtggaattggatgcagatgacaggtttaagttcctattcatcgttttgggagcaagcattgaagggtttaaggcaatgaggaaagttatagtgatcgatgcaacttttctgaaaaccatatatggagggatgttagttattgcaacatctcaggatcctaatcatcttcattaccccattgcgtttggtgtaattgatagcgagaatcatgctagttggaactggtttttcagaaaattgatttccattataccggatgacccgaaattggttttcataagcgacagacatggaagcatcatcaagggagtcgcggatgtgttcccgaaggcatcacatggacattgtgtatggcatttgtctcaaaacattaagaaaatgctggcaggtgacaaagaagcaggtatggccaaatttagggaattagctcatatttatactgcgactaagttcaacactaggtatgcagaatttaggagaaagcatcctaatgtaaccacctatctggatcgggcaattgggattgagaaatgggctaggtgctatttttagggagacaagtacaacatagatactagcaactccgcagagtcaatgaacgttgtgttttcagaagtaaggaagtaccatctgttaccgatgatcgatgcgattttgaagaagttttctgagtggttcaacacacatcgcaaagattccgcgtctacatcgaacacaaggcaagtggtgcatgttgtggagaatatattacatacgcgctgtccaattggtgcaaagctaaatgcaactgaactaaacagtttccgacaagaatacaacgtaattggaattgatgttgttcttatttggtggacttggaaaggaatacttgttcttgcagagaatttgatatagacaagtacccgtgcgtccatgctatagctgcaaccataaagcgatctagatggattagaatagccgttcaatcttgaatgtaagtatctatggtctttgctcgaagtattacttgatcgagacgtgggcattggcatattacagaacaatttatgtggtgccgcatcaggctcactggttctttcctcctgattatgtggagaaggtcnnnnnnnnnnnnnnnnnnnnnnnnnnnnnnnnnnnnnnnnnnnnnnnnnnnnnnnnnnnnaggaataaatgtttggatttatcaactcaagttagattttggtgggtccctatgtttaaaatatttttttgtaatggtagggttttgaggattttcatctatatttaatcatttacttgtgtgaaaaatcgaaaattcgagaaaaccctctgctgaagaagacggcggcgattctttagcggcgtcaagtattttcgggcgacgagatttttccggcaaacgacgtcatttcttcacaaggttagatcttttctattaaagatatagggtttatgtggtttattttagtcaagatctagggtttataatagtcaagatctagggtttattttagtcaagatctagggtttagtcaagtattagatagttttatattttgtatttgacagacatgcctatctcttttaacggaagctccgactcctctcctagtgagaaatctgacggtttcgactactacaatgcaatacgggacaggaattggggcattctgactaagtgctactgtggaaaagacgttgaaaagggtaatgtggttggtggcaatctccacgggaaaacaagattccgaagtccactaaatctgaccgaggtggatggagaacacttgcataagtggtgggaggaagccattgaagaggagttttcgaagtactgtagccggaaggacaagcgagaagaaggacctcctgcttggcaagttccgatgttcgagccatccacgagaagatacgcattatgattgaccggatcactgagcttgagacccaattattcaaggaactacgatcaatgaggagtgctattagtatcctccgagctagaggagggcgtggttctcgttgaaccatgtatgaaccatgtgaaccacgttgttttcattatgcaagtatttacttttgaaccatgtgaaccactttgttttaattatgcaagtgtatttatgtatgaaccttgtgaaccactttgttttaaatatgcaagtatttatgatttattacgatgtgcaaccaaaatatacagttgaacagggtaatgtgacgaaagatgaaccatttgaactaaactgtttcgaaccagatgaactatctctagttcagtcgaaccaatgaaataacattacaaagtcacaaatcaaaagtattataaaatcagggaataataaggtcacaaatccgacattacaaagtcctgtttctttttattaccaaacattacgtaaacaatggcaatggtgatcaagcaaagccacacaaaacacattgttaagcaaactttccacttgcggaattcttttttgcccaattctgcttcttctttcagttcttgtaacatcacatgtagctctttcgcctcagatttgattttgttaagctcatttgcaatgactccaaatttttctaaagcatcttcgacctcttcttgcacagcatcctcaacccacttaaacaaatgaccctattgcacaacccacgaaccaaatccgacaagtttagcaactacataaatacacattataaccaccaactctacttacatctcttttgtttgtccacattttcggatctcttttggttttacaccggaaaaaggtcttccgggattgtcttgactcttggatgtgaagatcgtcacatctgctccacacgcacaattcaccggaaaaccacgggctccatcaacaccagatgacactgacactgaacttgaactcatcggagtagttagagaaggcactcacaaaaccctaaatcaattttgcaattcggaattggaattcgaatttttcgatttagggattgaaatcgtttttgccttttcgaattttgaattatgaatnttgcataaagcagactctatattttgaaatttattggattttgnnnnnnnnnnnnnnnnnnnnnnnnnnnnnnnnnnnnnnnnnnnnnnnnnnnnnnnnnnnntgtctctttattacctgcacacattttaaacanaacttaagtcatatattcacatttttatacccaattgacattaattattatacttactattttctgcaacctctggagaatgttctctgtagatcactacatcccgttgttgcatcctgccggtggtcacaaaaccatcgggcgaagcaaataacacgtcatcgtctgttgaatgcccatgttgacttgcctcctctgtttgcttcccatgttccctttccttcagatctgccacaaataactcaatagactgcactctcacatcaatgacatcaatcttatcttttgtttcataaaagcctttggtcatcatctgcgtcagtgaggttatagatgccacaactgtatctaaatcagggaatcaaggagggacagcagtcagggggacatctttctcggggacctcattctcaatctcatggacttcctcatccgaaatatcatttacaatacatctagaagaaatgtccatctcacacattcctttccaccatatcctcttcttctctactaatactcgctctctccaactgtcaataacaatatctattggaccgcagtcatcatcaacatcattgtttaagagatttttcaacaaatatttctcatgataggcaggtaccaaaatgcgtggaaaatcctgttaaaagaaattcatttagcaatcaatcaatctcatgagagactagacacacaatgaagtaaatacagaaactctaaccttactattcccaagctctttatatataacttccaacgggacacctttcgtgctacattctttaaacttatgcttgcacatccttggacagtcattcaaagcggagcgcaagggactcttaaatttcagtccaagctgtggaatagcctcataagccagaatctacaaataacaaaacaatgttaatatcataaaacatgtacattacaccttattctcatataatgatcataaattacttatctcaagaggcacaatgaatccactaaagcaaggttgagcttttggtttcacgaaaccattcatgttcttcatcattttccttattcctgccatacattccaaaaaggtgtaacggccccacggaaacgtctcgcacgcattcaaattgccaataatccttaacagaaactcttcaatgtttccatcattctttgcaccagcttttactaccttgcccaagaattacaacagcactaacttcaacctatctgaaccatgcttcatcttcgagcacttagcaagaacatctacaacctttatcccagattcttttttaaatatcctcttcacaaagttaatattccccattggatttagttcttttgggtaattgtggcaatcaaacccacttaacaacgcatgctctttaatggaatacctaataggtactccatttaccacaaaccaagcctcctcgagcaaatctgtcttcactgtgcgcagcataagcacccacatgccttgnnnnnnnnnnnnnnnnnnnnnnnnnnnnnnnnnnnnnnnnnnnnnnnnnnnnnnnnnnnncaataacataaattaaatgaaactaaaagaagaaatggcaataacaggcaggtgaataacaaagcagaaataataacaggcagtcaaatggataaacgattcctaaggatggggtaatcgaatagtgtgatctccttaatctattcaggcggttgacaaaacttcacagaagctatccctagacaacaagttcaacaacagattaattcactcccgtgatagaaatcttcaagcaaagctagacactgacctaattcccattagcgatctctaactaagcaggcaatatcgaatcaacttattaaagccaataccttctctacaagccaatcccttggggtagaggcgaatatctctggaattaatagatctgacattctatcgaacaccttttgagcgcgggaatgtctggattcatattccacattagccagtgaaacaagcaataagcgcaactaatctagaagggattctagtattctaaactcaaccacctaaaacgaccaagtaaaccacaactactctatctcatcatcagaaatacggttcactactgagacataatcaaagacaatagcaaagcaacgattgaaaacatgataactacttgaaagtgaatatcaaatacttgaaagtgaatagaaagtcgcaggagaaacactgcggcaagaaaagttgtatgaataacggatgccctggggaaaacccttaaaggaagtttatataagcaaaactatgaatcaaataaggaaactagatagatagcgaatcttcacgtcaggaccatgcgatcaagtatgtcattggcatctgatgggctgaaatgggcttccctgtgattgagtatgtcattgatcaaactgggattcagggactccgccttgcgatcgagtggatgtcatgaggttgtgatcgagtggttgctttagcttctcttctcttctttgttctcagtttgtctggttgaatgcagaacgagcagataggcctccttgtgatcgagtggtgtaagatgggtgattcctccggctttgcgattgagtaaaactgattgttagcttctccggggttgcgatagagtggtttgccttggcagggctccgaggctgcaatagagtactttggctgaaggcgtcattgtgaaaccaaagtacctgaaaaacaaccaaatatacaatgcacatgcaatcctaatgcgaaaccatcctaagtatgcaaaacacactaaaacgactcctaatgagatgaaatgtggatgaaacaatgacaaactggtgaagaatgaatgcctaaatcatgcaaattatagacatatcagtctccgtgtctctcggctcatgatctaccacagggtcagcctgcttgggccggacatgtcttgcttgtaggtccttgtgggtgatgtttcctagagcttcgcggctagaaatttagctgctaattttgctcccaccctttgacacttagaagtataatgcccaaaggtcttgtggagttaccaatacctttgcttgttgtttgacggttggtctcttttcggcctgtatctacttggtaatcgtgtgctccagagaagttacgtctctcatgatgtacgaatggtcccctccccatgcccctcaatgggtcaggaagtttgtgtgtactttctcggctcgtgcttccctnnnnnnnnnnnnnnnnnnnnnnnnnnnnnnnnnnnnnnnnnnnnnnnnnnnnnnnnnnnntctcatcctgaatgggtcgaacttgttattcacccgatctaggacatatcgacggattgcgggtcgggtcgaatagacgtgatccgacatccacaatttaccccgcaagtctcaaaaatgaattcaattcggggacttagatcaatttcaacatactatcttgaagtaatgccgtaattttcaggatcctcaacaggcgcgtatatcctccgaagtagggaaaggaaacaaaatatcgcgattttcgagattattcttggaaagagtgtgacgctttgtgatcctaggattttcctttttctcgctcttctgacgctttatatatcgaggttaaactcttggcttctgatatatctctgttttcactgattttatctatgttttaggtataggatttcgagtctttatattatttcccgagtcgttttagtgtcttttcaggtattctatgcagtgggacaacaatggagatgagaagacattctggagcaaaagctaaggaaaggaagccaaggacgattttggattcaggaatcagcgaggactgtcgatcgacacactcttggtgtcgatcgacaccagtttcggcccagcaaagtccaagacgctttcaagtttagagaagaggaatttgccccagaagacttccgtatttgcattattagtccttggacgttttatagggtttatatacattgtttagacctatgttttcatcatccagttttctatcaagttcttataaagctttttgcaaaccctgttactgagagacataagctattcatcgattcttttcagagattgattcagatcttaatacagtgaagagatcccttctttcccttaatctatttgttgtgtttatgttttcatactcaatatgttgtttacttcaatcaatatgtctgagtaatctgcttgttaggaagagggtttctcattagggattcatatggtttagtagattgcccccttgctaggttatctgtagaattcttcatctttaattatgcttaatgctagatctagagtaattaactagatcttgaatccagacaatagatatgcccgccataggtatttgtagttggatctattatttgatgagcctggtttataggtgtgtaataagaatcggcctatctactaaggtgaacaatcgaactcgttaagaatgtatatttaggttgataatttctcggcttctccgattattcttagctatagatatagggagttttgcggaacgccaccggttattccataattagagtttgagttcaagaatggtttgataacaacctagctttcattagatctactaaccaatagtttcctgagaataccctgttcctagctctttatttaatcgtttacatcacaatcaacttgctgtctttttattttgttttcttactattttaatcatcacctgctagcttaatctcgacattcaactcactgtttgaacaaagaactccgtgaattcgatccttaaatactgcaattgatctcttatttgagagagtagttctaggtaatttgaaccttatcagcttcctaatatcgcttataacttgctggagctcattcannnnnnnnnnnnnnnnnnnnnnnnnnnnnnnnnnnnnnnnnnnnnnnnnnnnnnnnnnnntcaaggttttgctggtaaaagaacaagtgggcttggagctcccttaatatccttcttggaaattcccattctcacgagtgtttcgagaaaaatcagatcaaccgaactcctggtgtcaatgagtatcctttagacttcacagttcgcaatgtcaagagtaactacgagggcatcatcatgaggcttatcaaggttgctggtttcttcctcgggccagttagcacggctcgttttaggcttttttccatcggagtaacgacttttctcttgtgttgcttgattgcattgatagaatcatcccataattaccttgaccattttctttagccctttagtagtcacgggagttgagtcgctcttttatttcttgttcgggggtaacgtctctttggactctactgcctcagattgaggctgagctagctcgatctttgagacgtccactttaggaatttctcttgaagcatactttgcagctagtaactgtaacactcctaccccgtcctaggcctaggatagaatgagagcgtcacgtgcacgcccgtagtcagccaacccatattcccagaacaaatccgttcgcccgagccgtccgaccgcgagtcccgtttctcacgaacatggcctaaggctttgcaacccgtaccgcggacgcgagttgtgatagtctagacaagactaaatatatcattgggagatatggggttttaataaaatcagagctttataaaaatatcgagtcttacatactatacgcaaaactatatattacaaaggcaaagcanatctacaccggttagtctaacatccttcgccccctaaggtcttcctactaaaggttgcctgtaaaaaaaaagtagtgtctgagtaatctagtattactcaataaatctgggatctctaaaaataaaacccaacccaacccccaaacaaaaagcaaacaggcaatcaaatgcaatgcaactagcaactatatgcagcgaaactactatgcctaaacatgctcctaactacttaagtaaggccttttacgaacacatgataacccgaggcaatggcctgcacactcctagacacaaagtctaaagaagattgccattccttatactacatcgtcatgaagcatccggtcggtattgaaccagcccctgccttcgtatgccataatggaacggagttacacgcgatgcacaacatacggatgggatcctcatgatttggctaatcctagttatctaacaatcaaagtataatagtcgggcagcataacgtcaataccaacatcctgccggcataaaagttatacgaccacgactttatactattaagcaaatataaaccaaggggtttgaacctcacatggtttataaatcatatatatgaaagttggccaactctctccatatgattgacacatcatcactttaccatttgccatgtgtctattaaataattaatgtaagctcttcaacttctaatttataggttaatgatatatttattattttattttacatatttaattgtattattactaaatttattttaatattacatgatttttcaataaaaccattttaatagttttcttatacccgaagtttgtttttttcttgtaatccaaactcaaagtatgagtgtataatagttgtggattacttaatgatttgagtaagttattctcttaaattgatatttatattctcttaaattgatatttatataataaaccactgagtgtgaagaatacgtaaagagctccatcatcaaattcttaggtttttagaatccaacactaccctctgttaaattggtttaagatcaatgttgtttctgaattatgtgtatgatgcattgttgagaatgttgttagaattttttttaattaaaattgaatcatcgaatacgttgttatattgcataaacgaatgcttttttcagttgatactttttatttattcttatttttttgtcaaacaagccttgtatttcattcaatgcatctcctaaaggtaaagtttacaagatcttcaagcatacaaagggttacaaaaaactccgaataacgaaagctaacaataaggaaaaaaagataggtttgataagccaatgaggaacggagatgataataggttttttaagatcaattaaacctaaagcactaattcatatccaaggagacgggatcataatgccattattcatcaaacttttactttcaagaatagtacccatgatgtagctaaatatatcaagtatgaaatcaataataaaatgaatcggagatgaaaacttgaagaaactacggtaatcactgctccttggagacgggatcatcatgccgatcttcttcaaggaattagcaacatgaatagtacacctatagattctaatggcaaggttctcaaaggatttttgtaccaacatagcagcaatgttcgattatgattcaattgatgtccattagcaattggtatcatgaatcgacgcaaataaaagctaagagaagacaaaaaggagtttgggtcaaacctatgattttgcggagaccgtttggaggggctgggccaatccattagtggagatgggcaattgttttgggggatgggcctaaatttggttaatgggctcgaagaacagtggcccattaagaggaaccctaacaaggcaacagtgtggcagaggatggtgatggtgcggcggatctgaggcggcagataagaactccgataaacgctaaatgatgctggtgggaataaggtcaacgtagatgagatactgataagtgtgtattttgcatgttttgagcatccatttgtcatcattttagcatcatatcatcactgttttatatcatttctcatcatttatcatcactttacatgtttaggataggtttgcatgcatgttgcatatttgtgttgatttcaggtgatttggagctgttgacgagctaactggaagaagcggacctgatcatgacaaaccactcgacccagaggtcgagtaggagcttcaagatctcaacagaccactcgacccccaggtcgagtagaagacatcaccacttcacctcaccactcggccacaaggtcgagtgtcctcatctccatcacctgaccatcactcgaccacatcactcgaccctgaggtcgagtgtctttaccaccattacctaatcatcactcgaccccatcactctacctggaagtcgagtatcaccatcaccaccactcgactacacactcgatggcaagcttcagagtcttcttcattccgcactcaaccagacactcgagcacaaggaagaaaagaagactccagctattcactcgatccccactcgaccacatgagtcgagtacaattcttaatccgtcccaatactgcatcgttttaagtattagggtttcggaatatttggctataagtagcatgtacttcacattttcgcaaacaagttttttatttagttttattccgcagaccttgtgttctagaccttttgtaatccggatttctctttatctattcaatattcagtattcagtattcagtattcagcttttggtcttgctttcgtttactgttgttcattctgttatcacccttctattacactgttgttatcatgtttttagcttgttcaacgtttatgctttctgttctgatgtctgagtagtgaataggtttctgaggatgggttagaatagtgtagaattctcagtatgctaggtgattgagtattgattgatagatcccttatggattagttgttcttaatgcctattgctttctgatcaactggaatttgagcccagacatttccgcgcccaaaaggtgttcgatgaaatgtctgaaccactaattctagagacttgtggccctgtaccaaggtattggttgcagggagcgttttggctttaacttgttgattcgtaatgcctgttaggttagctctcgtcaatggtgattgagtctgggactaggttaacttgagagtctctattgcggtggcacttagatttggttaatgaacttgttgtctagggttaatttattgagcatgtcaatcacctgtaaactgaggaaacgaaactactcaattaccccatcctcgggaattctttatctgattgaattttttgtttactctactgttgtttactgcatcttgttatctgtcgcttaatttctgcggttctttcttgttactcaacctcatactcgaccaccaagttgtctggcaacagactgtgcagtcaagtatctgtgttttattttctgtgtgttactcctcacctagtgctctgcaaagagctgtgttggtcgagtgttttactgtttctgcttgaatttctattttctgcatgttcacttagaattgctagaacacaccacaacctgttattgcttggcttgacttagggacttttgatcacatcttaattgttagcatcacacccatttggattgacaaccttcagtactacaacgacatgatagtgctttaggtttaattgactgaaaaatctattatcaatttggcgccgttgccaattgggtgtctgttttttacatttgacatttcagacttgcttagatcaagttctttttcaaattttcttttcggttactaactttgtgtctttcttgttgtcttcttgatccaggtacacctctactgtatgcgaactcgatcaacaggcaatcagaacctccttttcaacgacaacattgaccgcatagctcgcgagcttagagaaaggtgaaacacagtcaaccctgtacctcagcaaccactcgaaatggctgacgaacagaatcaacaaaatggccctgccaacattggtgctggagatgcaccacgtgatcatcgtcagaggaaaggaattgcacctcctgctatccagaacaacaacttcgagattaagagtggtctcatctccatgattcaggggaacaaattccatggtctgccaatggaggatccactcgaccaccttgatgaattcgattggctctacaacctgacaaagatcaatggtgtcagtgaagacggattcaagctccgtctgttcccattctccttgggcgacaaagcacacatctgggagaagaatctgccccatgattcaatcaccacctgggatgattgcaagaaggcttttctatcaaagttcttctccaatgccagaactgcaagactcagaaatgagatctctggtttctcacagaagactgctgaaagcttctgtgaagcatgggagcgtttcaaggattacaccaaccaatgccctcatcatggctttactaaagcctctctgctcagcactctttatagaggagtcctaccacgcatcagaatgcttctggataccgccagcaatgaaaatttccagaacaaggatgttgaagaaggctaggatttggtagagaaccttgctcaatcagatggcaattacaacgaggactgtgataggaccgtcagaggcacagctgactctgatgacaaacacaggaaggagatcaaagcgcggatcactcgaccagtcactcgagcaaccactcaaccagtcactcgagcaaccactcgaccagtcactcgaccagtcactcgagcaaccactcgatctgccacttgacaacgttactcgaccaacaactcgacctatcttcccagcagcatcaccaactgctccaaaaccagttgctgttaaaaacaaagaaaaggtctttgtccctcctccctacaaaccacagcttccatttcctggccgtcacaagaaagcgttggcagataaatatagagctatgtttgccaagaatattaaggaggttgagttgcggatacctcttgttgacgctctagcgctaatcccagactctcacaagtttctgaaagacttgatcgtggagagaattcaagaagtgcaaggtatggtggtattgagtcatgaatgcagtgctatcatacaaaagaagatcattcctaagaagcttagtgatcctggttcattcactctaccatgctctttagatccattggctttcaatagatgcctatgcgatttaggagcatcagtcagtctcatgccgctctctgttgccaaaagattggggttcactcaatacaaatcctgcaatatatccctcatcctagctgacagatcagtaaggatccctcatggtttgctcgaaaaccttccaatcaggatcagagctgtggagataccaactgactttgtagtcctggagatggatgaagagcgcaaggacccgttgattctagggagacctttcttagcaactgcaggagctatgattgatgtcaagaaagggaagatttatctaaaccttggcaaagactttcggatgacctttgatgtcaaagacgcgatgaagaagcctaccatagaagggcaactcttttggatcgaagaaatggatcagttagctgatgagttactggaagagctggcagaagaagatcatcttaatagtgctttaactaaaagtggtgaagatgggtttctgcatttggaaacattaggataccagaagctgttagactcccataaagcaatggaagaatcagaaccctttgaggaattgaatggaccagcaacagaggtaatggtaatgagcgaagaagggtcaacacgagttcaacctgcacactcgaggacatactcgaccagccactcgaccttgtctgccaatgaatttagggagccgatcatcccaacttcagatgactggtctgaactcaaggggcctaagttgatctagaaccacttcctaaaggtctaaggtacgcattccttggttcaaaatctacttaccctgtgatcattaatgctgagttaaatgatgatgaagtgaacctactattatctgagcttagaaagtataggagagcaattggttattcattatccgacattaaaggaatttcacctagtttatgcaaccataggatccaccttgaaaacgaatcctattctagcattgaaccatagaggaggtcaaatcccaatttgaaagaagtagtgaaaaaagaaattttgaaactgcttgaggctggtgtcatctatcctatctctgatagtccttgggtttctccagtgcattgcgtccctaaaaagggtggaatgactgttgtcaaaaatgaaaaagatgaactaatccctactagaactataactggtcatagaatgtgcattgattataggaagttaaatgctgcatctaggaaagatcattttcctttaccattcattgaccaaatgcttgaacgtttagctaatcatccatactattgctttcttgatggatatagtggtttctttcaaataccaattcaccctaatgatcaagaaaaaaccactttcacatgtccctacggaacttttgcttataagagaatgtcatttggtttatgtaatgctcctgcaacatttcagaggtgtatgacctctatattttcagatttaatcgaggagatggtggaggttttcatggacgatttttcggtctatggcccctctttctcctcatgtttgttgaatcttggcagggtactgaccaggtgcgaagagacgaatcttgttctcaattgggaaaagtgtcatttcatggtgaaggaaggcatagtgttgggtcacaagatatcagagaagggtatagaggttgacaaaggaaaaattgaagtgatgatgcagttgcagccaccaaaaacggtgaaggacatcagaagtttccttggtcatgctgggttctacagaagatttattaaagacttctccaagatagccaggccgttaaccagactattgtgcaaggaaaccaaatttgaattcgatgaggactgcctcaaatcatttcacaccatcaaagatgctttggtatctgctcccgttgttcgagcgcctaattgggactacccatttgaaatcatgtgtgatgcatcagattacatagtaggagctattttaggccagaaaatagataagaagcttcatgtcatatattacgccagccgaacgttggatgaagcttagggaagatatgcaacaactgagaaggaggttctagctgttgtattcgcatttgagaagttcagaagcaatttggttggatcaaaggtcactgtctatacagaccatgcagctttgaggcatctgtatgccaagaaggatactaaaccaagactggtgagatggatacttttattgcaagagtttgacatggagatagtagataagaaaggctttgaaaatggtgcagctgaccatctttcaaggatgagaattgaagaaccccttccgatagacgattcaatgccagaagagcagctcatggttgtagagttcttcggaaggagctacagtgggaaagagttccaccaactgaatgttgttgaaggagaatctccatggtatgctgatcacgtcaattacttagcatgcggagtagagtctcccaacctgacaagttatgaaaggaagaagtttttcagagacatacaccattactacttggatgagccttatctttacactctctgtaaagataagatctacaggagatgtgtctcagaagatgaagtggaaggtatcctgctgcattgccatggctcagcatatggtggtcacttcgcgacgttcaagacagtgtccaagattcttcaagcgggcttttggtggccaacaatgtttaagggtgctcaggagtttgtttcaaagtgtgattcatgccagagaaaaggcaacatcagcagaagaaatgagatgccttagaatccaatcttggaagttgagatctttgatgtatgggggattgattttatgggtccattcccatcttcatacggtaacaaatatatactggtcgtcgtagactacgtatccaactgggtcgaagctattgctagtcctaccaacgatgcaaaagttttgctaaagctgttcaagaccataatcttcccaagatttggagttcccagggtagtaatcagtgatggcggaaagcatttcatcaacaagggttttgagaacctcttgaagaagcatggagtaaagcacaaggtcgccactccctatcatccacaaacaagggggcaggttgagatctccaacagggagataaaaacaattctggaaaagactgttgggattacaaggaaaaattggtctgcaaagctagatgatgcgttatgggcttacagaacagccttcaagacccccattggtacaactcctttcaatcttctctatggaaaatctacaaggagagaaccaagcttttccgtgacaagaagatcatcactaaggatttccaggttggtgatcaggtgccgctgttcaactctcgcttgaaactcttcccaggaaaacttaaatccagatggtctggccccttctgtatcactaaggtccgtccttatggagcagtcactctagctggtaagagtggagacttcacggtaaatggtcaaaggctcaagaaatacttagcagatcaaatccttccagaggtaacatcggttcatctccaggaacttcttgatgattaaaggagtaaaggagtcaagctaatgactttaaacaagctcacttggggggaattcccatgactatctctgtaaataaatttttattttcttgttatttttgatttgtcttggttgtgtttgtggttctcaagaacaaaggaacaatgtggagatagagtaaaaattcaaaacttttactctacagaagacttggagatcgagtgtatagcccgttggagtacaaaattttgaaaatcttctgttacacctggagaccttgcactcgagtacattggtcgagtatgtgtgatgttttaaaaccaaaaacttttaaatcatcatcttactcgaccaacagaagctacagagacttgcagggatttcctgcagtttacagtaagttttctacaaattttctcagtcaacagattgtgggccacgcgctgaggataagctggagagagaatctaaaactcaaactcaaccactctttttgaaacttcactcgacttaaccatatccactcgagctacctcttttcatctcaccaccgacactccaatttctctacaccacgaatcgccgcccaaataactactcgatctagaataaatcactcgacctccgcaatgtcactcgacctccccgccgccgtcaccatttcattccctccgtccctcgaccagaccacttcaatcaattccttagctatactagaccaattcatccacatcaaccgccgtctctttcaaaagaagctactcgacctcgtttcccaatctcgtagccgcactcgaccgatgccgcctcgaccaccataaagcactcgacccctgcaaaagcaactcggcttcttgttcttgaattcaacggagcttttcaacttcagagaagttactcgacctctaggcttcacgattcactcgacctactaaagcattccaactcgaattcggagaagatactcgatccaattcgtctaaggggaactcaagaacagcttagtctactcgagtacagaattgtactcgatcaatagggtctatttcattgcatattgataacaattttggtttcattgctatctttgagactaacctattgacatttgagcttttagttctaaatttttacaggggaatcatgagcaattatagtggcagttcttctgttgatcctgactacaacatggatgagacagagtcgtcatcttcaaggcctgagagagaacaaagagaatatgaaagcttcagaagaaaagctgagatagcccgagggaagagagcgatgacagagaggtatgagcttctagacgaagatctggaagacgagtacatgccagagcatactcgcacagctaccaaacttgtgcacaagcccgacgtattgcctgctgaggaatatattaggctcttcaagctgaatgagttctgtagcacgaggtatccttgctcgaccacacttgcacaactcggattgttggaggatgttcagcacctgtaccagagttatcatctggacactctgatggcttatccgtatgtagcatatgaagatgagataattcaatttctctccacgctacaagtggagctctaccaaggtatgacctctgatgagttggattgtgaaggattgggactcttgcggttctgtgtgtatggtcatgagtataggttatcaatcaagcgtttggaaggattgtttggcttccccagtggaacgggaactaagcccaagtatgacagagaagagttgaaagacttgtggatcaccattggcagctctgtaccgttgaattcttccaggtcaaagagcaatcagatacgcagccctgtcatcaggtacttctagcgttctatagccaatgtactctactcccgagagatcacatggactgttactaactctgatatggagatgatcgcaatggctctcaagggaactcttcgccaaactaagaatggcatgtctctccaaggtgaagtcaatgacacacctctctctgtacttcttctgatccatctgtgtggatacaagagctgggctgtcagcaataaccacaagagagcgcgaggcgctttgtgcataggtggtgttatgacaccgattctgatagcttgtggagtcccaatcatttctgatggactcgagccgcgagcaatggatatcgagcacctacgtcactgagaattcctggagtttgcaatggttgacgacttgcacaggttcaggtttgagaactctacagacaagagagctagcatccttctccctagccctaaggttacacggataatagagggagataacattgattttcagcctgaggttggacacctctactatgaaaacgctccgccattggatgaggatgatcttctagaagaagctgctttggatgggatggatgaagacagagcagtggagttcgacactagcatgtatcactttggtgaacagagcttgagtgaagctcataagaacaacagtaaactgtagaagtggtgcaagaagcagaacaagctgctcgccaagtgtttcaagactctcaagtttcagtaacagtccacttctattccacagggacagcctcctctggagatgccatcgaggagatttgatgatcctgagcacaggcgtgagcttagcgagcagagagtctcactgtcccggctaggcattcgtcattcgagtcccgggaacacaagagaagaaggaaggctacactcacttgatctagcagcaaatcacgcctcattcactcgaggaggtcactcgaccgcggtgctggccgcagcaaaaggagagaggtcgagtatcctcagagcggtgctgaccgctacagacctgatgaggtcgagtacccacctgctggagctgatacaaaacaaggcggtttgtctatggcctgggagcaatcacaggcagtcattgacgagcaactacgttcattcttcgactgaggtaagcgcctcacttcaccattgtattatatcatctgttgtgatttgtttcttcattttgtttatgtgattggatttgtcctgagtactcttttccaagtttattcgcacagtggactgtgtgatttaagtttgggggagggctcaggaagtgtgtgttgcattgtatatattcttgagtctgcattcatctaaggcataaaaaaaacaaaaagatttgaaaaatttcagaaaatgatttcacaaaaaaggagtgttcatgtagttgcattacatttaggatcgagtctagagtgtttcatttaggattgttgcatatgcataggggatgatgatgagatagccttgtaagaattttgattcaccggataaactcagtgccctcgttgctagttgtctgttgcgtagtcaatgaatttgaaataaaactgaaccatgcctagattgctctactcgaccacactgtcatgatctgataccattccctatcaatttgaacctaaatctgatctttaattatcatgtctgcatcaaatttgaactcatggataccctaaaatacttggattttcttattcattttgatcactcttgttaatccaagtagctgactctccttattagagcagttaacccaaacccaaacttagactttctttcaagccctatatcacttgtgagtgtttgtgaggtcttattccgattaagcttggtagaaagtgttaggttcgtaacgacagagatagtgtctcatgtagttctagttcgcatttttcggactagataggactaggtgggcgcttatactttgggttgggatgtgtttaaaagaaaaaaaggggtcgattcattgataagaaaaggtaaaagactctaggtgaagtaagctaaagaagcagaaaaagtctagaaaaggttttgggatttgtaaagaaaagaaagagttcttgttagctgttgaagatgggcaaaagcccttggttttagaattataaaaaacaggaatcttagttgttaaagaaatcaaaatccgctagatgtatcaaagtgttgagaaagcttctcctagagttaagagaaaagaaaagaatgattagaaaaaaaggggcttaaaagattcatgaatgcaaagggtagagttaagttcttatattgggattggagatgggattaccattagagcttcatttgatgtactctgggtagatgggatcttatctctttatgcatagcttgggacttacctttaccattctactaaagcttaatcatttttttagagatcccctgttactgaagcctattctgtaagggaccatctttgtctcttgacctattaccttagccaaatgagttcattgatgatgcattgcttgattcacgttctagaactaatgaatgttaaagggattggtagatttgaaaacatgtgtaggtcgagcatatgagtcggattgattgataatgaggcatggctaacgtttttaagtagaattcgatcttgcagcttagaaattttcaacttggacattgatttcatctggtttatttggtgctttggctctgagtccccgcttgattgtttgcttgagggcaagcaaagactaagtttgggggagttgataagtgtgtattttacatgttttgagcatccatttgtcatcattttagcatcatatcatcactgttttataccatttctcatcatttatcatcactttacatgtttaggataggtttgcatgcatgttgcatatttgtattgatttcaggtgatttggagctgttgacgagctaactggaaaaagtggacctgatcatgacaaaccactcgacctagagggcgagtaggagcttcaagatctcaagagaccactcgacccccaggtcttgtagaagacatcaccacttcacctcaccactcggccacgaggtcgagtgtcctcatctccatcacctgaccatcactcgaccacatcactcgaccccgaggtcgagtctctttaccaccattacctgatcatcactcgaccccatcactctacctggaagtcgagtatcaccatcaccaccactcgactacacactcgatggcaagcttcagattcttcttcattccgcactcaaccagacactcgagcacaaggaagaaaagacgactccaactattcactcgacctcccacttgaccacatgattcgagtacagttcttaatccgtcccaatactgtgtcgttttaagtattagggtttcagaatatttggctataagtagcatgtacttcacatttttgcaaacaagttttttatctagttttattctccagaccttgtgttctagaccttttgtaatccggatttctctttatctattcagaattcagtattgagcttttggtcttgctgttacactgttgttatcatgttttcagcttgttcaacgtttatgctttctgttatgatgtctgagtagtgaataggtttctgaggatgggttagagtagtgtagaattctcagtatgctaggtaattgagtattgattgatagatcccttctggattagttgttcttaatgcctattgctttccgatcaactggaatttgagcccagacatttccgcgcccaaaaggtgttcgacgaaatgtctgaaccactaattccagagattcgtggccctataccaaggtattggttgtagggagcgttttggctttaacttgttgattcgtaatgcctgttaggttagctctcgtcaatggtgattgagtctgggactaggttaactggagagtctctattgcggtggcacttagatttggttaatgaacttgttgtctagggttaatttattgagcatgtcaatcacctgtaaactaaggaaacaaaactactcaattaccccatcctcaggaattctttatctgattgaattatttgtttactctactgttgtttactgcatcttgttatctgtcgcttaatttctgcggttctttcttgttactcgacctcatactcgaccacccagttgtctagcaacagactgtgcagtcgagtatctgtgttttattttctgtctgttactcgacctgtcactcgacctcacccagtgctctacaaagagctgtgttggtcgagtgttttactgtttctgcttgaatttctattttctgcatgttcacttagaactgctagaacacaccacaacctgttattgcttggcttgacttagtgacttctgatcacatcttaattgttagcatcacacccatttggattgacaaccttcagtactacaacgacatgataatgctttaggtttaattgattaaaaaacctattatcagatacccacataaaacaggtcggaggtaaggatggttttgcatgtagagatcatagcggttttagattggaaaaattggggctgttctgttggtggaaacttcaaaaagatggatgcggacaaaagctgaatcgaaggaaagatcaccgagcatttcctctgccctctgtcgatggtcaatgaacgaccgaggaagttaaacgattgacggttgggttgggatgattgagataatagccagagcaaaattaaaaatatgaagagataacgaaagaagtgaaacgaagaagagaaatcccgacgccggtgagcaaaagcatcaccggcgccggaaggcgaagctagggtagtctcctcgatgttagtgtctgggagagtctttaagtttatataaagtcgtcattctaagacttatattatctccaaactccttcagttgatattttaatgttgcttattgcatgagtgaatgattagataaataaaaattatatttaaattaaaaataaaaaaaatccgaaaagaccgcggcgtagcgcgggtgatcacctagtaagaataataattgcctgtttgtttatcttctcgatcgctttaccttatgtcttgccagtttccttatagtagaacgaaccaatggggaaacaaaactatttaaaaatagattcgtcctcattgtcatcatcactccatcctctggcaagacacctacatcaaacatccaagggtaaatcctatcctatctaacataattgccaaggacgtgaccagtttcctaatttacctttgtgactcttttgactccataaaacattcgaaaaatcatcccacgtccatgagagcatcatgaaccatgctctgataccaccttgtaacactcctaccccgtcctaggaccaggagcgaatagaagcgtcatgtggacgcccgtagtcagccaacccaggttcccggaatgaatccattcacccaagccgtccgaccgtgagtgtcgttcctcacaaacacggcctaaggctttgtaactcgtaccgcggacgcgagttgtgatagtcagacaagactaaatacatcattgggagacatggggttttaataaaatcagatctttataaaaatatcgagtcttacatactatacgcaaaactatatcttacaaaggcaaagcaaatctacactggttggcctaacgtcctttgccccttaaggtctccctactaaaggttgccttttaaaaaaagtagcatttgagtaatctagtattactcagtaagtgcgggatctataaaaataaaacccaacccaacccccaaacaacaagcaaagaggcaatcaaatgcaatgcaataagcaactatatgtagcgaaactactatgcctaaacatgctcctaactacttaagtaaggccttctatgaacacatgataccccgaggcaatggcctgcacactcctagacacaaagtgtaaagaagattaacattttcttatattacatcgtcatgtagtgccttgtcggtagcgaaacagcccgagcctttgtatgccataacagaacggagttacatgcgacacacaacatacggatggaatcctcatgatttggctaatcctagttatctaacaatcaaagtataacagtcgggcagcatgacgtcaataccaacatccttccggcataaaagttatacgaccacgactttatactatcaagcaacaatcattgataagtgtacattttacatgtttttgagcatccatttgttatcactattgcatcatatcacaactgttttataccatttctcatcatttgtcatcactttgcatgtttaggatagttttgcatgcatgttgcatatttgtgttgttttcaagtgatttggagctgttggcgagctaattggaagaagcggacctgatcatatcaaaccactcgacccatcctagtcaagtagatgatggcttcacgacttcaacacaccactcgaccacctagtcgagtagatggcctcatcacttcacaccattactcgaccccatggtcgagtatcattatctccaccacctgacaatcactctattacatcactcgacctcctcgtcaagcacccccatcacaatcactcgatcactcactcgattacacggacgagtcccaccatcatcacacactcgaccgatcatgtagggtcccattcccggatttccaatctggtgaggtttcccatggacggatcactaagtgatccgatccttaatccgattttagggtccattccttaacacattccgtttctatcatattctgatattcattactagagtcatatgcacaaaagagtagaataaacaagaatcatggctttatttatagaagtaaaaggattcgatacaactcatgagttttgccaataagctattacaagtcatataatcaatcctagatacccgacttctatcaccactcattatcccggccttgagtctcgcgcctaagccaattccttcccaggatccctttctttccctgaaaagatagcaaggcacacaacatcggttcacttagcgtatacaatcaaaccatgcaatcttgctaagtttcggtgatgactcattcggaaaaacaaattgggagaaaggaagtaagcgcatcagtttggcctagaagcgtcggattgatcacgatcctccgattccttgccgagccgcatcccatattcagcccatccgtttaacaggctgaatcatgccgagtatgaacacgcttatgcttgatcatgcaaaacagattataacccgccaaaacaagtctatatcgacctattaaccaatcgccctatcaggattaacattccgatggttgaccatggaatcctcacctttccctcgccaatctctcaagcaaacgagtttgctctgaaaaccggtgatctcttttaagtaatttcctctccaagacgccctggagagctttagtgagtttccccgtgtttttctgtgtcccaaatcaaatccaagacccttctatttacagggattcgggcggtaaccgttctcacccgaaaaggcaccttttggcccataaccgttcctgggcgacttttgacgaagaggggtaactgttcgaccacccaaccgcccaaccgcctaacagtcgaaccgctcaaccgtccaaccgcctggccaaccgttggcccaaccgcctcactcccttcctagcttggtcgagctggcggagctgactaacactccctcgagctggcagagcttctcctcgagctagccaagctaaccttgagctggccgagctactctggagctggcctagcttgtattgagctgtagtcggccctgaatccgacccaagttcctttttgtccatctctttgaaccactccgggaaatctgccttcatcttgttttcagtttcctaagtatcttcttctttatctccgcaattccacacaaccctcaccattttcacgattttcttccgagtccctttctctaatctatccactattcaaataggttttgctttcatcatcaagtttccttctaattcggcggaaacatcttccacagggtcatcttgttcgcttaggcacttcttaagttgcgataagtgaaaaaccttatgaaatgcctttaactttggtggtagatcgagcttgtaggccactactccaatccgttcgagcaccttgtatggccccacgtatctcggactaagttttttcctcttggaaaagcgtcctttccctttgtaagtcaccgcctttagatacactagatctcccactttgaattctaactctttctaacgtttatccgtataactcttctgtcggttctgagatacctttaacttaaccttaagaaagttcatcttttcattcgtctcgtccacaatccctggaccgaatagcattcattcgcccacgggcatccaacataagggcatccggcatgcccttctatacagtgcctcataaggcgacctaccaatacttctttggtaactgttattgtatgcaaactctatcaacgtcaaatgcttctcacagtttccaccccaatctaaaacacatgccctttgcatatcttctagagtccgaatggttcgctcggattgcccatcggtttgatgatggtacgtcgtgctcatattcactcttgttcctagggctttttggaaagcccttcaaaaatttgaattgaatcgagtatcccggtcagagactatactcacgggtaccccatgtatagtcgaacgatgtcttttatgtacctttcttcaatccgttcagctccatcggtttctgcgatcgctagaaagtgtgccgacttggtcaacctatcgaccactacccataccgcatcatgttttaatggacttgttggcaatcccgttacgaagtctatcgtcatgtgttcctatttccattccggcattggtaaggtttgaactagtctgctaggagcttggctttctgccttgactagttggcatgttgagcaccgggcaacccagcttgccacatccttcttcattcccacccaatgataataccttttcagatcatggtacatcctttgtaatcccgggtaaatggagaacttagattgatgtgcttctctaagtatttcctcccttagccccttatcggccgggacacacactcgcccgttcaccacaatggttccattgtttgaagtttcatactccgttttattattctcctccaatttcatcaaatccttgtcctgcccttgagccaatcggattctactaagtaggttcgcctgatcggccgcatccaagcctaatggctccaactcttttgataacacattcaaatgcaatgtccccatcatgttcaccaacgcttcatgattcttctctgcttctacctcacatcgtcttcgacttgaggcgtccgccacttggtttacatttccgggatgataagcgatatctaagtcataatccgccaccaactccatccaccttctttgccgtagatttaattctggctgggtgaatatgtacttaaggctcttgtgatcggtgaagatttggaccttggcactatagaggtaagatcgccaaatcttcaaggcgaacattacggcaaacatttccaaatcatgcgtagggtaattacccccgtgcttgcgtaattgccgtgaggcataagcgatcacactacccttttgcataaggacacaccctaatcccgttattgatgcgtccgtgtacacaatgtacggctcatctgcttctggcaaggttagcaccagagcacttgttagcatcaacttcaagtcggcgaagctcttttcgcactcatccgaccattgtaacttagtgtcttttccggtgagtctagtcaagggttgagccatgctcgcaaaccctttcacaaatctctgatagtacccggccaaaccaaggaaactcctaatctcggtcgcactctttatccgaggccattcctttatggacttgactttctcaggatccacggagactccttgatcggagacaatgtgcccgagaaatccaactcgcctttgccaaaaggaacatttgcttagttttgcaaatagcttatgtcctcttagtctctccaaaaccgcccttagatgattttgatgggttccttcatcctttgaataaactagtatgtcatcaataaagatgatcacaaactcatctaggaattctcggaaaacaccattcatcatcttcatcaaggctgctggcgcattggtcagtccgaacggcatcaccacaaactcattgtggccataatgtgtccggaaggccgttttccgaacatcccttggatctatagggatttgatggtatctcgaggctaagtcgagtttagaaaaccacttcgccccttttaattgatccaatagctcatctatccggggtagaagatacttgtttttcaccgtaactctattcaatccccgataatcgatgcatagtctaaaactaccatccttcttctctcttaaagtgcccttcttgcccgcaatgataacaagtccttggttcatagccgggagcctttggtttcccgtgatccatccttgggcaactttgaatcgcatggtccttgcttccacaccggccacatgcacctatggccttccagcaagttccgctatgattctttccacaagtcggacattcctcgcgcttagaattggacttggtgttatctaccttgtctcacttccttttcttgtcagtggacttgcttgccaagtttgagcggttcgaatcttttcctgattcatgagtttctcctccattcatcggtaacgatcgaatcagaacttcccatgaaatgccttgttcccaacttcgagacgtgctcaagtaagttcaaatagtcttccctcttcctcgaagaatgagatggtggaatgacttccacaactcccaatcaccatccctcggattttcaaccgcttgtgccacatgactggcacaagggatttagtcaatgtggccaattgtgccatcatcgcttttatcatgtcccactgctcttgggccgatgatgttgcatccggattctccttcccatccgatgcatcgctattctctagatcttgacgaatcggagagtcttgcccaaccacggttccagccggattagtcccatcctttgttgtctcgacccttgtttcctcaatgacttgcgtctcatcgaaaaccactgtctcttcgacaacacccttgtctttcttactcctcccagccttttccctcttacccatctgcgaaaactcaaaagttagccacataaacttaaaagtaatcgttagggtataagaaaacgtctaccgcgagatctcattaagcggacgagtaatgacccccaacccatactaaagatcctaggaccgtaatcgctcttataccaacttgtagggtcccattcccagatttccaatccggtgaggtttcccatggacgaatcactaatccaatccttaatccgattttagggtccattctttaacacattctatttctatcatattctgagattcattactagagtcatatgcacaaaagattagaataaacaagaatcggggctttatttatataagtaaaagtattcgatacaactaatgagttttgcatataagctattacaagtcatataatcgatcccagctacccgacttccatcaccactcatcttcccgcccttgagtctcgcgcctaagccaattccttcccacgatccccttctttccctgaaaagccaacaaggtacacaatatcggttcacttagcgcatacaatcaaaccatgcaatcttgctttgtttcggtgatgactcattcggaaaaacaaattgggagaaaggaagtaagcgcatcagttcggcctagaagcgtcggatcgatcacgccctccgattccttgccgagccgcatgccctattcagcccatctgtttaacctgccgaatcatgccgagtataaacatgcttatgcctgatcatgcaaaacatattataacccgctcaaacaagtctatatcgacctattaaccgattgccctattagaactaacattccgatggttgaccatggaatcctcacctttcccttgccaatctctcctgccaacgagtttcctctgaaaaccggcgatctcttttaagtaatttcctctccaagacgccctagagagttttagtgagtttccccgtgtttttctgtgtcccaaatcgcatccaagacccttctatttatagggattcgggcggtaactattctcacccgaaaaggcaccttttggcctataaaggttccaaggcgactttagacaaagaggggtaaccgttcgaccgcccaaccgccaactgtccaaccgctcaaccttccaaccgcctggccaaccgttggcccaaccgcctcactcccttcctagcttggtcgagctggcggagctgactgacactccctcgagttggccgagcttcccctcgagctggccgacctaaccttgagctggccgagctactctggagctggccgagctactctggagctggtcgagcttgtattgagctgtattacagcccaattctggacttgcccgagagtccaccttctccctcagaccaagtcctatccggcgatcctatcgaggatcgcgaacgctacagatcactctaccaccaagccgagtaccaccatctccataactcgacttcatactcgactaccagcttccgagtcttctccattccgcattcaacgagacactcaagcacaaggaagagaagaagactccagcttatcactcgaccaatcactcgaccacctgggtcgagtactgttcttaatccgtcccaatactgggtcgttttgggtattagggtttcggaatattttgctataagtagcatgtattttaccttttcgtttacctaagttttattttccgtcgacactgtgttcttgatgttttcgtaatctggatttctcttaatctattcagtattcagtatttgcttttgatttcgtttactaagttgttcatcctgttatcatccttctattactttgttgctatcatggtttcattcttatcatcgtttatgttctctgcaatgatgtttgagtagtgactaggtttctgaggatgggttggagtacttcagaattctcagtatgttaggtggttgagtttgatttatagttcccttctctggattagttattcttaatgcctattgcttttttgatcaactggaatttaaccccagacaaatccgcacccgaaaggtgttcgatgagatgtctgaatcactaattccagagattcgtggctctttaccaaggtattggttacatggaacgttttggctttaacttgttgattcgttaatgcctgttaagttagctctcgtcaatggttattgagtctaggactggtttaacttgagggtctctgttgcggtggcacttagatttggttatcgaacttgttttctatcgataatttattgagtatgtcaatcacctgtaaactgaggaaacgaaactactcaattaccccatccgcatgaattctttatctgattgatttttttgtttactctgctgttgattacttcatcttgttacctattgcttagtttttgcatttctctcatgttactcgacctgatactcgaccactcggttatttggcaacatactgtgctttcgagtaaccctgttacatcttttgtctgttactcgaccacacccagtgcttggcaacaagttgggttggtcgagtgtttttactccttgaatttctgtttcctgcatgttcacttaggactcctagaacaccccaaacctgttattgtttggcttgactctgtgaactctgattgcatcttgattgctaacatcacacccatttggattgacaacctaaaatactacaatgacatgattggtgttttaggataattgactaaaaacctattatcaatcataataaattaagcaacacaagatctaataacaacgataaatcgattatacgacttaacgtataaccgaggatccagttacctatgctaagcataattaactaacctcctaattaacttaattatttagtggcaacaagtttacagagaacagagttcttcaagtttcacctcaaaatctgccttccaaaaggcatatcctcatagcaactttactaggacttatggtaattcttattaccaaacccctcctccacccactgctgagagtaagaacgaatcaatgcttgagcagattcttgagggtcagtccaagttagttgtggacttcaatagcaagtttgacgctatctacacagatcttaatgggaagatcgacaatctgagctcttacatgaagaagctagatgttcaagtagctcaaacttcttagtctatcaagagacaagaaggtttctttttggcactctagacactaatcctcgaaagacctacaatgctatcttggttagagatggagacaatatataggagaaattggatacagaggacaagttggagcttgcagctgcagggctggtgtcgaccgacacctaccaatgtcgatcgacaccatatggtcaacagttttccaaaactatttatgaacaagagtatcaattgacacactcctagcgtcgatctacacttggtccgcacaacatcttatgaggttcgtatccctatgcagcccaaacctatttacactcctcatgtccatatccgagaaaacgttgttctaagcaggagattcatgatgcaaagtgcaaggcaataatggagaagatcttgactatcattccaaaggatgcttcagagaactcttctgctcaacttctgagatatgtcaagcgcttggtcaacaatggacttcacaccgaggaagccaatctgcttacaagagatatgagttccatactgttgaagaaggtcaagaatgacaggtccaagagagtagtgctttctgaacatgttagctccactgccaaagggcaaagcactgagatactctctgatccaggtagctttgttcttgacggcttgatatctactagaagattcagccactccttctgtcatcttggaacaagaatcaatctcatgcccaagtctgttgcagggaagctaggcatgactaactacatgccaacaaggatcactctcctctttgcggatcgttccaatcgaatccctcaaggtatcctcgatgatgttcctctaaaacttggtaaatgcctcatccctgctgattttgtggtcctagcatatgatgaagaacccaaggatcctctcatccttggtatagcttttctagctacacctggtgctaggattgatgtgaagaaagataggatctcccttaacatatgcgatgtggagatggagttcggcatggatggttcaaaatttatagtgcctatcaggagtattgccaccaacaaagacacatcttctatggctgctcagatttcacctccaagctcgcagatgaaagctgcaaagaactagtgtcgctcgacaccacaccccctatcgatcgacaccattgcgcttgagagactgatgattctgcacctccttcacagcccacacctaattcaaatccctgtgataggtactgctatttttactgtttttagctatgttttaaatataggtttttgtgtctttttgttatttctagagtccttttatacaatacttagacggttcaaagatacgctaaaattctaattgtctgaggtttgaatcttcattcattccattctttgtgagattcttctcttcaaaacggaggtattctttatctttgatttaagaagtgggatgggcgatctcgtggatatagttgagaaacttaggtatggaatctagaatgttgtgtaagcttgcggagaagtacatgttggttagaatttgattagacttgctaggcatatggatttggttacaataatcatggcaaaagactaaagaatgttgggagttcctttgtttttcaaaacctcttccacgggttcggcttttatgttttctttgagggcaagtgataacattgtattttactcattttaggcatgtatttatcatcatttagcttagtgatcactcattgtatcatatcattttgcatcacatttagcttattttgcacacttaagcatttaggatcatcttgcatacatattgcatgttttggtgtgttttcaggtgcagaaagagcttacaaggattctactcgaccctctactctatccaaccaggagggaagcaacatagcaatctactcgaccagtttactcgatccaggcagctacagaggaggcagtaattcactcgagcagtttactcgatccaggcagccacagaggaagcagcagatcagtttactcgcccctcttactttatcctctactcgacccatttactcgaccaagggcgacctactctacaagatttgttgatctatcaaagcctcttcggatcctcctcattccccaatcaacaagacatctaagcatacagataggagaggaagaagcatctactcgaccaattgatcactcagagcatgcaggcaaaggcgcagactttgcagcaccctgtttactcgatccccaagatcgagcaatcgtccaaaccgcctcaagtctcttgtcttctagtgaatctagagttttcaacattttagtataaatagatcactttgggatttgtccgaaggatctagcttttatctcttagtttttctttttgttcttgaatcttcaaaacttaattacttttaatcttcaaggcacatcaccaaaatttttagctctgggcatagtgagtttcacggaacatcactgattattctataattagagtttgagtttaagaacggttcgataacaacctaggtatttctagaactactaatcatgtgtttcctaagaataccctaaacctgacgttttattatcttgtcttacaaccaatcaatctgttatttgcttattttactttctttttattttttatattcatctagcttaattttgacactttggcctattgtgtgaacaaaatagctttgtggaattcgacctttaagtactaaccacgatctcttatttgagggagtaaatttagggcaatttgacctatatcagtatcgatgaagccaaatatcattcataaggacacggtccaatattttacaaattaagccttccccccgcttgttacaccaggtgaataacggttctagagaacccatatccgtcaaagtacagtgtctcacaacattttggaaatcctgcatacctaatggtatgaaaggtgaatgtgtaaattcacaatgctccctcccatcaaggatctcattataatcacccataattatccaagttttttttttaaatagcggcgagtcttaatggcttctcaagtcctcccataaacttttcctctcctctacagtattccttgcatagacaaaagaacaaaacaattcctccatctttccttccatcaaaacagaacattttatgatttgatcacttttgataactggagtgactcacactgtaggtctccagagaaccgaaatgcgacccaatcgatgaaactcatagtttttcataaataaccacactacaagaaaacaggcgataaacgactacataagtagttgcttagtagttgtcaatgttaataatacaactaatccgcgattaatgactaaagtcgttagtacatagttgctaagtaatgtagtcgtcaattagtcatcgatttacgactatgttacgacataagcccatacagtataaattcgtcgtttaataatcgtattatctggcgaccatttaacgattaatagtattgtacagagcgtgtgaaacttgtactcgttccatagtcggtaattgtttacgacgaaattacgactactttacaattaaatacactgaaccctgggtatgtttcacgttgtcgtaaaatagtcgtaaaacgttttacgacaatcttacgactattggacgataaattgtactgtacaaaggatatgattctcttagtcatatcatagttgtataaatttatacgactattatacgtctctatgacgattaggttatgactaatttggttagtctggtaatagtcgataagttttgtgcctattttacgactgttttacgtctacgttgctacttatttactactattttgcgactacttgttttgtcagaataagaatttggtcattgattgttgggtttcttgtttgttgtttaaagttatgatttgttcttgtttgttattggaaatgctattaaaatatgaaaagacatacatatattaaaaatcaagttcaaatacacagaaaattatgttgttcataaacaaaaaacttattcaaataaacataagttcaagtagtgtttggaaaaataaaatctatggatcattaggtggtggagtacttgggagacgctctttggatgtggaagagtgagtggccatgaagtccaagaacaagtgctcgagcttgtccttttgctcagctgtgactcgggctgactcagcttctcgagcagcaatctcagcatctcgcttctcattatatgcaacttgctcttcaattttccgttgagcttcctatagcagttcttctaaggcttgaaaggatgatgagtctccggggagttggcagttggcactgcctagagcgtctttcagacatctaagtccataatgattgccccttgaatccctttgtgtggactgcaagaaatagagaagaagataattagtgactgaatagtaactggactctaagactctgaattagactacaacatcttacctgaagaaagatggttgtatactcatctattgtgagctcctgaggtcgtgaagagtcatgagagacagtagaagcagccgcctctagttcagacagcctatctctcacatactgctcataagttagagcaatcttctccgccttccgattaacatatgttccatccgacttagtgtgtgtctagattaacacctcaccaagagggaccggtcttcccaatttctcttcatgcaaacacatatcaatatcctcacaagtcaacacactatagaattgaacatcacacatagtaaaactctaacttatgagctttcctggaggtcacccatcctagtactactctcacccaagcacgcttaactgtagagttctgatggaatctggtgcattagtgctggtatgatcgcatccgtaactacatgcaatgcaatcgtatctattcttttttgaagactttatgatcgatttgccgtgggtcccaccagctatgtaggaataccctctcttgtttataagtgctttatacatgcaaaatatacgaaaacaatgtccgtacatataaatttcgccccgtaatatagcaaagattacgaaaaggcccaaaaaagtacattaaggtcaaaatttggagtagaaaaaaaaactatagaagaattccattttccttcctaattcatcggagagctctctttgggctttccgaaaaggtatcacatgccaagtttggcctcacggtataaaagttctagagtcatacatttttgaccaaaaaaaagagggatgcaacacgaggactttccaggaggtcacccatcctagtactactctcgcccaagcacgcttaactacggagttctgatgggatctagtgcattagtcctggtatgatcgcatccgttactacatgcagtgcaattgtatctatttttttttaagactttatgatccatttgccgtgggtcccaccagctgtgtaggaataccctatcttgtttataagagctttgataaatgcaaaatattcgaaaataatgtccgaacatataattttggccccgtaatatagaaaagataacgaaaaggctcgaaaaagtacattacaatcaaaatttggagaaggaaaaaaacaaatagaagaattccattttccttcctcattcatcggagagctctctttgggctttccgaaaaggtatcacatgtcaagtttagcctcacggtcttaaagttatagagtcatacatttttaacaaaacaaaaagagggatgacacacgaggactttcctggaggtcacccatcctagtactactctcgcccaagtacgcttaactgcagagttctgatgggatctggtgcattagtgttggtatgatcgcatccgtaactacatgcaatgcaatcgtatctattcttttttgaagactttatgatcgatttgccgtgggtcccaccagctatgtaggaataccctatcttgtttgtaagagctttgatacatgcaaaatatacgaaaacaatgtccgtacatataatttttgccccgtaatatagcaaagattacgaaaaggcccgaaaaagtacataaaggtcaaaatttggagtagaaaaaaaaactatagaagaattccattgtccttcctaattcatcggagagctctctatgggttttccgaaaaggtattcacctgccaagtttggcctcaccgtctaaaagttctagagtccatacaattttgacaaaaaaaaagagaaaannnnnnnnnnnnnnnnnnnnnnnnnnnnnnnnnnnnnnnnnnnnnnnnnnnnnnnnnnnnttctatagttttttttccttctccaaattttgattttaatataatttttcgagccttttcgttatatttgctatattacggggccaaaattatatgttcggacattattttcgaatattttgcatgtatcaaagctcttataaacaagatagggtattcctacacagctggtcggacccacggtaaatggatcataaagtcttcaaaaaaaaaatagatacaattgcattgcatgtagtaacggatgcgatcataccagcactaatgcaccagatcccatcagaactccgtagttaagcgtgcttgggcgagagtagtactaggatgggtgacctcatggaaagtcctcgtgttttatccctttttttcggtttttctcttttttttatgtcaaaaatgtatgactctagaacttttagaccgtgaggccaaacttggcatgtgatactttttcggaaaggacaaagagagctctccgatgaattaggaaggaaaatggaattcttctatagtttttttttctactccaaagtttgaccttaatgtactttttcaggccttttcgtaatctttgctatattacggggcaaaaattatatgtacggacattgttttcgtatattttgcatgtatcaaagctcttataaacaagatagggtattcctacatagctggtgggactcacggcaaatcgatcataaagtcttcaaaaaagaatagatacgattgcattgcatgtagttacagatgtgatcataccagcactaatgcatcagatcccatcagaactctgcaattaagcgtgcttggacgagagtagtactaggatgggtgacctccaggaaagtcctcgtgtgtcatccctctttttgttttgttaaacatgtatgactctataactttaagaccgtgaggccaaacttgacatgtgataccttttcggaaagcccaaagagagctctccgatgaatgaggaaggaaaatggaattcttctattggttttttttcttactccaaattttgattttaatgtactttttcgagccttttcgtgatttttgctatattacgggcgaaaattatatgttcggacattgttttcgaatattttgcatgtatcaaagctcttataaacaagataaggtattcctacatagttggtgaaacccacgacaaatggatcataaagtctttaaaaaagaatagatacgattgcattgcatgtagtaacgaatgcaatcatagcagcactaatgcaccagatcccaacagaactccgcacttaagcgtgctttggcgagagtagtactagcatgggtgaccacctggaaagtcctcgtgttgcatccctctttttttttggtttttctctttttgttttgtcaaaaatgtatgactctagaacttttagaccgtgaggctaaacttgacatgtgataccttttcggaaagcccaaagagagctctccgatgaatgagtaaggaaaatggaattcttctatttgtttttttccttctccaaattttgattgtaatgtactttttcgagccttttcattatctttgctatattacggggccaaaattatatgttcggacattgttttcgaatattttgcatgtatcaaagctcttataaacaagatagggtattcctacacaggtggtgggacccacggcaaatggatcataaagtcttcaaaaaagaatagatacaattgcattgcatgtagtaacggatgcgatcataccagcactaatccaccagatcccatcagaactacgtagttaagcgtgcttgggcgagagtagtactaggatgggtaacctcctggaaagtcctcgtgttgcatccctctttttttttggtttttctctttttgttttgtcaaaaatgtatgactctagaacttttagaccgtgaggccaaacttggcatgtgataccttttcggaaagcccaaagagagctctccgatgaattaggaaggagaatggaattcttctatagtttttttttctactccaaattttgaccttaatgtactttttcgggccttttcgtaatctttgttatattacggggcgaaaattatatgtacggacattattttcgtatattttgcatgtatcaaagctcttataaacaagatagggtattcctacatagctggtgggacccacggcaaatcgatcataaagtcttcaaaaaagaataaatacgattgcattgcatgtagttacggatgcgatcatactagcactaatgcaccaggtcccatcagaactctacagttaagcgtgcttgggcgagagtagtactaggatgggtgacctccaggaaagtcctcgtgtgtcatccctctttttgttttgttaaaaatgtatgactctataactttaagaccgtgaggccaaacttgacatgtgataccttttcggaaagcccaaagagagctctccgatgaatgaggaaggaaaatagaattcttctatagttttttttccttctccaaattttgattttaatataatttttcgagccttttcgttatatttgctatattacggggccaaaattatatgttcggacattattttcgaatattttgcatgtatcaaagctcttataaacaagatagggtattcctacacagctggtcggacccacggtaaatggatcataaagtcttcaaaaaaaaatagatacaattgcattgcatgtagtaacggatgcgatcataccagcactaatgcaccagatcccatcagaactccgtagttaagcgtgcttgggcgagagtagtactaggatgggtgacctcatggaaagtcctcgtgttttatccctttttttcggtttttctcttttttttatgtcaaaaatgtatgactctagaacttttagaccgtgaggccaaacttggcatgtgatactttttcggaaagtacaaagagagctctccgatgaattaggaaggaaaatggaattcttctatagtttttttttctactccaaagtttgaccttaatgtactttttcaggccttttcgtaatctttgctatattacggggcgaaaattatatgtacggacattgttttcgtatattttgcatgtatcaaagctcttataaacaagatagggtattcctacatagctggtgggacccaaggcaaatcgatcataaagtcttcaaaaaagaatagataagattgcattgcatgtagttacaaatgcgatcataccaacactaacgcaccagatcccatcagaactctgcagttaagcgtacttgggcgagagtagtactaggatgggtgacctccagaaaagtcctcgtgtgtcatccctctttttgttttgttaaaaatgtatgactctataactttaagaccgtgaggccaaacttgacatgtgataccttttcggaaagcccaaagagagctctccgatgaatgaggaaggaaaatggaattcttgtatttgtttttttccttctccaaattttgattgtaatgtactttttcgagccttttcattatctttgctatattacggggccaaaattatatgttcggacattattttcgaatattttgcatgtatcaaagctcttataaaccagatagggtattcctacacagctggtgggacccacggcaaatggatcataaagtcttcaaaacagaatagatacaattgcattgcatgtagtaacggatgcgatcataccagcactaatccaccagatcccatcagaaatccgtagttaagcgtgcttgggcgagagtagtactaggattggtgaccacctggaaagtcctcgtgttgcatccctctttttttttggtttttctctttttgttttgtcaaaaatgtatgactctagaacttttagaccgtgaggccaaacttggcatgtgataccttttcggaaagcccaaagagagctctccgatgaactaggaaggaaaatggaattcttctatagtttctttttctactccaaattttgaccttaatgtactttttcgggccttttcgtaatctttgttatattacgcggcgaaaattatatgtacggacattgttttcgtatattttgcatgtatcagagctcttataaacaagatagggtattcctacatagctggtgggacccacggcatatcgatcattaagtcttcaaaaaagaataaatacgattgcattacatgtagttacggatcgatcataccagcaccaatgcaccagatcccatcagaactctgcagttaaacgtgctnnnnnnnnnnnnnnnnnnnnnnnnnnnnnnnnnnnnnnnnnnnnnnnnnnnnnnnnnnnntgttttgttaaacatgtatgactttataactttaagaccgtgaggccaaactttacatgtgataccttttcggaaagcccaaagagagctctccgatgaatgaggaaggaaaatggaattcttttattggtttttttttcttactccaaattttgattttaatgtactttttcgagccttttcgtgatctttgctatattacgggcgaaaattatatgttcggacattgttttcgaatattttgcatgtatcaaagctcttataaacaagataaggtattcctacatagttggtgaaacccacggcaaatggatcataaagtcttcaaaaaagaattgatacgattgcattgcatgtagtaacgaatacgatcataccagcactaatgcaccagatcccatcagaactccgcagttaagcgtgcttgggcgagagtagtactaggatgggtgacctcctggaaagtctttgtgttgcatccctcttttttttcggtttttctctttttttttggtcaaaaatgtatgactctagaacttttagaccctgaggcatgtgataccttttcggaaagcccaaagagagctctccgatgaataaggaaggaaaatggaattcttctatagttttttttttctactccaaagtttgaccttaatgtactttttcgggtcttttgtaatctttgctatattacagggcgaaaattatatgttcggacattgtattcgaatgttttgcatgtatcaaagctcttataaacaagatagggtattcctacatagctggtgggacccacgccaaatcgatcataaagttttcaaaaaagaatagatacgattgcattgcatgtagttacggatgcgatcataccagcactaatgcatcagatcccatcagaactccgcagttaagcgtgcttgggcgagagtagtactagggtgggtgacctccaggaaagtcctcgtgtgtcatccctctttttttttggtttttctctttttttttgttaaaaatgtatgactctataacagactgtgaggccaaacttgacatgtgataccttttcggaaagcccaaagagagctctccgatgaatgaggaaggaaaatggaatttttctattgttttttttcctactccaaattttgattttaatgtactttttcgagccttttcgttatctttgctatattacagggcgaaaattatatgttcggacattagtttcgaatattttgcatgtatcagacctctcataaacaagatagggtattcctacacagctggtgggacccacggcatatcgatcattaagtcttcaaaaaagaataaatacgattgcattacatgtagttacggatgcgatcataccagcaccaatgcaccagatcccatcagaactctgcagttaagcgtgcttgggcaagagtagtactaggatgggtgacctccaggaaagtcctcgtgtgtcatccctctttttgttttgttaaacatgtatgactctataactttaagaccgtgaggccaaactttacatgtgataccttttcggaaagcccaaagagagctccccgatgaattaggaaggaaaatggaattcttctatagtttttttttctactccaaattttgaccttaatgtactttttcaggccttttcgtaatctttgctatattacggggcaaaatttatatttacggacattgttttcgtatattttgcatgtatcaaagcccttataaacaagatagggtattcctacatagctggtgggacccacggcaaatcgatcataaagtcttcaaaaaagaatagatacgattgcattgcatgtagttacggatgcgatcataccagcactaatgcaccatatcccatcagaactctacagttaagcgtgcttgggtgagagtagtactaggatgggtgacctccaggaaagtcctcgtgtgtcatccctctttttgttttgttataaatgtatgactctataactttaagaccgtgaggccaaacttgacatgtgataccttttcggaaagcccaaagagagctctccgatgaatgaggaaggaaaatggaattcttctattggtttttttccttctccaaattttgattttaatgtactttttagagccttttcgttatctttgttatattacggggccaaaattatatgttcggacattattttcgaatattttgcatgtatcaaacttcttataaacaagatagggtattcctacacagctggtgggacccacggcaaatggatcataaagtcttcaaaaaaaaatagatacaattgcattgcatgtagtaacggatgcgatcataccagcactaatgcaccagatcccatcagaactctgtagttaagcgtgcttgggcgagagtagtactaggatgggtgacctccaggaaagtcctcgtgttgcatccctctttttttcggtttttctctttttttttgtcataaatgtatgactctagaacttttataccgtgaggccaaacttggcatgtgatacctttacggaaagcccaaagagagctctccgatgaattaggaaggaaaatggaattcttctatagttttgttttctactccaaattttgaccttaatgtactttttcgggccttttcgtaatctttgctatattacggggcaaaaattatatgtacggacattgttttcgtatattttgtatgtatcaaagctcttataaacaagatagggtattcctacatagctgaagggacccgcgtcaaatcgatcataaagtcttcaaaaaagaatagatacaattgcattgcatgtagttacggatgcgatcataccagcactaatgcaccagatcccatcagaactctatagttaagcgtgcttggggtagagtagtactaggatgggtgatctccaagaaagtcctcgtgtgtcatccctctttttgttttgttaaaaatgtatgactctataactttaacaccgtgaggccaaacttaacatgtgataccttttcggaaagcccaaagagagctctccgatgaatgaggaaggaaaatggaattcttctattggttttttttcttctccaaattttgattttaatgtacttttttgagccttttcgtgatctttgctatattacggggccaaaattatatgttcggacattattttcgaatattttgcatgtatcaaaactcttataaacaagatagggtattcctacatagctggtgggacccacggcaaatggatcataaagtcttcaaaaaagaatatatacaattgcattgcatgtagtaacggatgcgatcataccagcactaatgcactagatcccatcagaactctgtagttaagcgtgcttgggggagagtagtactaggatgggtgacctcctggaaagttctcgtgttgcatccctctttttttcggtttttctctttttttttttgtcaaaattgtatgactctagaacttttagaccgtgaggccaaacttggcatgtgataccttttcggaaaacccaaagagagctctccgatgaattaggaaggaaaatggaattcttctatagtttttttttctactccaaattttgaccttaatgtactttttcgggccttttcgtaatctttgctatattacggggcaaaatatatatgtacggacattgttttcgtatattttgcatgtatcaaagctcttataaacaagatagggtattcctacatagctggtgggacccacggcaaatcgatcataaagtcttcaaaaaagaatagatacgattgcattgcatgtagttacagatgcgatcataccagcactaatgcaccatatcccatcagaactctacagttaagcgtgcttgggtgagagtattactaggatgggtgacctccaggaaagtcctcgtgtgtcatccctctttttgttttgttaaacatgtatgactttataactttaagaccgtgaggccaaactttacatgtgataccttttcggaaagcccaaagagagctctccgatgaatgaggaaggaaaatggtattcttttattggtttttttttcttactccaaattttgattttaatgtactttttcgagccttttcgtgatctttgctatattacgggcgaaaattatatgttcggacattgttttcgaatattttgcatgtatcaaagctcttataaacaagataaggtattcctacatagttggtgaaacccacggcaaatggatcataaagtcttcaaaaaagaattgatacgattgcattgcatgtagtaacgaatacgatcataccagcactaatgcaccagatcccatcagaactccgcagttaagcgtgcttgggcgagagtagtactaggatgggtgacctcctggaaagtctttgtgttgcatccctcttttttttcggtttttctctttttttttggtcaaaaatgtatgactctagaacttttagaccctgaggcatgtgataccttttcggaaagcccaaagagagctctccgatgaataaggaaggaaaatggaattcttctatagttttttttttctactccaaagtttgaccttaatgtactttttcgggtcttttgtaatctttgctatattacagggcgaaaattatatgttcggacattgtattcgaatgttttgcatgtatcaaagctcttataaacaagatagggtattcctacatagctggtgggacccacgccaaatcgatcataaagttttcaaaaaagaatagatacgattgcattgcatgtagttacggatgcgatcataccagcactaatgcatcagatcccatcagaactccgcagttaagcgtgcttgggcgagagtagtactagggtgggtgacctccaggaaagtcctcgtgtgtcatccctctttttttttggtttttctctttttttttgttaaaaatgtatgactctataacagactgtgaggccaaacttgacatgtgataccttttcggaaagcccaaagagagctctccgatgaatgaggaaggaaaatggaatttttctattgttttttttcctactccaaattttgattttaatgtactttttcgagccttttcgttatctttgctatattacagggcgaaaattatatgttcggacattagtttcaaatattttgcatgtatcagacctctcataaacaagatagggtattcctacacagctggtgggacccacggcatatcgatcattaagtcttcaaaaaagaataaatacgattgcattacatgtagttacggatgcgatcataccagcaccaatgcaccagatcccatcagaactctgcagttaagcgtgcttgggcaagagtagtactaggatgggtgacctccaggaaagtcctcgtgtgtcatccctctttttgttttgttaaacatgtatgactctataactttaagaccgtgaggccaaactttacatgtgataccttttcggaaagcccaaagagagctccccgatgaattaggaaggaaaatggaattcttctatagtttttttttctactccaaattttgaccttaatgtactttttcaggccttttcgtaatctttgctatattacggggcaaaatttatatttacggacattgttttcgtatattttgcatgtatcaaagcccttataaacaagatagggtattcctacatagctggtgggacccacggcaaatcgatcataaagtcttcaaaaaagaatagatacgattgcattgcatgtagttacggatgcgatcataccagcactaatgcaccatatcccatcagaactctacagttaagcnnnnnnnnnnnnnnnnnnnnnnnnnnnnnnnnnnnnnnnnnnnnnnnnnnnnnnnnnnnncaggccttttcgtaatctttgctatattacggggcgaaaattatatgtacggacattgttttcgtatattttgcatgtatcaaagctcttataaacaagatagggtattcctacatagctggtgggactcacggcaaatcgatcataaagtcttcaaaaaagaatagatacgattgcattgcatgtagttacagatgtgatcataccagcactaatgcatcagatcccatcagaactctgcaattaagcgtgcttggacgagagtagtactaggatgggtgacctccaggaaagtcctcgtgtgtcatccctctttttgttttgttaaacatgtatgactctataactttaagaccgtgaggccaaacttgacatgtgataccttttcggaaagcccaaagagagctctccgatgaatgaggaaggaaaatggaattcttctattggttttttttcttactccaaattttgattttaatgtactttttcgagccttttcgtgatttttgctatattacgggcgaaaattatatgttcggacattgttttcgaatattttgcatgtatcaaagctcttataaacaagataaggtattcctacatagttggtgaaacccacgacaaatggatcataaagtctttaaaaaagaatagatacgattgcattgcatgtagtaatgaatgcaatcatagcagcactaatgcaccagatcccaacagaactccgcacttaagcgtgctttggcgagagtagtactagcatgggtgaccacctggaaagtcctcgtgttgcatccctctttttttttggtttttctctttttgttttgtcaaaaatgtatgactctagaacttntagaccgtgaggctaaacttgacatgtgataccttttcggaaagcccaaagagagctctccgatgaatgagtaaggaaaatggaattcttctatttgtttttttccttctccaaattttgattgtaatgtactttttcgagccttttcattatctttgctatattacggggccaaaattatatgttcggacattgttttcgaatattttgcatgtatcaaagctcttataaacaagatagggtattcctacacaggtggtgggacccacggcaaatggatcataaagtcttcaaaaaagaatagatacaattgcattgcatgtagtaacggatgcgatcataccagcactaatccaccagatcccatcagaactacgtagttaagcgtgcttgggcgagagtagtactaggatgggtaacctcctggaaagtcctcgtgttgcatccctctttttttttggtttttctctttttgttttgtcaaaaatgtatgactctagaacttttagaccgtgaggccaaacttggcatgtgataccttttcggaaagcccaaagagagctctccgatgaattaggaaggagaatggaattcttctatagtttttttttctactccaaattttgaccttaatgtactttttcgggccttttcgtaatctttgttatattacggggcgaaaattatatgtacggacattgttttcgtatattttgcatgtatcaaagctcttataaacaagatagggtactcctacatagctggtgggacccacggcaaatcgatcataaagtcttcaaaaaagaataaatacgattgcattgcatgtagttacagatgcgatcatactagcactaatgcaccaggtcccatcagaactttacagttaagcgtgcttgggcgagagtagtactaggatgggtgacctccaggaaagtcctcgtgtgtcatccctctttttgttttgttaaaaatgtatgactctataactttaagaccgtgaggccaaacttgacatgtgataccttttcggaaagcccaaagagagctctccgatgaatgaggaaggaaaatggaattcttctattgttttttttccttctccaaattttgattttaatataatttttcgagccttttcgttatatttgctatattacggggccaaaattatatgttcggacattattttcgaatattgtacatgtatcaaagctcttataaacaagatagggtattcctacacagctggtgggacccacggcaaatggatcataaagtcttcaaaaaaaaatagatacaattgcattgcatgtagtaatggatgcgatcataccatcactaatgcactaaatcccatcagaactccgtagttaagcgtgcttgggcgagagtagtactaggatgggtgacctcatggaaagtcctcgtgttttatccctctttttttcggtttttctcttttttttttgtcaaaaatgtatgactctagaacttttagaccgtgaggccaaacttggcatgtgatactttttcggaaagcacaaagagagctctccgatgaattaggaaggaaaatggaattcttctatagtttttttttctactccaaagtttgaccttaatgtactttttcgggccttttcgtaatctttgctatattacggggcgaaaattatatgtacggacattgttttcgtatattttgcatgtatcaaagctcttataaacaagatagggtattcctacatagctggtgggacccacggcaaatcgatcataaagtcttcaaaaaagaataaatacgattgcattgcatgtagttacggatgcgatcatactagcactaatgcaccaggtcccatcagaactctacagttaagcgtgcttgggcgagagtagtactaggatgggtgacctccaggaaagtcctcgtgtgtcatccctctttttgttttgttaaaaatgtatgactctataactttaagaccgtgaggccaaacttgacatgtgataccttttcggaaagcccaaagagagctctccgatgaatgaggaaggaaaatagaattcttctatagttttttttccttctccaaattttgattttaatataatttttcgagccttttcgttatatttgctatattacggggccaaaattatatgttcggacattattttcgaatattttgcatgtatcaaagctcttataaacaagatagggtattcctacacagctggtcggacccacggtaaatggatcataaagtcttcaaaaaaaaatagatacaattgcattgcatgtagtaacggatgtgatcataccagcactaatgcaccagatcccatcagaactccgtagttaagcgtgcttgggcgagagtagtactaggatgggtgacctcatggaaagtcctcgtgttttatccctttttttcggtttttctcttttttttatgtcaaaaatgtatgactctagaacttttagaccgtgaggccaaacttggcatgtgatactttttcggaaaggacaaagagagctctccgatgaattaggaaggaaaatggaattcttctatagtttttttttctactccaaagtttgaccttaatgtactttttcaggccttttcgtaatctttgctatattacggggcgaaaattatatgtacggacattgttttcgtatattttgcatgtatcaaagctcttataaacaagatagggtattcctacatagctggtgggactcacggcaaatcgatcataaagtcttcaaaaaagaatagatacgattgcattgcatgtagttacagatgtgatcataccagcactaatgcatcagatcccatcagaactctgcaattaagcgtgcttggacgagagtagtactaggatgggtgacctccaggaaagtcctcgtgtgtcatccctctttttgttttgttaaacatgtatgactctataactttaagaccgtgaggccaaacttgacatgtgataccttttcggaaagcccaaagagagctctccgatgaatgaggaaggaaaatggaattcttctattggttttttttcttactccaaattttgattttaatgtactttttcgagccttttcgtgatttttgctatattacgggcgaaaattatatgttcggacattgttttcgaatattttgcatgtatcaaagctcttataaacaagataaggtattcctacatagttggtgaaacccacgannnnnnnnnnnnnnnnnnnnnnnnnnnnnnnnnnnnnnnnnnnnnnnnnnnnnnnnnnnnccttcctcattcatcggagagctctctttgggctttccgaaaaggtatcacatgtcaagtttggcctcacggtcttaaagttatagagtcatacatttttaacaaaacaaaaagagggatgacacacgaggactttccttgaagtcacccatcctagtaatactctcacccaagcacgcttaactgtagagttctgatgggatatggtgcattagtgctggtatgatcgcatctgtaactacatgcaatgcaatcgtatctattcttttttgaagactttatgatcgatttgccgtgggtcccaccagctatgtaggaataccctatcttgtttataagagctttgatacatgcaaaatatacgaaaacaatgtccgtacatataatttttgccccgtaatatagcaaagattacgaaaaggcccgaaaaagtacattaaggtcaaaatttggagtagaaaaaaaaactatagaagaattccattttccttcctaattcatcggagagctctctttgggttttccgaaaaggtatcacatgccaagtttggcctcacggtctaaaagttctagagtcatacaattttgacaaaaaaaaaaagagaaaaaccgaaaaaaagagggatgcaacacgagaactttccaggaggtcacccatcctagtactactctcccccaagcacgcttaactacagagttctgatgggatctagtgcattagtgctggtatgatcgcatccgttactacatgcaatgcaattgtatatattcttttttgaagactttatgatccatttgccgtgggtcccaccaggtatgtaggaataccctatcttgtttataagagttttgatacatgcaaaatattcgaaaataatgtccgaacatataattttggccccgtaatatagcaaagatcacgaaaaggctcaaaaaagtacattaaaatcaaaatttggagaagaaaaaaaaccaatagaagaattccattttccttcctcattcatcggagagctctctttgggctttccgaaaaggtatcacatgttaagtttggcctcacggtcttaaagttctagagtcatacaattttgacaaaaaaaaagagaaaaaccgaaaaaaagagggatgcaacacgagaactttccaggaggtcacccatcctagtactactctcccccaagcacgcttaactacagagttctgatgggatctagtgcattagtgctggtatgatcgcatccgttactacatgcaatgcaattatatatattcttttttgaagactttatgatccnnnnnnnnnnnnnnnnnnnnnnnnnnnnnnnnnnnnnnnnnnnnnnnnnnnnnnnnnnnnactatagaagaatgccattttccttcctaattcatcggagagctctctttgggtgttcggagaaggtatcacatgccgagtttggcctcacggtctaaaagttctagagtcagtacaattttgacaaaaatatagagaaaagccgaataaaagagggatgcaacacgagaacttttcaggaggtcacccatcctagtacgactctcccccaagcacgcttaactacagagttatgatgggatctagtgcattagtgctggtatgatcgcatccgttactacatgcaatgcaattatatatattcttttttgaagactttatgatccatttgccgtgggtcccaccagctatataggactaccctatcttgtttataagagttttgatacatgcaaaaaatattcgaaaataatgtccgaacatataattttggccccgtaatatagcaaagatcacgggaaggctcgaaaaagtacattaaaatcaaaatttggagaaggaaaaaaaccaacagaagaattccattttccttcctcattcatctgagagctctctttgggctttccgaaaaggtatcacatgtcaagtttggcctcacggtcttaaagttatagagtcatacatttttaacaaaacaaaaagagggatgacacacgaggactttccttgaggtcacccatcctagtactactctcacccaagcacgcttaactgtagagttctgatgggatatggtgcattagtgctggtatgatcgcatctgtaactacatgcaatgcaattgtatctattcttttttgaagactttatgatcgatttgccgtgggtcccaccagctatgtaggaataccctatcttgtttataagagctttgatacatacaaaatatacgaaaacaatgtccgtacatataatttttgccccgtaatatagcaaagattacgaaaaggcccgaaaaagtacattaaggtcaaaatttggagtagaaaaaaaaactatagaagaattccattttccttcctaattcatcggagagctctctttgggctttccgaaaaggtatcacatgccaagtttggcctcacggtataaaagttctagagtcatacatttttgacaaaaaaaaagagaaaaaccgaaaaaaagagggatgcaacacgaggactttcctggaggtcacccatcctagtactactctcgcccaagcacgcttaactacagagttctgatgggatctggtgcattagtgctggtatgatcgcatccgttactacatgcaatgcaattgtatctatttttttttgaagactttatgatccatttgccgtgggtcccaccagctgtgtaggaataccctatcttgtttataagatgtttgatacatgcaaaatattcgaaaataatgtccgaacatataattttggccccgtaatatagcaaagataacgaaaaggctcgaaaaagtacattaaaatcaaaatttggagaaggaaaaaaaccaatagaagaattccattttccttcctcattcatcggagagctctctttaggctttccgaaaaggtatcacatgtcaagtttggcctcacggtcttaaagttatagagtcatacatttttaacaaaacaaaaagagggatgacacacgaggactttccttgaagtcacccatcctagtaatactctcacccaagcacgcttaactgtagagttctgatgggatatggtgcattagtgctggtatgatcgcatctgtaactacatgcaatgcaatcgtatctattcttttttgaagactttatgatcgatttgccgtgggtcccaccagctatgtaggaataccctatcttgtttataagagctttgatacatgcaaaatatacgaaaacaatgtccgtacatatatattttgccccgtaatatagcaaagattacgaaaaggcccgaaaaagtacattaaggtcaaaatttggagtagaaaaaaaaactatagaagaattccattttccttcctaattcatcggagagctctctttgggttttccgaaaaggtatcacatgccannnnnnnnnnnnnnnnnnnnnnnnnnnnnnnnnnnnnnnnnnnnnnnnnnnnnnnnnnnntaagaataagaaaaagaaaanaaaaaaaaaaaaaaaaaaaaaaaactccatagagttgttttctcaatcgggtccgaggaatcgtcgatctggacttggaatcgtcgagaaaagtttaccgggtccgagggtttgtcgaccaggacgaggaatcgtcgaccgggtccgaggatttgtcgaccaggggttgaaatcgtcgaccaggtccgagacttcatcgaccgggtccgaggaatcgtcgaccaggacgatgaatggtcgatgaaaatctatcgggttcgaggaatggtcgaccaggggttgaaatcgtcgaccaggtccgagacttcatcgaccgtgtccgaggagtggtcgagggtttgtcgaccaggacgaggaatcgtcgaccgggtccgaggatttgtcgaccaggggttgaaatcatcgaccaggtccgagacttcatcgaccgggtccgaggattcgtcgaccaggacgatgaatggtcgatgaaaatctatcgggttcgaggaatggtcgaccaggggttgaaatcgtcgaccaggtccgagacttcatcgaccgtgtccgaggagtggtcgaggatttgtcgaccaggagttgaaatcgtcgaccgggaccgagaattcgtcgaccaggacggcggaatgctcgaccaggacgatgaatgggcgatgaaaatctatcgggatagaggaatggtcgaccagaagttggaatcgtcgaccgggtccgagaattcgtcgaccaggacgaggagtggtcgaggatttgtcgaccaggagttgaaatcgtcgaccgggtccgagaattcgtcgaccaggacggcggaaccctcgaccaggacgatgaatgggcgatgaaaatctatcgggttcgaggaatggtcgaccagaagttgaaatcgtcgaccgggtccgagaattcgtcgaccaggccgaggagtggtcgaggatttgtcgaccaggagttgaaatcgtcgaccgggaccgagaattcgtcgaccaggacggcggatccctcgaccaggacgatgaatgggcgatgaaaatctatcgggttcgaggaatggtcgaccaggggttgaaatcgtcgaccaggtccgagacttcatcgaccgggtccgaggattcgtcgaccaggacggccnnnnnnnnnnnnnnnnnnnnnnnnnnnnnnnnnnnnnnnnnnnnnnnnnnnnnnnnnnnnccctcagtaggagcttaggctcccaaaggcacgtgtcgttggctaagtccgttcggcggaagcgtcgttcggaccgccttgaattataattaccaccgagcggcgggtagaatcctttgcagacgacttaaatacgcgacggggtattgtaagtggcagagtggccttgctgccacgatccactgagattcagccctttgtcgctaagattcgaccctcccctaaatcactccaaaaaaaacaatccccaattctacacaagtgtttctacactaacaaagcaacagctccttaacgaattcccaactttacacgagctcgtctctcgaggttaaatgttattacttggtaagattccggacctcgccaagtgttttgaaaacccgcaacgctcgcaaaggtgcatagtgagaataataagtgaagagacagacttgtccaaaacgcccaccacgaaggtgcatagtgagaagagtaagtcaagagatagacttgtccaaaaagaaacggaagagaaagcttggggagacgctcacgaaggtgcatagtgagaagagtaagtcaagagatagacttgttcaaaaagaaacacaagagaatgcttggggttacactcacgaaggtgcatagtgagaagagtaagtcaagagatagacttgttcaaaaagaaacagaagagaatgcttggggttacactcacgaaggtgcatagtgagaagagtaagtcaagagacagacttgttcaaaaagaaacaaaagagaatgcttggggagatagaagtgtgagatagttctcaagctaagaaagttgtaaaagctaagaactagcaagtaatcgtccaggattcctccaccaggacttgaaatcgtcgagggaaaaaaatcggttccgaggaatcgtcgatccggacttggaatcgtcgagaaaagtttaccgggtccgaggatttgtcgaccaggagtggaaatcgtcgagaaaaatctatcgggtccgaggaatcgtcgaccaggacgaggaatcgtcgacagggtccgaggatttgtcgaccaggggttgaaatcgtcgaccaggtccgagacttcatcgaccgggtccgaggatttgtcgaccaggagtggaaatcgtcgagaaaaatctatcgggtccgaggaatcgtcgaccaggacgaggaatcgtcgaccgggtccgaggatttgtcgaccaggggttgaaatcgtcgaccaggtccgagacttcatcgaccgggtccgaggattcgtcgaccaggtccgagacttcatcgaccgggtccaagtatttgatttttttttggaaccggtgtctcctcagacatttcaatgtatgttggtgccaagagggaaaagggctataaagctatataggggtgggtgtgtgtagcgggaattttgcccgcacgcgcgcgcgcgaataagaataagaataagtaataagaataagaataagaaaaagaaaaaaaaaaaaaaaaaaaaaaaaaaaaaactccatagagttgttttctcaatcgggtccgaggaatcgtcgatctggacttggaatcgtcgagaaaagtttaccgggtccgagggtttgtcgaccaggacgaggaatcgtcgaccgggtccgaggatttgtcgaccaggggttgaaatcgtcgaccaggtccgagacttcatcgaccgggtccgaggaatcgtcgaccaggacgatgaatggtcgatgaaaatctatcgggttcgaggaatggtcgaccaggggttgaaatcgtcgaccaggtccgagacttcatcgaccgtgtccgaggagtggtcgagggtttgtcgaccaggacgaggaatcgtcgaccgggtccgaggatttgtcgaccaggggttgaaatcgtcgaccaggtccgagacttcatcgaccgggtccgaggattcgtcgaccaggacgatgaatggtcgatgaaaatctatcgggttcgaggaatggtcgaccaggggttgaaatcgtcgaccaggtccgagacttcatcgaccgtgtccgaggagtggtcgaggatttgtcgaccaggagttgaaatcgtcgaccgggaccgagaattcgtcgaccaggacggcggaatgctcgaccaggacgatgaatgggcgatgaaaatctatcgggatagaggaatggtcgaccagaagttggaatcgtcgaccgggtccgagaattcgtcgaccaggacgaggagtggtcgaggatttgtcgaccaggagttgaaatcgtcgaccgggtccgagaattcgtcgaccaggacggcggaaccctcgaccaggacgatgaatgggcgatgaaaatctatcgggttcgaggaatggtcgaccagaagttgaaatcgtcgaccgggtccgagaattcgtcgaccaggccgaggagtggtcgaggatttgtcgaccaggagttgaaatcgtcgaccgggaccgagaattcgtcgaccaggacggcggatccctcgaccaggacgatgaatgggcgatgaaaatctatcgggttcgaggaatggtcgaccaggggttgaaatcgtcgaccaggtccgagacttcatcgaccgggtccgaggattcgtcgaccaggacggccggatgtccgagaaaaaaaaatgttgccgaataactttcgaaaatcattggatatgatgcaatgttttgtgatcgaatctcttaaaatacatcaataaagagtttaggatgtcaagtttgcatcaaatatgcccacggagccccaactagaccatgaaaatccgatgttgtatcaggtcaaatgacctagctagaggtgtcagaaaattatgtaaatttaccagaaaataggatttagtatccttatgatgcatgccaaaaagaattttcaaattccaagtatttctttttttttggcaccggtgtctcctcagacatttcaatgtctgttggtgccaagagggaaaagggctattaagctatataggggggtgggtgttgagggagtctgggcagtccgtgggaaccccctttatcggttcggacttgggtagcgatcgagggatggtatcggatatcgacacgaggaatgaccgaccgtccggccgccgggattttcgccggaaaacttttccggcgacttttccggcgatcggttttgttgcctttttccgagttttctcagcagttctcggacaaaaactgctgaatcgtcgaggagaatgggcttgccttgcgtgggctgccattagttcttcgaggcgttagggtggcggcggtataaaagtgtcggagttttttcagcagttctcggacaaaaattgctgagtggccgagaagaatgggcgtgtcatgcgtgggctgacatggattcttcgaggcctaggggtggcggtatataacttgttcgcatgatattaccgagatgtccccacgggcatcttttcacctcgtcgccgaagagaatgggcgtgtcatgcatgggctgacatggattctcctaggccgtttgggtggcggtatagtcgtcctgcgcacgaaataccgagatgtccccatgggcatcgattccacccgcctaggttggatgggcgtgcttcgttggaaagcatggatccgcctaggctgtcccgagtgtgagcgaggtgtgagtgtcgcccatgggcatcgacaccttgcggctaggaactggaacgagacgggtggcaaagatttcgagtagcacttcatactaccgtgggttttttaaaccttcccctagttttgtcgatgttattccgagaattagcaaaccgtaacgaagatgttcttggcaaccatcttttgatgggagtccggctgttcgatagccggccaagggtgatgaacgaaatgtgaacccttgtctcgcctaggttggatgggcgtgcttcgttggaaagcatggatccgcctaggctgtcccgagtgtgagcgaggtgtgagtgtcgcccatgggcatcgacaccttgcggctaggaactggaacgagacgggtagcaaagatttcgagtagcacttcatactaccgtgggttttttaaaccttcccctagttttgttgatgttattccgagaattagcaaaccgtaacgaagatgttcttggcaaccatcttttgatgggagtccggctgttcgaaagccggccaagggtgatgaacgaaatgtgaacccttgtctcgcctaggttggatgggcgtgcttcgttggaaagcatggatccgcctaggctgtcccgaaggtatctcgcgcttgtacggctttggctcggattcgtccgtcttctttcttcttagccgagtacttcggtagattagttggaacgattgatgattttgagttaattgaacgttcggcgtatgagtggtgatcggatagctagtgttcgtaggctccatgctcgcgcatcgaactacctaccacctatccttctcagttaattcacgggcgatgttacgctcgatgatgagttccggggcctgtgtttcgtacctaatttgaaggaattgttgagttcggtttacacccatgcccgcggcttctccttcgtggggaagtcgtgggcacaaacatcggcgcttgttcacctctcgtcatcgcatttgttgccttgctcgcattggtgaatgagttgcgggttgatatctcggatgcggaaaagttgtcgacggtgactcgaagtgattcagtcccgccaaagctcatccgtccttcgggcaaaagatgacggtcaagacctcgtcctttctctctttccattgcgtttgagaggatgtggcggggaattgccgtgatcgatgaatgctacctggttgatcctgccagtagtcatatgcttgtctcaaagattaagccatgcatgtgtaagtatgaacgaattcagactgtgaaactgcgaatggctcattaaatcagttatagtttgtttgatggtaactactactcggataaccgtagtaattctagagctaatacgtgcaacaaaccccgacttatggaagggacgcatttattagataaaaggtcgacgcgggctctgcccgttgctctgatgattcatgataactcgacggatcgcatggcctctgtgctggcgacgcatcattcaaatttctgccctatcaactttcgatggtaggatagtggcctaccatggtggtaacgggtgacggagaattagggttcgattccggagagggagcctgagaaacggctaccacatccaaggaaggcagcaggcgcgcaaattacccaatcctgacacggggaggtagtgacaataaataacaataccgggctctttcgagtctggtaattggaatgagtacaatctaaatcccttaacgaggatccattggagggcaagtctggtgccagcagccgcggtaattccagctccaatagcgtatatttaagttgttgcagttaaaaagctcgtagttgaaccttgggatgggtcggccggtccgcctttggtgtgcattggtcggcttgtcccttcggtcggcgatacgctcctggtcttaattggccgggtcgtgcctccggcgctgttactttgaagaaattagagtgctcaaagcaagcctacgctctggatacattagcatgggataacatcataggatttcgatcctattgtgttggccttcgggatcggagtaatgattaacagggacagtcgggggcattcgtatttcatagtcagaggtgaaattcttggatttatgaaagacgaacaactgcgaaagcatttgccaaggatgttttcattaatcaagaacgaaagttgggggctcgaagacgatcagataccgtcctagtctcaaccataaacgatgccgaccagggatcagcggatgttgcttataggactccgctggcaccttatgagaaatcaaagtttttgggttccggggggagtatggtcgcaaggctgaaacttaaaggaattgacggaagggcaccaccaggagtggagcctgcggcttaatttgactcaacacggggaaacttaccaggtccagacatagtaaggattgacagactgagagctctttcttgattctatgggtggtggtgcatggccgttcttagttggtggagcgatttgtctggttaattccgttaacgaacgagacctcagcctgctaactagctacgtggaggcatcccttcacggccggcttcttagagggactatggccgtttaggccaaggaagtttgaggcaataacaggtctgtgatgcccttagatgttctgggccgcacgcgcgctacactgatgtattcaacgagttcacaccttggccgacaggcccgggtaatctttgaaatttcatcgtgatggggatagatcattgcaattgttggtcttcaacgaggaattcctagtaagcgcgagtcatcagctcgcgttgactacgtccctgccctttgtacacaccgcccgtcgctcctaccgattgaatgatccggtgaagtgttcggatcgcggcgacgtgggtggttcgccgcccgcgacgtcgcgagaagtccactaaaccttatcatttagaggaaggagaagtcgtaacaaggtttccgtaggtgaacctgcggaaggatcattgtcgatacctgtccaaaacagaacgacccgcgaaccaaagatcaccactctcggtgggccggtttcttagccgattccttgcccgccggatccgtggtttcgcgtatcggcatgatcgggagcttttatctcggtcttgtcgtgcgcgttgcttccggatatcacaaaaccccggcacgaaaagtgtcaaggaacatgcaaacgaacggctggcattcgcctccccggagacggagtgtgggcggatgctgtgccgcgaactgaagtctaaaacgactctcggcaacggatatctcggctctcgcatcgatgaagaacgtagcgaaatgcgatacttggtgtgaattgcagaatcccgtgaaccatcgagtctttgaacgcaagttgcgccccaagccttctggccgagggcacgtctgcctgggtgtcacaaatcgtcgtccctcaccatcctttgctgatgcgggacggaagctggtctcccgtgtgttaccgcacgcggttggcctaaatccgagccaaggacgcctggagcgtaccgacatgcggtggtgaacttgatccattacattttatcggtcgctcttgtccgaaagctgtagatgacccaaagtccatatagcgaccccaggtcaggcgggattacccgctgagtttaagcatatcaataagcggaggaaaagaaactaacaaggattcccttagtaacggcgagcgaaccgggaagagcccagcttgaaaatcggacgtcttcggcgttcgaattgtagtctggagaagcgtcctcagcgacggaccgggcctaagttccctggaaaggggcgccagagagggtgagagccccgtcgtgcccggaccctgtcgcaccacgaggcgctgtctacgagtcgggttgtttgggaatgcagccccaatcgggcggtaaattccgtccaaggctaaatacgggcgagagaccgatagcgaacaagtaccgcgaggtaaagatgaaaaggactttgaaaagagagtcaaagagtgcttgaaattgtcgggagggaagcggatgggggccggcgatgcgtcctggtcggatgcggaacggagcaatccggtccgccgatcgattcggggcgtggaccgacgcggattacggtggcggcctaagcccgggcttttgatacgcttgtggagacgtcgctgccgtgatcgtggtctgcagcacgcgcctaacggcgtgcctcggcatcagcgtgctccgggcgtcggcctgtgggctccccattcgacccgtcttgaaacacggaccaaggagtctgacatgtgtgcgagtcaacgggtgagtaaacccgtaaggcgcaaggaagctgattggcgggatccctcgcgggtgcaccgccgaccgaccttgatcttctgagaagggttcgagtgtgagcatgcctgtcgggacccgaaagatggtgaactatgcctgagcggggtaaagccagaggaaactctggtggaagcccgcagcgatactgacgtgcaaatcgttcgtctgacttgggtataggggcgaaagactaatcgaaccatctagtagctggttccctccgaagtttccctcaggatagctggagctcggacgcgagttctatcgggtaaagccaatgattagaggcattgggggcgcaacgccctcgacctattctcaaactttaaataggtaggacgtgtcggctgctttgttgagccgtcacacggaatcgagagctccaagtgggccatttttggtaagcagaactggcgatgcgggatgaaccggaagccgggttacggtgcccaactgcgcgctaacctagaacccacaaagggtgttggtcgattaagacagcaggacggtggtcatggaagtcgaaatccgctaaggagtgtgtaacaactcacctgccgaatcaactagccccgaaaatggatggcgcttaagcgcgcgacctatacccggccgtcggggcaagagccaggcctcgatgagtaggagggcgcggcggtcgctgcaaaacctagggcgcgagcccgggcggagcggccgtcggtgcagatcttggtggtagtagcaaatattcaaatgagaactttgaaggccgaagaggggaaaggttccatgtgaacggcacttgcacatgggttagtcgatcctaagagtcgggggaaacccgtctgatagcgcttaagcgcgaacttcgaaaggggatccggttaaaattccggaaccgggacgtggcggttgacggcaacgttagggagtccggagacgtcggcgggggcctcgggaagagttatcttttctgtttaacagcctgcccaccctggaaacggctcagccggaggtagggtccagcggctggaagagcaccgcacgtcgcgtggtgtccggtgcgcccccggcggcccttgaaaatccggaggaccgagtgccgctcacgcccggtcgtactcataaccgcatcaggtctccaaggtgaacagcctctggtcgatggaacaatgtaggcaagggaagtcggcaaaatggatccgtaacttcgggaaaaggattggctctgagggctgggctcgggggtcccagttccgaacccgtcggctgtcagcggactgctcgagctgcttccgcggcgagagcgggtcgccgcgtgccggccgggggacggactgggaacggctctctcgggagctttccccgggcgtcgaacagtcagctcagaactggtacggacaaggggaatccgactgtttaattaaaacaaagcattgcgatggtccctgcggatgctaacgcaatgtgatttctgcccagtgctctgaatgtcaaagtgaagaaattcaaccaagcgcgggtaaacggcgggagtaactatgactctcttaaggtagccaaatgcctcgtcatctaattagtgacgcgcatgaatggattaacgagattcccactgtccctgtctactatccagcgaaaccacagccaagggaacgggcttggcagaatcagcggggaaagaagaccctgttgagcttgactctagtccgactttgtgaaatgacttgagaggtgtaggataagtgggagcttcggcgcaagtgaaataccactacttttaacgttattttacttactccgtgaatcggaggcggggtacaacccctgtttttggtcccaaggctcgcttcggcgggtcgatccgggcggaggacattgtcaggtggggagtttggctggggcggcacatctgttaaaagataacgcaggtgtcctaagatgagctcaacgagaacagaaatctcgtgtggaacaaaagggtaaaagctcgtttgattctgattttcagtacgaatacgaaccgtgaaagcgtggcctatcgatcctttagaccttcggaatttgaagctagaggtgtcagaaaagttaccacagggataactggcttgtggcagccaagcgttcatagcgacgttgctttttgatccttcgatgtcggctcttcctatcattgtgaagcagaattcaccaagtgttggattgttcacccaccaatagggaacgtgagctgggtttagaccgtcgtgagacaggttagttttaccctactgatgcccgcgtcgcgatagtaattcaacctagtacgagaggaaccgttgattcgcacaattggtcatcgcgcttggttgaaaagccagtggcgcgaagctaccgtgcgctggattatgactgaacgcctctaagtcagaatccgggctagaagcgacgcatgcgcccgccgcccgattgccgaccctcagtaggagcttaggctcccaaaggcacgtgtcgttggctaagtccgttcggcggaagcgtcgttcggaccgccttgaattataattaccaccgagcggcgggtagaatcctttgcagacgacttaaatacgcgacggggtattgtaagtggcagagtggccttgctgccacgatccactgagattcagccctttgtcgctaagattcgaccctcccctaaatcactccaaaaaaaacaatccccaattctacacaagtgtttctacactaacaaagcaacagctccttaacgaattcccaactttacacgagctcgtctctcgaggttaaatgttattacttggtaagattccggacctcgccaagtgttttgaaaacccgcaacgctcgcaaaggtgcatagtgagaataataagtgaagagacagacttgtccaaaacgcccaccacgaaggtgcatagtgagaagagtaagtcaagagatagacttgtccaaaaagaaacggaagagaaagcttggggagacgctcacgaaggtgcatagtgagaagagtaagtcaagagatagacttgttcaaaaagaaacagaagagaatgcttggggttacactcacgaaggtgcatagtgagaagagtaagtcaagagatagacttgttcaaaaagaaacagaagagaatgcttggggttacactcacgaaggtgcatagtgagaagagtaagtcaagagacagacttgttcaaaaagaaacaaaagagaatgcttggggagatagaagtgtgagatagttctcaagctaagaaagttgtaaaagctaagaactagcaagtaatcgtccaggattcctccaccaggacttgaaatcgtcgagggaaaaaaatcggttccgaggaatcgtcgatccggacttggaatcgtcgagaaaagtttaccgggtccgaggatttgtcgaccaggagtggaaatcgtcgagaaaaatctatcgggtccgaggaatcgtcgaccaggacgaggaatcgtcgacagggtccgaggatttgtcgaccaggggttgaaatcgtcgaccaggtccgagacttcatcgaccgggtccgaggatttgtcgaccaggagtggaaatcgtcgagaaaaatctatcgggtccgaggaatcgtcgaccaggacgaggaatcgtcgaccgggtccgaggatttgtcgaccaggggttgaaatcgtcgaccaggtccgagacttcatcgaccgggtccgaggattcgtcgaccaggtccgagacttcatcgaccgggtccaagtatttgatttttttttggaaccggtgtctcctcagacatttcaatgtatgttggtgccaagagggaaaagggctataaagctatataggggtgggtgtgtgtagcgggaattttgcccgcacgcgcgcgcgcgaataagaataagaataagtaataagaataagaataagaaaaagaaaaaaaaaaaaaaaaaaaaaaaaaaaaactccatagagttgttttctcaatcgggtccgaggaatcgtcgatctggacttggaatcgtcgagaaaagtttaccgggtccgagggtttgtcgaccaggacgaggaatcgtcgaccgggtccgaggatttgtcgaccaggggttgaaatcgtcgaccaggtccgagacttcatcgaccgggtccgaggaatcgtcgaccaggacgatgaatggtcgatgaaaatctatcgggttcgaggaatggtcgaccaggggttgaaatcgtcgaccaggtccgagacttcatcgaccgtgtccgaggagtggtcgagggtttgtcgaccaggacgaggaatcgtcgaccgggtccgaggatttgtcgaccaggggttgaaatcgtcgaccaggtccgagacttcatcgaccgggtccgaggattcgtcgnnnnnnnnnnnnnnnnnnnnnnnnnnnnnnnnnnnnnnnnnnnnnnnnnnnnnnnnnnnngagtcatacatttttaacaaaacaaaaagagggatgacacacgaggactttcctggaggtcacccatcctagtactactctcgcccaagcacgcttaactgtagagttctgatgggacctggtgcattagtgctagtatgatcgcatccgtaactacatgcaatgcaatcgtatttattcttttttgaagactttatgatcgatttgccgtgggtcccaccagctatgtaggaataccctatcttgtttataagagctttgatacatgcaaaatatacgaaaacaatgtccgtacatataattttcgccccgtaatataacaaagattacgaaaaggcccgaaaaagtacattaaggtcaaaatttggagtagaaaaaaaaactatagaagaattccattctccttcctaattcatcggagagctctctttgggctttccgaaaaggtatcacatgccaagtttggcctcacggtctaaaagttctagagtcatacatttttgacaaaacaaaaagagaaaaaccaaaaaaaaagagggatgcaacacgaggactttccaggaggttacccatcctagtactactctcgcccaagcacgcttaactacgtagttctgatgggatctggtggattagtgctggtatgatcgcatccgttactacatgcaatgcaattgtatctattcttttttgaagactttatgatccatttgccgtgggtcccaccacctgtgtaggaataccctatcttgtttataagagctttgatacatgcaaaatattcgaaaacaatgtccgaacatataattttggccccgtaatatagcaaagataatgaaaaggctcgaaaaagtacattacaatcaaaatttggagaaggaaaaaaacaaatagaagaattccattttccttactcattcatcggagagctctctttgggctttccgaaaaggtatcacatgtcaagtttagcctcacggtctaaaagttctagagtcatacatttttgacaaaacaaaaagagaaaaaccaaaaaaaaagagggatgcaacacgaggactttccaggtggtcacccatgctagtactactctcgccaaagcacgcttaagtgcggagttctgttgggatctggtgcattagtgctgctatgattgcattcgttactacatgcaatgcaatcttatctattcttttttaaagactttatgatccatttgtcgtgggtttcaccaactatgtaggaataccttatcttgtttataagagctttgatacatgcaaaatattcgaaaacaatgtccgaacatataattttcgcccgtaatatagcaaagataacgaaaaggctcgaaaaagtacattaaaatcaaaatttggagtaggaaaaaaacagtagaaaaacaccattttccttcctcattcatcggagagctctctttgggctttccgaaaaggtatcacatgtcaagtttggcctcacggtcttaaagttatagagtcatacatttttaacaaaaaaaaagagaaaaaccaaaaaaaaagagggatgacacacgaggactttcctggaggtcacccatgctagtactactctcgcccaagcacgcttaactgcggagttctgatgggatctggtgcattactgctggtatgatcgcattcgttactacatgcaatgcaaacgtatcaattcttttttaaagactttatgatccatttgccgtgggtcccaccatctatgtaggaataccctatcttgtttataagagctttgatacatgcaaaatattcgaaaacaatgtccgaacatataattttcgccccgtaatatagcaaagatcacgaaaaggctcgaaaaagtacattanaatcaaaatttggagtaggaaaaaaacattagaaaaacaccattttccttcctcattcatcggagagctctctttgggctttccgaaaaggtatcacatgtcaagtttggcctcacggtcttaaagttatagagtcatacatttttaacaaaaaaaaagagaaaaaccaaaaaaaaagagggatgacacacgaggactttcctggaggtcacccatgctagtactactctcgcccaagcacgcttaactgcggagttctgatgggatctggtgcattactgctggtatgatcgcattcgttactacatgcaatgcaaacgtatcaattcttttttaaagactttatgatccatttgccgtgggtcccaccatctatgtaggaataccctatcttgtttataagagctttgatacatgcaaaatattcgaaaacaatgtccgaacatataattttcgccccgtaatatagcaaagatcacgaaaaggctcgaaaagtacattaaaatcaaaatttggagtaggaaaaaaaaccaatagaagaattccattttccttcctcattcatcggagaggtctctttgggctttccgaaaaggtatcacatgtcaagtttggcctcacggtcttaaagttataaagtcatacatttttaacaaaaaaaaagagaaaaaccaaaaaaaaagagggatgacacacgaggactttcctggaggtcacccaccctagtactactctcgcccaagcacgcttaactgcggagttctgatgggatctgatgcattaatgctggtatgatagcgtccgttactacatgcaatacaatcgtatctattcttttttgaagactttatgatcgatttgccgtgggtcccaccagctatgtaggaataccctatcttgtttataagagctttgatacatgcaaaatatacgaaaaagatgtccgaacatgtaattttcgccgcgtaatatagcaaagatcacgaaaaggcccgaaaaagtacattaaggtcaaaattttgagtagaaaacaaaaccaatagaaaaattccattttccttcctcattcatcggagagctctctttgggctttccgaaaaggtatcacatgtcaagtttggcctcactgtcttaaatttataaagtcatacatttttaacaaaaaaaaaagagaaaaaccaaaaaaaaagagcgatgcaacacgaggactttcctggaggtcacccatcctagtactactctcgcccaagcacgcttaactgcggagttctgatgggatcttgtgcattagtgctggtatgatcgcatccattactacatgcaatgcaattgtatctatttttttttaaagactttatgatccatttgccgtgggtcccaccagctgtgtaggaataccctatcttgtttataagagctctgatacatgcaaaatattcaaaaataatgtccgaacatataattttggccccgtaatatagcaaagataacgaaaaggctcgaaaaaatactttaaaatcaaaatttggagaaggaaaaaaaccaatagaagaattccattttccttcctcattcatcggagagctctctttgggctttccgaaaaggtatcacatgtcaagtttggcctcacggtcttaaagttatagagtcatacatttttaacaaaacaaaaagagggatgacacacgaggactttcctagaggtcacccatgctagtcctactctcgcccaaccacgcttaactgcagagttctaatgggatctggtgcattagtgctggtatgatcgcatccgtaactacatgcaatgcaatcgtat

SEQ ID NO: 1336 - DNA, 94342 bp, Arabidopsis thaliana
  modified_base (10870)..(10870): a, c, t, g, unknown or other
gaattccattttccttcctcattcatcggagagctctctttgggctttccgaaaaggtatcacatgccaagtttggcctcattgtctaaaagttctagagtcatacatttttgacaaaacaaaagagaaaaacaaaaaaaaaagagggatgcaacacgaggactttccaggaggtcacccatcctagtactactctcgcccaagcacgcttaactgcggagttttgatgggatctggtgcattagtgctggtatgatcgcatccggtactacatgcaatgcaatcgtatatattcttttttgaagactttatgttcgatttgccgtgggtcccaccagctatgtaggaataccttatcttgtttataaaagatttgatacatccaaaatattcgaaaacaatgtccgaacatataattttcgccccgtaatataacaaagatcacgaaaaggcccgaaaaagtacattaaggtcaaaagttggagtagaaaaaaaaaacaatagaagaattccattttgcttcctcattcattggagagctctctttgggctttccgaaaaggtatcacatgccaagtgtttggcatcacggtctaaaagttctagagtcatacatttttgacaaaagaaaaagagaaaaaccgaaaaaaagagggatgaaacacgaggactttcctggaggtcacccatcctagtactactctcgcccaagcacgcttaactgcggtttttttatgggatctggtgcattagtgctggtatgatcgcattcgttactacatgcaatgcaatcgtatctattcttttttgaagactttatgatcaatttgttgtgggtcccaccagctatgtaggaataccctatcttgtttataagagctttgatacatgaaatatattcgaaaacaatgtgcgaacatattatttttgccccgtaatatagcaaagatcacgaaaaggcccgaaaaagtacattaaggtcaaattttggagtagaaaaaaaaaacaatagaagaattccatttttcttcctcattcatcggagagctctctttgggctttccgaaaaggtatcacacgccaagtgtttggcatcacggtctaaaagttctagagtcatacatttttgacaaaagaaaaagagaaaatccgaagaaagtaggtatgcaacacgaggactttcctgaaggtcacccatcctagtactactctcgcctaagcacgcttaactgcggagttcaaatgggatctggtgcattagtgctggtatgatcgcattcgttactacatgcaatgcaatcgtatctattcttttttgaagactttatgatccatttgccgtgggtcccaccatctatgtaggaataccctttcttgtttagaagagctttgatacatgctaaatattcgaaaaaaatgtccgaacatataatttttgccctgtaataaagcaaagatcacgaaaaggcccgaaaagtacattaaggtcaaaattcggagtagaaaaaaaaacaatagaagaattccatttttcttcctcattcatcagagagctctctttgggctttccgaaaaggtatcatatgccaagtgtttggcatcacggtctaaaagttctagagtcatacatttttgacaaaagaaaaagagaaaaaccgaaaaaagagggatgcaacacgaggactttcctagaggtcacccatcctagtactactctcgcccaagcacgcttaactgcggcattcaaatgggatccggtccattagtgctggtatgatcgcatctgttactacatgcaatgcaatcgtatctattcttttttgaagattttatgatccatttgccgtcggtcctaccatctatgtaggaataccctttcttgtttataagagctttgatacatactaaatattcgaaaacaatgtccgaacatataatttccgccccataatatagcaaagatcacaaaaaggcccgaaaaagtacattaaggtcaaaaggtggagtagaaaaaaaaaacaatagaagaattccatttttcttcctcattcatcagagaactctctttagactttccgaaaaggtatcacatgccaagtgtttggcatcacggtctaaaagttctagagtcatacatttttgacaaaagaaaaagagaaaaaccgaaaaaaaagagggatgcaacacgaggactttcctggaggtcacccatcctaatactactctcgcccaagcaggcttaactgcggagttcaaatgggatctggtgcattagtgctggtatgatcgcattcgttactacatgcaatgcaatcgtatgtattcttttttgaagactttatgatccatttgccgtgggtcccaccatctatgtaggaataccctttcttgtttagaagagctttgatacatgctaaatattcgaaaacaatgtccaaacatataattttcgcccggtaatatagcaaagatcacgaaaaggcccgaaaatgtacattaaggtcaaaatttggagtagaaaaaaaaagcaatagaagaattccattttccttcctcattcatcggagagctctctttaggctttccgaaaaggtatcacatgccaagtttggcctcacggtctaaaagttctagagtcatacatttttgacaaaaaaaaaaagagaaaaaccaaaaacaaatagggatgcaacacgtggactttcctggacgtcacccatcctagtactactctcgcccaagcacgcttaactgcggagttttgatgggatctggtgcattagtgctggtatgatcgcatccgttactacatgcaatgcaatcgtatatattcttttttgaagactttatgttcgatttgccgtgggtcccacaagctatctaggaataccctatcttgtttataagagatttgatacatgcaaaatattcgaaaacaatgtccgaacatataattttcgccccgtaatatagcaaagatcacgaaaaggcccgaaaaagtacattaaggtcaaaagttggagtagaaaaaaacacaatagaagaattccattttccttcctcattcatcggagagctctctttgggctttccgaaaaggtatcacatgccaagtttggcctcatggtctaaaagtttcagagtcatacattgttaacaataaaaaaaagagaaaaaccgaaaaaaagagggatgcaacacgaggactttcctagaggtcaccaatcctagtactactctcgcccaagcacgcttaactgcggagttctgatgggatccggtccattagtgctggtatgatcgcatctgttactacatgcaatgcaatcgtatctattcttttttgaagattttatgatccatttgccgtcggtcctaccatctatgtaggaataccctttcttgtttataagagctttgatacatactaaatattcgaaaacaatgtccgaacatataatttccgccccataatatagcaaagatcacaaaaaggcccgaaaaagtacattaaggtcaaaagttggagtagaaaaaaaaaacattagaagaattccatctttcttcctcattcatcagagaactctctttaggctttccgaaaaggtatcacatgccaagtgtttggcatcacggtctaaaagttctagagtcatacatttttgacaaaagaaaaagagaaaaaccgaaaaaaagagggatgcaacacgaggactttcctggaggtcacccatcctaatactactctcgcccaagcaggcttaactgcggagttcaaatgggatctggtgcattagtgctggtatgatcgcattcgttactacatgcaatgcagtcgtatgtattcttttttgaagactttatgatccatttgccgtgggtcccaccatctatgtaggaataccctttcttgtttagaagagctttgatacatgctaaatattcgaaaacaatgtccaaacatataattttcgccccgtaatatagcaaagatcacgaaaaggcccgaaaatgtacattaaggtcaaaatttggagtagaaaaaaaaaagcaatagaagaattccattttccttcctcattcatcggagagctctctttaggctttccgaaaaggtatcacatgccaagtttggcctcacggtctaaaagttctagagtcatacatttttgacaaaaagaaaagagaaaaaccaaaaacaaatagggatgcaacacgtggactttcctggaggtcacccatcctagtactactctcgcccaagcacgcttaacttcagagttctcatgggatccggtgcattaatgctggtatgatcgcatccgttactacatgcaatgcaatcgtatctattactttttgaagactttgtgatccatttgccgtgggtcccaccaggtatctaggaataccctatcttgtttataagagatttgatacatgcaaaatattcgaaaacaatgtccgaacatataattttcgccccgtaatatagcaaagatcacgaaaaggcccgaaaaagtacattaaggtcaaaagttggagtagaaaaaaacacaatagaagaattccattttccttcctcattcatcggagagctctctttgggctttccgaaaaggtatcacatgccaagtttggcctcatggtctaaaagtttcagagtcatacattgttaacaataaaaaaaagagaaaaaccgaaaaaaagagggatgcaacacgaggactttcctagaggtcaccaatcctagtactactctcgcccaagcacgcttaactgcggagttctgatgggatccggtccattagtgctggtatgatcgcatctgttactacatgcaatgcaatcgtatttattcttttttgaagactttatgatcaatttgccgtgggtcccaccagctatgtaggaataccctttcttgtttataagagctttgatacaagcaaaatattcgaaaacaatgtgcgaacatattattttcgccccgtaatatagcaaagatcacgaaaaggcccgaaaaagtacattaaggtcaaaatttggagtagaaaaaaaaaacaatagaagaattccattttgcttcctcattcaacggagagctctctttgggctttccgaaaaggtatcacatgccaagtgtttggcatcacagtctaaaagttctagagtcatacatttttgacaaaacaaaaagagaaaaaccgaaaaaaagagggatgcaacacgaggactttcctggaggtcacccatcctagtactactctcgcccaagcacgcttaactgcggagttcaaatgggatctggtgcattagtgctggtatgatcgcattcgttactacatgcaatgcagtcgtatgtattcttttttgaagactttatgatccatttaccgtgggtcccaccatctatgtaggaataccctttgttgtttagaagagctttgatacatgctaaatattcgaaaacaatgtccgaacatataattttcgccccgtaatatagcaaagatcacgaaaaggcccgaaaaagtacattaagctcaaaatttggagtagaaaaaaaaagcaatagaagaattccattttccttcctcattcattggagagctctctttgggctttccgaaaaggtatcacatgccaagtttggcctgacggtctaaaagttctagagtcatacatttttgacaaaacaaaagagaaaaaccaaaaaaaaagatggatgcaacacgaggactttccaggaggttacccatcctagtactactctcgcccaagcacgcttaactgcggagttttgatgggatctttagtgctggtatgatcgcatccgttactacatgcaatgcaatcgtatatattcttttttgaagactctatattcgatttgccgtgggtcccaccagctatgtaggaataccctatcttgtttataagagctttgatacatgcaaaatattcgaaaagaatgtccgaacatataattttcgccccgtaatatagcaaagatcacgaaaagacccgaaaaagtacattaaggtcaaaagttggagtagaaaaaaaatacaatagaagaattccattttccttcctcattcatcggagagatctctttgggcttgccgaaaaggtatcacatgccaagtttggcctcacggtctaaacgttctagagtcatacatttttaacaaaaaaaaaaagagaaaaaccgaaaaaaaagagggatgaaacacgaggactttcctagaggtcccccatcctagtactactctcgcccaagcacgcttaactgcggttttttgatgggatctggtgcattagtgctggtatgatcgcattcgttactacatgcaatgcaatcgtatctattcttttttgaagaatttatgatccatttgccgtgggtcccaccagctatgtaggaataccctatcttgtttataagagctttgatacatgcaaaatattcgaaaacaatgtccgaacatataattttcgccccgtaatataacaaagatcacgaaaaggcccgaaaaaatacagtaaggtcaaaatttagagtagaaaaaaaaaactaatagaagaattccattgtctttcctcattcattggagagctctctttgggctttccgaaaaggtatcacatgccaagtttgtctcacggtctaaaatttatagagtcatacatttttaacaaaacaaatagagaaaaaccaaaaaaaaagagggttgtaacacgaggactttccgagatgtcacccatcctagtactactctcgcccaagcacgcttaacttcagagttctcatgggatccggtgcattaatgctggtatgatcgcatccgttactacatgcaatgcaatcgtatctattactttttgaagactttgtgatccatttgccgtgggtcccaccagctatgtaggaataccctatcttctttataagagctttgatacatgaaaaatattccaaaagaatttccgaacatataattttcgccccgtaatatagcaaagatcacaaaaaggcctgaaaagtacattatggtcaaaaatttggagtagaaaaaaaacaaatagaagaattccattgtgcttcctcattcatcggagagctctctttgggctttccgaaaaggtatccaatgccaagttttgccttacggtctaaaatttatagagttgtacatttttaacacaaaaaaaaagagaaaaaccggaaaaaaagagggatgatcgcatctgtactactctcgcccaagcacacttaactgcggagttctgttgggatccggtgcattagtgctggtatgatcgcatctgttactacatgcaatgcaatcgtatctattcttttttaaagactttatgatccatttgccgtgggtcctaccagctatgtaggaataccctatcttgtttataagagctttgatacatgcaaaatattggaaaacaatgttcgaacatataattttcgcctcgtaatatagcaaagatcacgaaaagacccgaaaaagaacattaaggtcaaaattaagagtataaaaaaaaaaaaaaagaataattccattgtctttcctcattcattggagagctctctttgggctttccgaaaaagtatcacatgcaaagtttggcctcacggtcaaaaatttatagagtcatacattttaacaaaaaaaatagagaaaaaccgaaaaaaaagagggatgcaacacgaatacattccgagagatcacccatcctagtactactctcgtccaagcacgcttaactgcagagttctgatgggatccggtgcattaatgctggtatgatcgcatccgttagtacatgcaatgcaatcgtatctattcttttttgaagtctttatgatccatttgtcgtgggtcccaccagctatgtaggaatactctatctagtttataagagctttgatacatgcaaaatatttgaaaacaatatccgaacatataatttttgccccgtaataaagcaaagatcacgaaaaggcctgaaaaaagtacattaagatcaaaatttggattagaaaaaaaaaccaatagaagaattccattgtgctccctcattcatcggagagctctctttgggctttccgaaaatgtatcacatgtcaagtttggcctcacggtctaaaagttatagagtcatacatttttaacaaaaaaaaaaagagggatgcaacacgaggactttcctagaggtcacccatcttattacaactcacgcccaagcacgcttaactgtggagttctgatgggatccggtgcattagtgttggtatgatcgcatctgttactacatgcaatgcaatcatatctattcttttttgaagactttatgatccatttgccgtgggtcccactagctatgtaggaatatcctatcttgtttataagagctttgatacatgcaaaatattcgaaaacaatgtccgaacatataatttttgccccgtaatatagcaaagatcacggaaaggcccgaaaaagtacattaaggtcaaaatttggagtagaaaaaaaaccgatagaagaattccattttccttcctcattaattggatagctctctttgggctttccgaaaaggtatcacatgccaagtttggcctcacggtctaaaagttatagagtcatatatttttaacaaaacaaaaaagagaaaaaccgagaaaaaaagagggaagcaacacgaggactttcctgaaggtcacccatcctagtactactctcgcctaagcacgcttaactgcggagttcaaatgggatctggtgcattagtgctggtatgatcgcattcgttactacatgcaatgcaatcgtatatattcttttttgaagactttatgatccatttgccgtgggtcccaccatctatgtaggaataccctttcttgtttagaagagctttgatacatgctaaatattcaaaaaaaatgtccgaccatataattttcgccccgaaatataacaaagatcacgaaaaggcccgaaaaagtacattaaggtcaaaatttggagtagaaaaaaaacacaataaaagaattccattttccttcctcattcatcggagagctctatttgggctttccgaaaaggtatcacatgccaagtttggcctcacggtctaaaagttctagagtcatacatttttgacaaaacaaaacagaaaaaccaaaaaaaaagagggatgcaacacgaggactttccaggaggtcacccatcctagtactactctcgcccaagcacgcttaactgcggagttttgatgggatctggtgcattagtgctggtatgatcgcatccggtactacatgcaatgcaatcgtatatattcttttttgaagactttatgttcgatttgccgtgggttccaccagctatgtaggaataccttatcttgtttataagagatttgatacatccaaaatattcgaaaacaatgtccgaacatataatttcgccccgtaatatagcaaagatcacgaaaaggcccgaaaaagtacattaaggtcaaaagttggagtataaaaaaacaccataggaagaattccattttccttcctcatcatcggaggctctctttggcttccgaaaaagtatcacatgccagttttgcttcattgtctaaaagtttcagagtcttacatttttaccaaaaaaaaagagaaaaaccgaaaaaaagagggatgcaacacgaggactttcctggaggtcacccatcctagtactactctcgcccaagcacgcttaactgcggttttttgatgggatctggtgcattagtgctggtatgatcgcattcgttactacatgcaatgcaatcgtatctatccttttttgaagactttatgatcaatttgctgtgggtcccaccagctatgtaggaataccctatcttgtttataagagctttgatacatgcaaaatattcgaaaacaatgtgcgaacatattatttttgccccgtaatatagcaaagatcacgaaaaggcccgaaaaagtacattaaggtcaaaatttggagtagaaaaacaaaacaatagaagaattccattttccttcctcattcatcggagagctctctttgggctttccgaaaaggtatcacacgccaagtgtttggcatcacggtctaaaagttctagagtcatacatttttgacaaaagaaacagagaaaaaccgaaaaaagtagggatgcaacacgaggactttcctgaaggtcacccatcctagtactactctcgcctaagcacgcttaactgcagagttcaaatgggatctggtgcattagtgctggtatgatcgcattccttactacatgcaatgcaaacatatatattcttttttgaagactttatgatccatttgccgtgggtcccaccatctatgtaggaataccctttcttgtttagaagagctttgatacatgctaaatattcgaaaaaaatgtccgaccatataattttcgccctgtaataaagcaaagatcacgaaaaggcctgaaaagtacattaaggtcaaaattcggagtagaaaaaaaaacaatagaagaattccattttccttcctcattcatcggagagctctctttgggctttcccaaaaggtatcacatgccaagtgtttggcctcacggtctaaaagttctagagtcatacatttttgacaaaaataaaaagagaaaaaccaaaaaaaagagggatgcaacacgaggactttcctagaggtcactatctagtactactctcgcccaagcacgcttaactgcggagtgtgatgggatccggtgcattagtgctggtatgatcgcatctgtaactacatgcaangtaatcgtatctattcttttttgaagactttatgatccatttgccttgggtcccaccatctatgtaggaatacccttttttgtttagaagagctttgatatatgctaaatattcgaaaacaatgtccgaacatataattttcgccccgaaatataacaaagatcacgaaaaggcccgaaaaagtacattaaggtcaaaatttggagtagaaaaaaaacacaataaaagaattccattttccttcctcattcatcggagagctctatttgggctttccgaaaaggtatcacatgccaagtttggcctcacggtctaaaagttctagagtcatacatttttgacaaaacaaaacagaaaaaccaaaaaaaaagagggatgcaacacgaggactttccaggaggtcacccatcctagtactactctcgcccaagcacgcttaactgcggagttttgatgggatctggtgcattagtgctggtatgatcgcatccggtactacatgcaatgcaatcgtatatattcttttttgaagactttatgttcgatttgccgtgggttccaccagctatgtaggaataccttatcttgtttataagagattttatacatccaaaatattcgaaaacaatgtccgaacatataatttcgccccgtaatatagcaaagatcacgaaaaggcccgaaaaagtacattaaggtcaaaagttggagtagaaaaaaacacaatagaagaattccattttccttcctcatcatcggagagctctttttgggctttccgaaaaggtatcacatgccaagtgtttggcatcacggtctaaaagttctagagtcatacatttttgacaaaagaaaaagagaaaaaccgaaaaaaagagggatgaaacacgaggactttcctggaggtcacccatcctagtactactctcgcccaagcacgcttaactgcggttttttgatgggatctggtgcattagtgctggtatgatcgcattcgttactacatgcaatgcaatcgtatctattcttttttgaagactttatgatcaatttgctgtgggtcccaccagctatgtaggaataccctatcttgtttataagagctttgatacatgcaaaatattcgaaaacaatgtgcgaacatattatatttgccccgtaatatagcaaagatcacgaaaaggcccgaaaaagtacattaaggtcaaattttggagtagaaaaaaaaaacaatagaagaattccattttccttcctcattcatcggagagctctctttgggctttccgaaaaggtatcacacgccaagtgtttggcatcacggtctaaaagttttagagtcatacatttttgacaaaagaaatagagaaaaaccgaaaaaagtagggaagcaacacgaggactttcctgaaggtcacccatcctagtactactctcgcctaagcacgcttaactgcggagttcaaatgggatctggtgcattagtgctggtatgatcgcattcgttactacatgcaatgcaatcgtatatattcttttttgaagactttatgatccatttgccgtgggtcccaccatctatgtaggaataccctttcttgtttagaagagctttgatacatgctaaatattcaaaaaaaatgtccgaccatataattttcgccctgtaataaaagcaaagatcacgaaaaggcctgaaaagtacattaaggtcaaaattcggagtagaaaaaaaaacaatagaagaattccattttccttcctcattcatcggagagctctctttgggctttccgaaaaggtatcacatgccaagtgtttggcctcacggtctaaaagttctagagtcatacatttttgacaaaaataaaaagagaaaaaccaaaagaaagagggatgcaacacgaggactttcctagaggtcactatctagtactactctcgcccaagcacgcttaactgcggagtgtgatgggatccggtgcattagtgctggtatgatcgcatctgttactacatgcaatgtaatcgtatctattcttttttgaagactttatgatccatttgccttgggtcccaccatctatgtaggaatacccttttttgtttagaagagctttgatatatgctaaatattcgaaaacaatgtccgaacatataattttcgccccgaaatataacaaagatcacgaaaaggcccgaaaaagtacattaaggtcaaaatttggagtagaaaaaaaacccaataaaagaattccattttccttcctcattcatcggagagctctatttgggctttccgaaaaggtatcacatgccaagtttggcctcacggtctaaaagttctagagtcatacatttttgacaaaacaaaagagaaaaaccaaaaaaaaagagggatgcaacacgaggactttccaggaggtcacccatcctagtactactctcgcccaagcacgcttaactgcggagttttgatgggatctggtgcattagtgctggtatgatcgcatccggtactacatgcaatgcaatcgtatatattcttttttgaagactttatgttcgatttgccgtgggtcccaccagctatgtaggaataccttatcttgtttataagaatttgatacatccaaaatattcgaaaacaatgtccgaacatataatttcgccccgtaatatagcaaagatcacgaaaaggcccgaaaaagtacattaaggtcaaaagttggagtagaaaaaaacacaatagaagaattccattttccttcctcatcatcggagagctctttttgggctttccgaaaaggtatcacatgccaagtttggcttcatggtctaaaagtttcagagtcatacatttttaacaaaaaaaaagagaaaaaccgaaaaaaagagggatgcaacacgaggactttcctggaggtcacccatcctagtactactctcgcccaagcacgcttaactgcggagttttgatgggatctggtgcattagtgctggtatgatcacatccggtactaaatgcaatgcaatcgtatatattcttttttgaagactttatgttcgatttgccgtgggtcccaccagctatgtaggaataccttatcttgtttataagagatttgatacatccaaaatattcgaaaacaatgtccgaacatataattttcgccccgtaatatagcaaagatcacgaaaaggcccgaaaaagtaaattaaggtcaaaagttggagtagaaaaaaacacaatagaagaattccattttccttcctcatcatcggagagctctttttgggctttccgaaaaggtatcacatgccaagtttggcttcatggtctaaaagtttcagagtcatacatttttaacaaaaaaaaaagagaaaaaccgaaaaaaagagggatgcaacacgaggactttcctggaggtcacccatcctagtactactctcgcccaatcacgcttaactgcggagttctgatgggatccggtccattagtgctgttatgatcgcatctgttactacatgcaatgcaatcgtatctattcttttttgaagactttatgatccatttgccgtgggtcccaccagctatgtaggaataccctttcttgtatataagagctttgatacaagcaaaatattcgaaaacaatgtgcgaacaaattatttttgccccgtaataaagcaaagatcacgaaaaggcccgaaaaagtacattaaggtcaaaatttagagtagaaaaaaaaaaacaatagaagaattccattttccttcctcattcattggagagctctctttgggctttccgaaaaggtatcacatgccaagtgtttgaaatcacggtctaaaagttctagagtcatacatttttgacaaaagaaaaagagaaaaaccgaaaaaaagagggatgcaacacgaggactttcctggaggtcacccatcctagtactactcttgcccaagcacgcttaactgcggcgttcaaatgggatccggtccattagtgctggtatgatcgcatttgttactaaatgcaatgcaatcgtatctattcttttttgaagattttatgatccatttgccgtgggtcccaccatctatgtaggaataccctttcttgtttgtaagagctttgatacatgctaaatattcgaaaacaatgtccgaacatataattttcgccccgtaatatagcaaagatcacgaaaaggcccgaaaaagtacattaaggtcaaaagttggagtagaaaaaaaaatctatagaagaattccattttccttcctcattcatcagagagctctctttgggctttccgaaaaggtatcacatgccaagtttggcctcacggtctaaaagttctagactcatacatttttaataaaaaaaaaaagagaaaacccgaaaaaaagagggaggcaggtgaataacaaagcggataagataacatgcaatcaaatggattaatgattcctaaggatggggtaatcgaatagcgtggtctctttaatctattcaggcggttgacaaaacttcacagaagctatccctagacaacaagttcaacaaaagattacttcactaccatgacatgaatcctcaagcagagctaaacactgacctaatcaccattagcaatctctaactaagtaggcaatatcaaatcaacttgttaaagccaataccctctctacacgaccaataccttgggatagagccgaatatctctggaattaatagatccaacattccaccgaacaccttttgagtgcgggaatgtctggattcgtattccaattgattagaaaggaataagcaataagcgcaactaatccaaaagggattctagtattctaaactcaaccacctaaaacgaccaagtacagcacaactactctatcccatgctcagaaatacggttcactactcagacataataaaagacaatagcaaagcaattattgaaagcatgataataaaaatgataaagacttacgaaaaatcaatatcgaatacttgaaagtgaaatacaaagtcgtaggagaaacactacgacgaaaacgagtttaaggtaaaagatagattaaggtcggatggatggatggatgccctagggaaaacccttagaggcagtttatataagcgaaaatatgaatcaaataaggaaactaaatagatagtaatcttcacgtcaggtccctgcgatcgagtatgtcattggcatctgatgggctgaaatgggcctccctatgatcgagtatgtcattgatcaaactgggctttagggactccgccttgcgatcgagtggtctgaagtgaagacgagacagaatggtctagcgaccctgcgatcgagtggatgtcattaggtggcgatcgagtgattttgtcggcttctcttctcttctgaactctcaacttgtctagttaagtacaggacgagtagaatggcctccgagtgatcgagtggtttgatgggtgattcctccggctttgtgattgagtaaaactgagcttctagcttctccgtggttgtgatagagtgatttgccctggcagggctccgaggttgcgatcgagtactttggctgaaggcgtcattgggcattctgactttctgttctgtttctcctctgtttgaactccaaaagcatccaatgtacctgaaaacagccaaatatgtaatgcacatgcaatcctaatgcaaaactatcctaagtgtgcaaaacacactaaaatgactcctaatgagatgaaatgtggatgaaacaatgacaaagtggtgaagaatgaatgtctaaatcattcaaattatagacatatcagccgagaagaagagacatatgatatgaatgttcttaacgcgaaaatcaaagagatatttaagaaggaaaaatgaaaacaagtagtattctaattggtgattcacgtctacgctacctaaaaccctccatttatacagaggagggaacttggtcaccaagttacataatttttaaatatttgatatttttcctctattggttctaatttcattcacttcataatttttaaatatgaatattttcctctattggtttttcagagtcagtctcaatatgtttaaggaagagtttttttttcccctgaaatgttgcctttcattatcacccaatgttctaaaactcgtgctacgcggtcgtctaggcgccgaggaagcagtggaggaaggtgagccgccgcatttggtggtaatcgctacaaaaatcggccggaaaaaaaatccacctaaatatttgttttttaattagaaatctctaaattattgatagatctgtaatatttatttttttatccctatcaattatctctaaactataaaataaatgtagattcagctattagaacccgggtgtagacaaaaattacacatgacttatccattttgccactcgaacttcgacaaatcttataggctattgtagtatataacctatttaatgatagaagttatgtatatccccttaattttttgtaatgcctagtctccgattaatccctgcctcgaccgtctaagtgctaggcgctagtacaccgcctaagtagcgcctagcgatttttagaacattgttatcaccactgtgttcttacaaaaagtgtaacagtggacttaccacttacaatcttaaggcaaacagaacaaaacattgttccttagaaatttaaactgaaacaacaaacatcaatcttaaccaagccaagggtatgtcctaaccaaaaaccataaccaaactatttggtgttattcaagcattgaagctgcgaaccttgttcctcagcaatcttcaacaaaaagtgatgacaaaattcttgttagagtgacaatcttttctttggaggtttcagaatccctcccattcttggagcaccttgttgatgagtctgaagtcgtggatcccctaactctcttctaacttctccatcttcatgccttcttgataattggcccacttcatagactttgctagtaccggataagtttgccgcctctcttggtggactgttgctagagttggaatacctttgttgtcttgcaatattaggctctctaccatacctgttatgaacatctctagttgtggcgaagtatggaattgcagctgccaattcttcatgattcagcggaggaggagctactcttggaggtggtgtcactggagctggaaacgaagtctcagtcatctgagactgagaattcaaacttgatctgagaacactatctctgaaggcagcccttgctcttgctatgctgtgaggacgttgacgatagggataatagtccctgtttgagtaaaccggaaacagctgctacatattcttttgagcctttcatactgaaattttatgattgtcgtgccaccagaatcgaagatgatcctttggaaaaacctgagtctgtctgtgataccaaaatgaacccttactctaatataggctatttgagtttaattaagagttaggtatgagacttcatacatctaacttattggtatgagatgaaatttttgtgccttggctttttatgttcattgtcaagagtgtttctttgcttgtatttcagattagaccgaaacgacccatttatattaccagttgtcgagagaatctaattagacatggtaaccagagtaaatcaaaagtaatctcatctccatataagctgaaactctcgcatcatacaacaaactggcccaaatgtgtctgtctgcaacaatagcattcttcttcaaggtctcttttactctttattgaataaataaatacagaaaacacaaacccagaaattattgaagcatacaatagccagattctccaggataaataataaacagatgtgtcttggaatgtgtagaatcgaaagaaaagaagcatatgcaggagttgggagcacggtttgttttggacaggggaaaaaaggaaacacaatctgtgtgttttggttgcatttcattatactgaaagaaacagggaagagtcccatcaagcttgcaagaagctagcgtacttggcacccaggagaagcctctgaatgcacaagatagcgttcttggtcacctcagcgttctcgtggtttatcagcttcatcactcgctcttttgccttgaggtctgctacaatcactctccccgctgcatggtattgtatgaactgtgagatatcaaagcatgccaccgccaatgatctgggatcacttgaggtgtccaggattgtgaggaggaccctgagtatctgcgtccacaagtttaacaagtggttagggttgttgtctaaggccaaaaaggattgaaccagcccgctctaaaagcactacaagtgtgggtgttgagcagagaggaataaaagaagaatacctggaagtcgttctcctcaaagcatgtgacattctcacgccagaaattggtctccttgtgcattgggttccagtcaagatggccaaggagcacctcttgcttatatttatcaaaggaactcaatttcttgatcttgtcttttagcccttcttctagttggttcagtgcatccagcaagtccttacaagttcagaatttaagggttttcactatcaccgtaatacaaaaacacatctaatgttaccggcatcacttatatcaccagatgtagcagaaaattaagaaattcaggttccacataacaactaacaagcatttaagttgtcttacctcgtcactccatgcttgtgtttttagactgtggataatatgtgggagtccaagatcaaccatctgggcaccaaatgtaccttttggaagaaggttcctgaatgtcaatatgaccaccctgacaacctgtaagataagatatcgtcaaataaacataacaagtgcatcacgccgcatttatccaaattaattattcaaaacgaataaaagaaacaaaaatcttggtattgtgggacagagattctgattgatcaaccaaactatgtcatatgatctttaactaattgcaggacagcgatgaccaagtcataaaagagaacatagctcaccttttccttagtcgagtgcttaaccacttccgtgagcctttgcattgtcctcgatgttgccaagtactctattgcaggttcataataggacagaagccagatgcagagacatgtttcatacagaagctgtcggtcgaaagcacacaaatcacatgaattaggcactgagaaactatgacaaaaaaaaaagagagaggtgcttcttccttctgaaaactgaaacagaactatttcaaagtttaataatttgttcagcccgcattttagaataagggagcgatagatttagtagtcatttgaaaaggacgttattttcccccaaaatgtatgtctagtcattgcctttccgttaaggattttgcatgatttggaaactgcaatacttatttcctgctttatggaagcattattcactgaaaactacttccattagatatacagttacctggatagactgctgagtggatgctggggaaattaaagggacaagtaacttcaccccatctgcctgaacaaatgacgatctgacaacaggttccttaagcagtgacgacaggcagctgattgcaattggaacaccacgagtaggatgagaaggttgcttcaactgcatatcaaaattaaggattgagatatcgatggaggacatcaaaagcttttctggattcactatgtcacaatattaaaggttccttccagatcaccaaatttgcatctatttaccaaaatcaaacaattttgcatacatccaagaattgtttgtattcgattgaactaatttggtattaattagtgtcttcatttgtgttatataacaaagccatggcaagggtaacacagaaaatactaactgcctctgtttccccctctaattgcaagctctaccaatgagctgtagctctaacaatggcattttctataagacaaagacaactaacacttaaacactaatgcaagaccaaccttaactagaaagaaaacaaagaggaaagagagaaagagaaaagaagaagaagaagaaacctgagcacaaagccattccaccaaccccttgagaacatcatcaattccattaccaataacagcattaccagcttttggcctagcactatgttgagagaagacaaaacccaccaagtaaatgaggctgtatgttacagtcatgtttaataaaagtacgataagcggttttgaataccttattatccaggcaaggatcttacagcttttttcttgaatgaaccaatttcccttccaaagcaacctgaaagaggacacatcttttagatggcatgatcttttgaagctaagcaattaagcagccaaaatcaagcacaaatgtagctgaaagcagtttccatcaatggcatttaacatatgtttcccgtttgtcaggaagattgtagttaaaataataaactgacaagggccagcagaaacaacagttcgacccaataaccaattctgtcctataaaaaaaaacttgcctgtaccaaataacaattgtaaaacttttgcatagggactcacctcaagaaaggctcataagtatcctcatttgccaaagattcatcatggaataatcgagctcgtgttgggtttgctggaaacatttgatacattaatattagtcagtaactaaaatgaagaaaaggtaaaatgcaaaaatatttaaattttcatttacctgagagcatttcataaatcaaagccaaaacatattcgacagtttcttccttgaatatatcacgtaagatgctaacaaagagatgaacataagctggaccatcctgcaataacggcaccacatatatcacttaataacgacaaggtaggtaaatgctagcatagtcactatacaactttaatcactaataaacagagagagattgactcaagtaatgacagatcatggcttataatgagagtctatgtaaactgtttgaaaggagacaaaaagagttgtagaaaacttacttcatcgagcaactgtgccctagcactttcaggttttttatcatagcgccttaagagctggagacctttagctgaaaccagcttagtgttcatgtaagtctcccatggaatgtcccttttcaatacctgcaaagtaaaccaacaatagaaattacaaaatctgacaaaaccacatgataaacatttataagtagccaaagttacaaagatctatattgacggtttgcatcgtcctgtttcaatttgtcatcatcattcatatcttaccaaacaatgtctattaatgatgctaaatacaaaactgcatctactgaattaggtttatacaaggaaaattatcaccaacctgctctatactcagctccgcctgatccatgagtggttcagaaacttgaaattgaactgatccgaatccctacgaatgtaaatacagaacaagcaagagaaagctagacatattaaagaaaaatggaagaatctgatacgaaattcgttaacatcgtgaccacaatttgaccttttaatcaacaagcatttgaaatgtcaagaagaaaagaaaaaacaacaaatcaagaatcaaggaaaccacaatggaaacaacaacaaccttatctcgatttatcattctattgcttataaaacaacaatggaaacaaatgaggaaggcagatgttctgaaatcttagagtctagtgtcaagatgagactatttaactgatacaagctactagttttaaaaggtcctaagattcgatcaaacatgggctgcaaataaaaaactaaaggccagattacaaagttttcaacacaacgaaactgattcaaacaaacacacagaatttcataaaacaaaaatagatcgggcttttttctttaaatcacacacacacacaaacacaaacaacaatttcaagtttttttcaaaattgctttgcctccatgagtcaaaccaaaacatttaaactttgctcctaaaggaccttaagaactttatctacccagtaaaattgtagtatgagttgaattatttcagaattagcagatccaatctgataatttcataaacagatccaagctaacaatttcacaaagtaaaggaatcaaaagctaaaaacatttaataaacaatcgaggtgaaagttaaaaatccccaattagatccaaaaaaggcgaaattagatcgagagtttagggtttcgcgaaaaatacctgcgagggagaaattgaagctctgcgttgtgagtagagaagacggaaggaaaatctccggttagatgcggtggtgacggaggaatcgagccgatctccggcgaggagagagatttgggagagaggctaattggacctttggatgaaaaagcagacaaggcgaagagataagttttgttattattcaagagacatggaataatcacaatgtcaacaaatcagttggctaagcgatttcggttcgggtagtttccggttaacaaaagttaattcgacccgattaagtcacccgagattgtctctcgtatccttttttttacagcaaaccggttaaatccctttgagaaacgatctcataattctgaaatgcaaacaacaaatctcttaaatctttttttctttcatgtctcattctcttttaataaaatgtgtataaacgaatttaccccttcttctttctctaatattcattttaaaactaaataacttttaaaaaacaaaaaaaaaaaattagaaaaaaaaaacagaaacccaactttctctctcctctcctctttctcctttgaagtttgagctcgtcgctcttactcgccgaaattcgatttcagtagtcattgttggcatatcttctcctccggcgagttttgtcgagataataagaaaaggtatgtttttagagctgcatagagctcaaaattgaagatttgaacctagaaatttaagatattttctcaattagatttgagattaagcaaattgtgtttgggtatacacattggaagtttatgcatactacctgggttaaatagatctgtaaatgagtaagaaatggattacaccaactgaatcatagtaaattgtagttttgaacccgaaaccattcgacttgagttcttctcggaaatacaactggtagaactgagtagaattgcacatgattcaattgaaaaatatatatgtagtattactcgtaactctagttttacccagatgtatgtagtatgacttagttgactagtaataaccatttacatgtaatattacttaggtacaatagtattacccacactacaagaaaacatgcattttgtgatggatattagccctcgcaaatttgcgacggaattgcgagtcgtttactattaactacgcaacgcgcgtaaagttgtcgtaaatttgcgagggatacacgcgtcgtaaatttgcgaagaatttgcaagtaattgcgtctactttgcaatgaatactttgtcgttgcaatttcgttacaatattgcgacgaatttgcaaagaagtaggtcccaacatattttgcgacgaatttacaaatattgtgtaaatgaacacgttttaaatgaaagttagtaggttggtgtggtaggtagtgaaattatatcgaaaaaatcttataatttttctctaaatatattttctcttgcaattcccttgcaaaatgttataggaatttcctcgcaaaatattttcagggtctataaatagcaaacgtaaatgagtgaagaatcacaactcaaaacgtaaacaaactagatattgatccgcggtacaccgcgggtggatatgttcattagaaagttatagatatttttttataagaattattatttctatataaatattatattcttcacacataatttttatttatgtaaattttggataattcatattttatgatctcatatttgttagtttaatagtaaaattcagtatttgttttttttgtttgggttttttagacgtaataaatatataaaacttgtattatttagagattgacccgcggtacactgagattgataattttgtcagaaaattagatatttttattttaactaatattatctatatgtatataacatattcaagaggtagatcaaaagcatatatttttattaaataaaaaataatatttttgtctttaatatgatctatagatacgtgctgttggtgtcggatcccgcaccgtggactcgggaccggtcaaagatcgtcgcgtaagagggaagggtctaaaagaggaaatgcccatgggcttctttgagtaaaagtataacgcgagacgattgatcagcgaggtggactggacatcgatgtcaaaactgcccggattggagagtcgagtgggccagaagatgaagcccaggaaattcggaatcaattcaaattcgaacgtttgaatagttaattcgaagactgaaacggacacatttaatatagaataattgtgcgtaaatgggaattaaatgtattctttgagtataaattgtttgtcaaagaccatgtagaaacacacgcatttttgtgcaaacttactatacacattttcttacaaaactcatagttttcgctataatcatcgatctattttctagtatatttgtcctcaagaataatccttctcaccaaataaataaatacttgagtatgtgaatccgacatccacattttggcaccgtctgtgggaacggagaattcttgagtcgtcagattttttctatacactacatttccgaagtgagcgacaatgtctggagaagatgctaccaacgcttcactagccgaaactctcaagaccatgcagcaaactatggcggaaatggcgcataagtttttgaatgtagaaaaaaccgtcgaaacactgcaaacaacccaggtatcactcagtcaaaatgttagtactattcaatctcgcattcgttcattgaatgcaggtaattcctctggagttcgaagaactatcttcggttccccaaattcccttccgcgaaatgcagcaagtgatcaaacgaccctggatggtacaaacgcggacatccatccgaaagatggagaaacacatcccgaagacgacaaccagttcgttcatcaacacgagcaagaaaacttcaaccagttcgaaaccatgagagaagtaagccgggaactgaaagaaatgaggtcaaaattccaccaagctacaagctcggaaccggatatcaaccgggtcattgaagaagctaggcgaacacctttcaccccgcaaattgctagcttgagaatcagagattctcgaaaacttaacttagaaccgtacaacggtttggaagatccgaaaggctatctcgcagctttcctaattgctgctgggcgagttgatctgaacgaagccgatgaagatgcaggatactgcaagcttttctctgagaatctgtgtggacaagccctgatgtggttcactcagttggaaccagggtcgatcagcaatttcaacgagctttcaacagtatttttgaaacaatactcaattcttatggataaaagcatttcggataccgacctttggaatttatctcaagggccgaacgaaacacttcagactttcatcactaaattcaagaacgtactctcgaagctcccaaggatctcacaacagtcggctttatcagctttgcgaaaaggattatggcatgattcgagattcaaagaagatttgatactacacaaacctgatactattcaagatgcggtattccgagcgcacaattggatggaagtcgaagatgaaaaagaaagttttgcgaagagaaataagcaagcaaaaccagctgtcattttccacccaagaagttcgaacctcgggagaatcaaggaccaaggaagtttggttcacaaccattcaacaataacgtcgggaaacaattacaaggaaaaggaaggtcaaatacttggattcgagatgaaagcttgtattgtgatatacatagagtcaccgggcatctgaccaaagactgcagtgtactcaaaaggcatctcgcagaactatgggcaagcagaggtctttcaaaattcaacatggaggatttcgtcaagcaataccatgaatcaagggataattccgaagctcaaaactctaagagaccaaaaccgactagcgaagaagaaccaagaagttcaaaaggtaaaatcaacgtacttggaggttccaaactttgccgtgattccatcagcgcaatcaaaaagcataaacggaatgttcctctaaagtcaagtttaagtgaagaggtagattttcaaggcgcttcaatatcattcgaagaaaaggaaacgcagcacctcgaaagacctcacgatgatgctctagtaattacgctggatgtagctaactttgaggtttcaagaatcctcgtcgataccggtagtttggtagatctaatatttctaagcactttggaaaggatggggataagcaggacggatgtagtaggaccgccatttcctttagtaactttcacaagtgagtcggcaatgtctctcggaacaatcaagctaccagttttggcgggaaagatttcaaagattgtagactttgtcgtctttgataaaccagcagcttacaacatcatcctcggaactccatggatctaccagatgaaagcggttccctctatgtatcatcagtgcctcaaatacccaaccccaaatggagtggaaacaattcggggagaccaagaagcctcgagaacttgttatttagctagccaccgattgaaaatccaatagcaattaacgaagcccgcaaagaaaggagtagtcgcgaggtttcctagcgggcaaaaggtggacgatgttgtggtcgaagtaattctagaagcagataaaccggatcggaaagtgcggatcggagtggaacgagcaaaagcggtaaacaacgaggtggataaactcttaaaaataggatctataagagaagtgcagtatccggattgggtggcgaatacgttgtggtcaaaaagaagaatggaaaggatagagtgtgcatcgattttacagatcttaacaaagcttgtccaaaagacagtttcccactcccacatatagatcgtcttgtggaatcaactgctggaaacgaattgctaactttcatggatgccttttcgggatacaaccagatcatgatgagtccagaaggtcaagagaaaacgtcatttatcacggacaggggcatctattgttataaggtaatgcctttcggattaaagaacgcaggagcgacttatcaacgtctggttaacaaaatgttcaatgagcacctcagaaagacaatggaagtctatatcgatgatatgctagtgaaatcattaaaaaaggaagatcatgttaagcatttagaagaatgtttcgcgatccttaaccaatatcaaatgaagctaaacctggcgaagtgtacgttcggagtcccatccagggaattcctcggttatattgttacaaagcgaggaattgaggcaaatcaaaccaaattaacgcctttctcaacatgtcatctccaagaaatttcaaggaagtacatcggttaaccggtcggattgcggcattgaatcgttttatttcaagatcgaccgacaaatcattgcctttttatcaaattttaaaagggaataaagagtttctttgggaagagaagtgcgaaaaagcatttggacagctcaaatcatatctgaccactccacctatattgtccaaaccagaagcggatgagaaactttatctatatgtctcggtcttggaccatgcaattagcggagtcttgatccgagaaaaccaaggagaacaaaaaccaatttactacataaacaaatccatgacggatccgaagaccaggtatacgatgatggaaaatcttgcactacaagaatattaaactttaatagcattagaagatagcatttaatgtgtttttgctatggttgattttctataacgtttccaaaataacaaacgctatatttgttttgcttgggaaaagttgtgcttgtttattaatatttttttgtccatttaacaaatattaaaccaaaacgttatcgtagagttaatgcgaaaaattgtgcgcttaaaaattggcctcctacatttgcgcttaaaaataggtctcctacatttaacctaaacacttaatctcagatctgagataatttttcccattcctttcttctttcattcttcctctcagactcttctttttccaatctctccttctttatccatccaaatactcccggatctgaactcgaacaagtatctcaatcatccctaaaccctcaacccttcatctcccttttcaagtgatgcctcaagttcatcttgtgactcgatccgacccgacccgagtcttcttctcctcaccatcagtctactcactcattcctcttcacgctttcgtttctctaaggttctctctcacccctctttactatctcttattttcctcgccggtaggacagataatcataattcaatatatcaccctttgaatcttaactctcagattcaaaaatattgagtcgtattgaagatgagatcagagacgagaagaatcctcgcccgctttttgaagatgatatcgctctcctcaagacatatgtaagcgtcctcttttaaaaccctaaatttgattggggtttcagattttttgctttttacgcttctggtttcgtagacgcgtcagatcgagtacagtttttagttactctacacgtttcgtgtgagtctatgttaatcaaatttactaggttttgtttctcgaatgtgaggaatttgtctctttgtaaaccaatttgatgtcttctcataggtaattttgagatagattcattcttagttgctctttgattagcatgattagtctgtttagttcaattttgtgcttatatgaaaagttttgtgtgactctatctcactatttgaattagtctaattggaaacatacatagtcatacttgtttgtatatgttctcacttcatatgttttcttactgaccttcttaaatctcattcatctgcaggggttaaggccttacaatgcacttaccaagaaagtggtgtatgaaattaaggaactcggtaagaagatcaacaatctatgtggtatgtgcacattctttactgcttaagtgttgagattactttaattaacgagttttgtttattggcaatgatatatggttattggttggtgatatggaaattcgcaggtatcaaggagtttaatacaaaacttgcttatgtgattaaaagatagtctctttttttcctttttcgtttttgtttacctgaatgtgcgttgttgttgtcatgttgtctgattctctgtttggtatcaaatcttttctttcttcctctttaatcaagaatgctttatttgatcagcatgattttgatgatactgatttatctcttgtttagctgttccgagcctattagattgttggatccaaagaagtttgcaggttcagttgtaagtttcttcctctttctcttaagttctaatgaaaattgtcctctttaatctgtgtagtaagttttaattattttgatatcttcgttgttagtataggtgtacatatctgaaaatctagctcttttttttactggaacatgtaacatttaacattcttgttgtatagctagccttaaaatctgttactaatctattctgggtgttaatgtatttcagagctttggtgtgtgcgtgtatgtgtaagacgtggtgggtgcaagaggcgagacgcctaagggttgatggtgcaccaatgtggagagcgaattctgaagttacgttcatagctgatgcagtaggatccacaattgtttgctaatgacaagattgtattcatgtgaaccatttgggttttataagtacttagaacatcttatcttggtgtgtaatatgtagaacttgtctttgattcttagtgacaaattaatgaagtatttttcatttaataaatcttcttatacccaaattatatatatatatatatatatatatatataaaattcaatctagtatgtataaaacaaaaacgaaacaattacatttatataaatgctatattaaaaaaaacataacaatttcaaaacgttgttaataatataagtatgacaataaaaagacgctattatacaatatttaattgcaaaaatataaacgctattatatattacaatacaatagcagaacaaaaaaacgctatataaagtgtctgacctacgatgacgggcgcatacatagcgcttatcaaaacgctataaaatagttagatagcgttattccgacgctacgaaaagtcatttttcttgtagtgttgcacttgcagtagtaacttcagctcagaagctttgcccgtattttcaatctcacccaatcgaagtgttatcaaatcaaccacttcgaacaatccttcatagtccgaaacaatctgggaggttggcaaagtgggcggtggaattaagtgagtatgatatagagtacaagagccgagtcgccatgaaggctcaagttctggcccattttttaacagagttaccggtacttggcggacgggagcaaccagaaaatcagacttggaagttacacgtcgatgggtcttcatcaaaaaatagatccggggtggggatcaaattggagtctcccacctcggaaatccttgagcaatcatttcggttattattcactgcatctaataatgaagcggaatatgaagcattaattgtcggactcagattggcacagggagttggagctgatgaagtgatcgcctactatgattcacaactggttgttaaccagttcaatggagactatgaagccaaagattcaagaatggaggcatatcttgaggtggtcaaagatttggctaaatattttaagaagttcgaactcattcgcataccacgaggagaaaacacaatcacggatgcactcgcggctctggcgtcaacgtcagatcccgaagtcaagagaatcattctggtggaatgtatttcagatagaagcattaacgaagaaaaataaacactcgtcattacaaggtctcgagctgcagcccaggatcgcaatgaacccgcgattgaattaccacctgtcaaaagacgaaagtcaaaaggggcagccgtacctaagccagccgtgcaagaagataatagggtcgaagaaattgtcgaaccaatagaagatatagtcccggaaaacactgttgaagccgagaccgaaccatgggttgacgaagacgtcctcgaaccaaatgagcatcccgaaccagaagctcgaatattttatgaaatcgaccaaattccggcaaaagattggggggctgtttggagggagccaataaaaaattacattgttacaggagagctcccagagaatagatggcaggctcggaaaatgagaatcgttagcgcgaaattttgtctatcgaaggattctttgtatagacgaggtgtaagcgatccctatttactttgcatttttgggcctgaagtcgagatcgttatgagcgaagtgcacgaaggtttatgtggtagtcattcttcaggtagggctatggctttcaagattaagaggatgggatactattggcctactatgatcacggattgcgttaagtacgcccagcgatgcaaacgttgccaactccacgcgcctctcatccatcaaccttcggagttattctcttcgatctctgccacgtacccgtttatgaggtggtcgatggatatcattggaccattgcacatgtcaacccgggaacaccaccggttgctctaaaatcatagtttgagtttgagaacggtgcagtaaaaatcctaattttaactagatctacaatttatctatctttaaagacaattccttagacccgacgctttaatcacttgaatctataactcgtttacttgcttatttatcttttacattcatttactttgtcttgcttatttatcttttacattcatttactttgtctagcttatttaaaaacatcataagtatattgtgtgaacatcgagagctcagtggaattagacccttaaatgctaacgacgatctcttatttgagggagtaagcttatagcaatttgagctatatcaaatttggcaccgttgccgaagttctcttttagttcaccattagactaggtgtcattttaagtctatatacttcttttctatcgcctattcacgtgtttctttatcttttggtctcttgtgtttcaggtaccttcagattgagaatcacgtttcaatggcagactttcacgatagtgtcgaccgacaccatcagggtgccgatcgacaccctttgcagaaccagacagctacaataggcgactttaacagaattgatattttctacaccaaccgatcagcattcaagctacctccatttgaaagagaagactttgctatacaccatgcctattatgatcttgtatcaagaggaaagtttagaggagctcccgatgaatcaccattagatcatttggaagtcttcaaagacatagtgtcctctatcaaagcagaaggtgtaccagctgattaccttctttgcaaactcttcccccactctctcgcgagcagaggaacatcatggttgtgtcaactagaaccaagttcactaaccaattggactgatacaaagaatgcattcatgaatcacttctttgatgaatccgtgacagaagcacttcgtttgcaaatttctttgttcactcaagctccagccgagtcccttagagcagcttggctcagtttcaggtcttatcagggagaatttttccaacatggcttccaagagagccaactcatcaatctattctaaagaggaataaccaagacataccggagtcaactcgatgcaacaagctactgtaacttcatgacaagaaccactagtgaagcattactcctcatcaccaatgctttaactagtcttttgacacatgaagtagacacagaacaaagactttcagctgagattgcaaccacaagcacagaggatcatgtttcagcaatctctgctcctatccaagcccccccccccccttcgaccctccttagacagccgaagggaatccatgcttgcgcagattcttggcaagtttgaatctgtctacacagatcttaatgggaagatcgacaatctacgatctcatatatctgagttttctcctacatcagtatctatcaatgcagtcacactacgcagtggaaagcagctcaacccaattcatcaacgcgaacgttcggctcagacttcatcttttccagttgtagaaaaagactcagtgtcgatcgatgcatcagggtgtcgatcgacaccaattactcttgacgactctgttttgcctttgtcgagtggaatcgacaatttcacagaggagaaggaaattattccagatggtgtcgattgacaccccatcccatgtcgatcaacacccagcttgttcagacaatgtgcaaatttcggctgaaaccaagtcagcaaatcggcgaattcctttccccaagagtcctaaaaagtcaagacaagccttagatgatgtcagatgaaaggctatgattgataagctgattgttgagatgcctttagttgaagctattcatctctctcccacaataagaaggtatgtcaagacaatggtcactaagaatttgacgaaggaatgcagatgggattatgaagtggttaagaaagagattatgaagctattggaagcagggattatctatccgatttcagataccagttgggttagtccagttcatgtagttcctaagaaaggagctgttggaagcagggattatctattcgatctttgttatgctccttcaacatttcagagaggtatgatgtctatcttcacaaacatgattgaggatatcatggaggtcttcatggatgatttttcagtttatggatcatcgtttgaggattgcttagagaatctctgcaaagtattagcaagatgtgaaggcgaaacatctggtttgaattgggagaaatgtcactttatgatgtaggatgggatagttctcggtcatagaatttttgagcatggtatagaagtcgatagagctaagatcgaagttatgacaagtcttcgagcgcccgataatgttaaagcagtgaggagtttccttggacatgctcgtttctataggagattcatcaaagattttaggaaaattgcaagaccattgaccgctttactctgtaaagaagtcaaattcgaatttacataagagtgtcattgttggacatgggccttgccccttcaatgttagaaggcccaaaacagatatcaacaaagaagagggccttttgccattaaaaaggcccattaggtcgagaagggcaaaatcataatttgcaagggagacagaacggaatttagggttcagattccctataaatagagagaaacactattgggagcaagatccgatccacaggttattagctgagagacaaagagaatcgttgccttgcccgacctcgttgcctagcccgacatcggtgcctcgcccatttctgtactttgtctttctgcttttacgattaagttctcggctcggcaggatagtctataactggcgagacgaaattagtttgctgtaatctctcgatctttgttatcgttaataaaaaggaccagctccgttcaccccccagtacaaataattgacgcccactgtggggccgttgatcgaagctatcctttttttacgagcctatgcatcctgaccctcacacgattcgcggtgatatgatagatacttccagcgtcaagaaactgatattggcatacctcaagcgcccgacgcgctgggcttacctccgctcaacctagcagccatccgtgccgagcaggatccctcgcgccgaatcttgttcacaccagacacaggaggagaaacagatcatgttcaggtcgcacgacctcctgccgcgcctacccccctcgcagtagctccagccgacgaagcgaccgcagctgcagcagcagcagcaaaagacgccgctcaaagacgtaccacagcagcagaacgaggcacccatttagatgaccttgttcaaaccattcttgatcgactcgacggacaggaagcacgaactaccgaatggattgacgcctttgtggcagctgtggcagcaccagtcacttcccagagtcagatcgagcggcttcgacgccggaaaacgcacctcccaacctcatgacgatcacgatggacagcagtctccgcgaaccccagtcgccgagcgctcagagacccatcgccgcagaccagcgtcagttatcgtaggattcatcgacgagcattctcgcggtagcccacaagatgaccacaacctacagaacgaccacaatatgcggagcggccacaacatttgaagcggtcacaacctgcagagcggccacaacctgccgagcggtcacaacctgcagaacaaacacaaccagtagagcggccacaacgtgcaaaacggccacaaccagcagaacggccacaacgagtagagcggctccaacctgcggaacgtgcacaacatgttgcctaacaccatctatccgcagagtagtcataatctgaacgaccacgatctcgcgagaggtaaaaatctgccaagggaccagtattttccgaataaccaaactctcgagtgcaggcgaatcttttcggatcgacccatcgaagttgaaaaccgatcccgcgatctggaacttgcacggttgaacgcggtaacaagagatatgtcttccaaaataaatcgggccaccaccgcggcccccgagctagagagggtgttggaagaaacacaacgctcgcccttcacggcgcgtttctcggtagtacgcgttcgtcatgttaataaagttaagctaataccgtacaacggtcttaccgaccccaagatcttccttaaatcaatgtgcatagccatcaatggtgcacattttttctgctaaagaaagtgatgctagaagttgccaaatgttcgtggaaaacctgactgcagacgcactcaactggttatcgcgaatcgaagccaattcaatcgatagctaccgaaaacttacatctttattcctgcagcaccactcggttttcatgattaaggaggccacaaacgccgacttgtggaccatgtctcagaaggaaagcgaaccacttagaaatgtcattgaaagattcaagaaggttgtctcgaatatagccataactgacgatgcggctatcggggctctacgaaacgcgttaagtttcggatcacggtttcgagaagacctaatcattgctcgaccatcaactttggatgatgccttgcaccgtgccaatcgatacatcgaaatcaaaaaagagacggccgcaatggtggaacgccaacctaagacatccaccccaaaagagaaagctcgcgacgaacactatgaacagcgctagcactatgatcgtgactacgctagaaacgataagggaaagaaaggctcggcattcgccatcaacaatcgagaccaacaacaaccgcacaaaccttggaacaactactaccgcgactctgacgcgaaacgttcttattgtgaatttcacaaattcgccggtcattccaccgacgactgtcggcaacttcaacttcttctactttctaagtttaagaacgacagcattgaagtcgaacacgatcgacactgcctgaattctcacagagacaacgctgacggaggtgatctcaacgatcaacacaaacgcgatgatcgagaacgtctacaaaagcccgcccgcatcgagcaagttcgggaagatgaacaacttccaggccctcccaagcgaagccgcaatgatgaagacctgttcctcgacgaacgattcacatgataatgggcggtctaacgtcttgtcgagattctgtccgttccattagaaattatcttcgccaggcggaagtacaacgcgacttgatcgccagtagcacacctgcggttgacaatactgaaccaatcaccttcacagaggctgatgcagctggcctaagaggaccgcataacgatccactcgtcgtcgaactcataatcgatgaaaacaatgtcaccaaggttttgattgacaccgacagctctgtaaatgtcgtctttaaagatttcctcatacagatggaggtcgatctgctcgcaaccgaacacaatgttcagccgttgactggatttgatggagacacggtgatgacagtcggtacgatcctgctcccggtttacgttggaggcacaatgcattgttttaactttgccgtcgtcgataagcctatcgtttacaatgtcattgtgggcacaccatggctgcataaaatgaaggctgtcgcatcaacttaccgtcaatgcgtaaaattcacgaccatacgtggaatctacactttgcgtggcgatcctttaaccgtgcgcacatatttcatcgttgaaaagcagcttcgcaacgcaagagcttttgttgttaccgaagccacctagccacgagatgctagactggctccacgcaccgaatccgtcattcaggtcaatattgacacgactgatcccactcgttgtgtcggtgttggcgtggacctcccactttccctcaaagaggaactagtcaagttcctttgtgataatgcagcaatgttcgcatggacgatcgatgatatgcctggaattgatcctgacgtcacttgccacgatcttaacgtcgacccaactttcaaaccgattaaacagaaatgaagaaagcttgatcacgaccgtacaaccgcgataaatgaggaagtagcaaagttacttaacgctggttctattgtcgaagttcgatatcccgattggctgagcattcccgttgtcatagaaaagaagaacggcaagtggcgagtctgcgttgattttactgatctcaacaaagcttgtcccaaagacagttttcccctcccacgcatagatcaactcgtcgaggccaaggcaggcaacgaactgctctcgttcatggatgcattttctggttataatcaaatacttatgcataagaatgatcgagaaaagactgcgtttattaccgagcaaggaaccttttgctacaaagtcatgccatttgggttgaagaacgccggggcaacgtatcaacgattggttaatcgtatgttcgaaaatcaatttgaccgaacaatggaggtttacatcgacgacatgctcgtcaagttcacacaagccgctgatcatattgctcacttacgacaatgttttgaggtgctaaacaaatacaacatgaagctgaacccggctaaatgcacgttcggtgtcacgtcaggcgagtttctaggctaccttgtcacccaacacggcatcgaggccaatcccaaacaaatctcggccatcattaatcttccctctccaagaaatacccgtgaagtttaacgcctcactggtcgtattgccgcattaaaccggtttatttctcgatcaattgacaaatgcctccccttttaccaacttttgcggagcaacaagcgtttcgaatgggacgataagtgcgacgaagctttcaaacagctgaaagactatctctcatcccctccggttctggccaaacccgaccaaggtgagacgttatacctctatatcgcgatctcttcttcagcagttagtggggttctcataaaggaggaccgatgagagcaacgtcctatcttctacgtaagcaagacccttgatggtgctgaacttctttatcccacgttagaaaagctggcatatgttgttgtcatttcggctcaaaaactctgaccttattttcagtcacacactgtcaaagttctcacgaatcaacctctacggacgatccttcacagtccaagccagtccgggagattagctaaatgggccgttgagttaagcgagtttgatatcgactacaagactcgcacatgtgctaagtcccaagtcttggcggattttctcgttgaactctctcccgaactcgaacccggcatgcctccaattgaaaaatggactttacacgtagacggcgcgtcttcaaagcacggctcaggtgtcggagtgcgcttagcctcgccaaccggcgaaatactctaacagtcatttcgccttgctttcccagtatcgaacaacgaagctgagtatgaagcattaatcgctgatttgcgcctagctcacggaattggagtcaaacatatacaagcattttgtgattcacaactcgttgctaatcaatttagcggtgattacgaagcaaagaacgaccgcatggatgcatatctcaaaatcgtccgcgacctctctcggaattttgaactcttcgaactcaccaaaattcctagaagtgataatgccccagctgacgcattagcgacgctcgcctctacttccgatcccgatctccgccgaatcattcttgtggagagtattgacagccccagtattgaccttcacttaactactgtcaccccaactattgaactgtcgacgttgccgactccgtcgcatgccgccgtcgcctgccgccgtcgccaacaacactacagccgcgtcgtcatcttcgactccaagtattatcttactcgttgtggaacctaacacagaagaatcaacgacaccaagtgcgcccgtcgtcccttttgaaacaaattggattgatgaaatacggaattacattgttgatgggatcgttccaacagataagttgagttaaacgcaggaaagttaggcgcccactgggaaggaccctatttaatctccaagatcgtcaaacccggcgtgtacgaactcttgacaatggacggtacccaaattccccgctcgtggaactctgccaacctgaaatgatactactattaggcgcaaccgccaacaaaaaaaaaaaaaaaaaaaaatatgaactatgaatggcttgatcccttttttaagggtacgtaggcagtctttcacaagacccagctatctcaaaacaaaatataaaaaaaaattgaaatactttttttctacaagtatttgcgaaatcataccctcgatgagctctttcgaacaagcccgtcttatcgatcgcctacctcccacatcgttgtcctggcaagacatacgatttaaaacgcgttccacacggatgcagtggtgaaataatccacaactttacttgtgtaaagaataaaagccgagtccagcctcgcacaataagctagcaggcggaagaactaataagccaagttccggcttgcacgttcttgccgacctcaaggcacccacaggataagccggacaccatagtcgcacctaaaaagcacgacgagtccgcctcgtctacatatttcacaactctacttctgtaaagattcaaaagccgagcctagtcttgcacactatctttcatgcaacaaacatgtagaataagccaagagacgttcttgcatcggaaaaataatatcaaagccgaagttgcataaccgagataacaagaaaaaaacaatagcaaatcataataaccatcaagttatgaaatctaaagaaaacaaccatagtttgcaacaaagacccaacagagggtcgaacataccgaataccggtccaacaagccacaaatggcttaaaaggctggacaaagtctacaacaccgaaagaaagaaaaattacaaaagcccgaagcaaactgcgatcatatcacacagcggtgtcgccgtccccatctctcggcggcgcctggaaggggtcgaggtcgtttgcaagaatctctggaaccacgatcgcatcgacctttagactgccaaatcggacgacccttggctaatatcttcatcctagactcgggaatggcagtccctttggcaatcatcgtctcgagacattcttgaactcccttcacctgacaaagcgtgtattttcggacactgtaagctcgcaatccgataatatggttcctcaatctttcgatacgagcatgactatcctcgatttcagtcaccaccttgcgacgctctaccgctacagcatcctcgcgagatttcctaagtcacgctactttggactcaagttttgccttcgcaaccttaagggcatcctttagcgacttaacctctagctcgaagccgctagcgtttccttactcataatgcctatccgctctagacgttgcaagagattttctcgcagtctccaaagcaactttgagcaaatctctctccctcatgacttccctcacctttttctcataaaaaccgaccatacggtttgtctggctcatctcctgcaatatagacaatgtcaaaacccgataaaacttgagaataaaagagaaggggaagattacaaacctgaaacttttgacgacatacatcgcggtagagatctggcgcgagaagagtttcaacctgcggaaactcagagaaatcgccacggacattcctcccaagctctgcgcatgcgctcccgtcattgtggaacatatggtcccttgcgtcatagttgaaggagaatgagtgatcaaccccttccacggcgtttcgaataggcgttccgtgcctagggggtttaccgacattagatggtccagtctcagggctacgacgcgaagaatccctctttctcgatcgactaccaccgacggaaggaaaaggaacgcttcccgtcgtttccttcaaaactttcttcccagcacgagcagcagcaacctctgttcctctatccttatttggaacttccggcttgacgacacacacgtcaaccgtatcagtcgcctcagctgaaccttcatgaataggctcatcaataggcacctgcggctcatcttcacaaacgagctcttcatcatcatcaaattgatcggtataacgcggaagttcacagctacccatcctcaggcacgacggagaacctacatgatatcttggcaatatgagaaaaatgaaagcaaagttgacgccaaaaacaaacgagagattgacaaccaagtgcagatgcctcacagtcaataaaatgttcgagcatgtgtggccacgataaagcactcctcttgcacaaaagactaagattcgaaagaaaggtattgtcggaagacgcttcatgacgtggaacgaaccctgcaaacccacaacaaaaaaaatcataagtaaacagtggaaaggcaaacctcgtcgaacccggaccaactaagaactaccaggattaaagttccatatgttaacacacgacaaattagtgtcgtcaacagagacatcacttagtttcgcgaagaagaaacacttcctccagtcacgaaccctactcgtttcaccgtagaaaatcttaaaaccccgtctcgaattcgcacaaaccatgcttcggttcttaactccaatcgaaaaactagtgacctcttcaaaaagatcaaggtccacaaccaaacgctcctcagccgccaaaatcacaaggccaatcgcgttccggatgctagctaccgatagctgcgaaaacgcgatattccgccgactacagtagctcgtgagaaattctggaagtggaaaccagagcccgccctccgtaaagtaggactcaaaaaggcatatgtatccttcgggacaatccgaaggacgttgatgtggttccggtataagagcctccacgccttcgggcgcctgacagaacttgaacacgaccgtcaacgaatccttagtagaaaacgatttcccatgctcgtaaggaaatcaagtctcgccagaactccattcgggcgctacttgatttttgtttgcacgacgcccacaaaactgagaagtcgctcttgaagcactcagacccataatgagagatcttgactcactccgcgcgttctctctagcgtcgacctcgaaaacttttccacggccatgtctcggttgactgggaccctgcctaagttctgcattctcagggacgaacaaaccgttgagatctcgaaactcttcctctgtcaaaactggcaaagcatctccagctcccgactgtcccaaccaagcatctcgaatctcgccagggccatctaacccaaaatcacaaggccatccgcggttcagcgtccacgactgcgcaaccataaatcatcactaacgctcggctcgataatataagttctgcagtttgccaaatttgaccgcaccataagttacgattgaacgctcggctcggcacaacaagctttacaattcagatcgcgaataaacacttggtccggcacgaaaaatctcacggttcggtgaccatgaccccgcaaccatggagcatgaacaaacgctcggctcgacacaacaaagccccgcggttcggcgaccacgaccacgcaaccccggttcgacgaccatgaccccgcaaccatgtagcgcgaacaaacgctcggctcgacacaacaaagccccgcggttcggcggccacgaccacgcaaccccggtgcgataactccacgaccatccaacaaaaaaacaacaataacaaagacactaagagagagagagagagagagagagagagagagagagagagagagagagagagagagagagagagagagagagagagagagagagagagagatggtttcttaccttagaagagaagaagtgaagaaaagtgaagagtgaagagaaggaagcatatttataggaagagaactggcacgattactgaggcagactttttgacctaattttctatgtgttgcacagacattccgtctcgaaaaacgtgttcaagcggttattctccagtaaagctccagcaagtctagaaaagcgtgtcgaagataccgtttacccgaaacgggcccgatttatctcgaaaacgtgtcgaagccacgattcacacatgcatgttttcgattcgccttgaaaaacatgacaaagttactgttcacccgcaacgggtctgctttgtctcgaaaaacgtgtcgaagccacgattcacacggacatgtttcgattcgcctcgaaaaacgtgccaaagttactgttcacccgaaacgggcccggtttgtctcgaaaaacgtgtcgaagccacgattcattcaaacatgtttcggttcgcctcaaaaaacgtgccgaagttaatgttcacccgcaacaggtccggtttgtctcgaaaaacgtgccagaatcactcaaaccattttctgtcatgtgcctaactaatatatccaaattcttgagatacgcccgtcaagcttaaaaagactctcgcacaacggactaaggggggggggcttattgttggacatgggccttgccccttcaatgttaggaggcccaaaacagatatcaataaagaagaggcccttttgccattaaaaaggcccattaggtcgagaagggcaaaatcataatttgcagaggagacaaaagggaatttaaggttcagattccctataaatagagagaaacacgattgggagcaggatccgatccagaggttattagctgagagacaaagagaattgttgccttacccgaaatcgttgcctagcccgacctcgtcgcctagcccgaaatcggtgcctagcccgacctcgtcgcctagcccaaaatcggtgcctctcccatttctatactttgtctttctacttttacgattaagttctccgctcggcaggatagtctataaccgccgagacaaaactagtttgctgtaatctctcgatctttgttatcgttaataaaaaggaccagttccgttcaccccccaaaatctcgtatattattattgttgcatccccagtacaaacagtcatgatgcctttcagcagataaagcaagccttgatcagcgcaccaattgttcaaccaccagattgggatctaccttttgaggtaatatgtgatgcgagtgattttgcagttagggctgttctaggacagaggaaagataagaaacttcatgccatctactatgcaagtagaacacttgatgatgctcaaaggaattatgcaactacagagaaggagttgttagctgtggtgtttgctttcgagaagttccgatcttatcttgttggatccaaggttattgtttacatagatcatgctgccttgaagtatttgatgcaaaagaaagatgctaagccaagacttttgagatggattttgcttcttcaggaatttgacatcgaggtaagagataagaaaggagttgagaatggtgtagcagatcatttgtcacgcattaggatcgatgatgatgtccatattaatgatttcttgcttgaggagaacatatacatgattgatatagttgtagaagattactacaaatgtgataagttgcagaatcgagcttcagtgtcgatcgacaccctttctatgtcgattgacactcacttttcagaggaagttgttattcgtagttgcgcgatggtgtcgatcggcaccactgaaattgtcgatcgacaccctcttgataatacaagaaattggtcaccaactgagaattgcgccaccacaacggtcgagaaggactacccatggtatggtgacattgttaattacctagctgcagatgtggagccggataattttacagattacaacaagaagagattcctaagagagattaggcgatattattgggatgaaccttatctctataagcattgttctgatggagtttataggagatgcattgctgcaacagaggttcctgatatactatcgcattgtcacagctctaactatggacgacattttgcaaccttcaatacagtatccatagttcttcaagcaggcttttgatggcctataatgtcttgggatgctcagaagttcatatcgcagtgtgatccttttcagagaaggggaaagatcagcaagcgtactgagatgccttagaaatttatcctcgaagtggaagtcttcgattgttggggtatagatttcatgggacccttcccaccttccaacaagagtctctacatcctagtagctgtcgattatgtctccaagtgagtagaggctatagctagcccaaagaatgatttaacagttgtcataaaactttttaagtctatcatcttccctcgtcttcgagtgtcaggcattgttatcagtaacaggggtaagcatttaaataacaagattcttgcaaaattgcttattcagtatggagttcaacatcaagttgctactccctaccatccacaaacgagcggacaggttgaggtttccaacaggcagattaaagagattcttgagaagatagtgggaaaatcgaaaaaagagtggtcctataagttagatgatgcactatgggcttacagaacagctttcaaaactccacttgggaccacacattttcatcttctctacggtaaagcttgtcatcttccagtggaattagagcacaaagcatcttgggtagtcaagatgatgaatttcgacatcaaatcagctggagaaaggagacatatacagttgaatgagcttgatgagatacgaattcatgcatatgacaactcaaaggctctacaaggaatgcacaaaggcttaccacgacaagaagatcctcactcgaacctttgagcctaatgaccaggtacttctttatgattctagattgacattgtttcatggaaaattgtcttctcgttggtcaggtccctacatagtccattcggttaggccatatggaaccatcatttttacagataacaatggaagatcatttgatgtgaatggacagagagtcaaacactattgggctgaagccgagattccagtagaaaagcctttggatcttcaagacccacctgttgattaagcaattgcaaagtcaagctattgactataaacaagcgcttagtgggaggcaacccactagtaagtattcctctttttcattatttcattcatttgagtttaacttaggatttttgtttttatagaattttattcagattagaaagaaaaataaaaaagggtgtcaaccaaacgcgatggtgttgatcgacaccatccgagtgtcgatcgacaccatccgagtgtcgatcgacaccattattttccatgtaagtcgacataacctaaacttcatcttcttcatttcatttttcttccaaaccgccgttttcactcaaatctctctaaattcttcgatttgtaggcagtacgatttgtatcatgagctagttagacaattcatggcttttgttagggtctactatgtgaatgacaggaaacgcaatgctcaggaaggagctcttatcttcttcatcctcagtgtcagatacagtctaccactcagagtattgtgcgacatttatggctttgacaatgatctcactggagtttcgttgcttggacagtttaaagatgctcagattttctggagcaggtttggcaatggaatttatgattccaaggacgcagtacactcagagattcgtcaccctgttctgcgatatttggttaggctgattaacagcacactcttgtgcaagatggaaccttgcaagatgagactttatgtgttgttgttactttatcatgctgttcatgatttcttccagatagcttgggatttgaggaggttgaccgcaatgtcaactttggctctgtgtttgctcatcacttggtctctctcaagaccaagccctttacaggtaaagagaagaaatatgagagagtttgcagttttctcactcctatatttcagcactttcacatcaactttgagggagaggaggtcaacacaacgatattcactatggatgagacttatctgaagaactctcactggctgaaaggcaacttactttggtgcttcagagatgatacatggcaccatatgattcagttaccttgccatgcgcttacagaattacaggagagcatgaggagcttggttttcatcccgatccttcccttctgcattccgcgccacgcaccatgaaacatagaggttcagcttcaggatccgcacctacacagactgaggatgagttcattgacctgctgggggtactcgaggtggctcttcctcttcagctctcccatatcaggtgccttctcctcctcctatcccgatggagccacatgtctttcagaagtacgtcgtcgacagcttcaagagcgtctggaacgccatagctacactatctcgctgcggatgtgttgctcccactcgtcgccgtcgtcactctcccgcactcggagcatgaagattagccatcctccctatcttgctttgttttctaactttgtttttgttttatttcaacctatttgttatttgttttggaacttgttgcacttattttcttatgctttgttgaaactattgatgtatgatttagtgatttaacagtctaactggaggatccatttgaaaacactaacccaagctctacaacattgagctgaattcgcaaagctgtgcaaacgaccagagtgtcgatcgacaccaccgtggtatcgatcgacaacactctcaggtggcaactcacgtttctctaacttttaacttttgactatttttctttcgattccctagcttaataactttgaggacaatgttattttagtttgggggagtcagttactaaattcatcttttcttttcttatgagtcagttgtgtcattcttacttagatagttgttttattaagtcaaaacttttgtctgaaattatgatctatctctcgagtttattgtctggattgcttaagtactgtagattcaaatcaatccgactaatggaaaatccagaaagccaaccaacaaacttaaggacgtccattcccaacataatccacaaaggttggaggtaatctcactgctcttccttttacctcatcaaaacggttagtgttcatgggacttggctctttgttcatacctgataagtcgaccaatgtgataaaaaaaatgtgttcctctccccttattaaaaaaaaagaaaaagaaaatatatacatgagagattgataggattttcagacagtgtataggggtaggaatctttcctatgaccccattattatacattgtttgaaatgatcaattacaaaggttggaaaaatgccaagggtgtcaatccagtatgcgagttcccttttctttactctctaaaaagaataagtctgggagagagaaagaataccaaaaaataaaaagaaaatgaatggtcgatttgttatggtatagtacaggaatgagtctggaaggttcttaaacattaacttgattgatgagacccaacaatgataacctagtggatatagttgagtgctttggtatggaatctaggatgtagtgtgggctagtggaaaattatatggtggtcaggatttgactagaactctttagtgcatggatttggtttgtatgctcagggtaataagctagagagattgggagtttctacatttttcaaacctctttcacagattcaatcttttgttttgcttgagggcaaacaaaggcgaaccccaccaatatttaactatacttctcaactccgcaagctgaagagaacttttggccatcagaagaaaaccttaaaaggtttagctcagactgaagatcctacagaagatgactggtatgagatgagaaaaaaatttaaatggcaaagcagagtcatagaggggttatcttcaagggtgatgaagctgaaagatcaactttgagattttgaaaaaagagttaataagtattcgatgggcattgatctagagaagatggaaactgcactagctatcaaagagaacaatgatttcacaacagaatggtttacaccagaagatgagaaaggagttcatttagaggaaaaaagcttagagagtaagttgttgagtgaggaggaaatccctattcttacttattctccagaagtgcataaacaaccaaccaacccctctactgaagaagaacacttgatttttgactctgttgctaaagaactcttggagttctggactggatacaaagctcaggaaaataccattggaaagttaactcataagatggaagagttaaacaacaccattctggaacttcaagaaatggttaaaggtaacccaagttttgaaattgaggattggtcaaaagagcctggttgagaagaagatgactactatactgatcagaaagaagcttattttgaagagaaatcaaatgagcactcatcctaccatatgtcaaggcactgaaaattcaaccactaaagatgaggacttctcatctcctctcttcaacctttttgtgactaagctctgtaagagtcaagcttagtgacttaaaacaagctcacttgggaggaagtctcatgtctatccgtatatataactttctactttccttgttatttttgatgtttttgtttaagtgtttcaggtttatttcattgacctttatagagtcaatgatcgaataaattcaaaccaagtcaagaatcatctcaaccgttgatcgagtaaaacgaggaggagtattataagccgttggattgattgaccaaatgagagaaatgatcctcactgtttgatcgagtgttcaaaagcaaagaactctccatcgtttgatcgagtattgcgcatttcaagaggatgctcgaccatttactcgagcttgaattatttggagaccaaggcataagtcgcgtgaccccacttgttcccccaacactccattacttgatggacaaaacaattacccataccctcactgtttccaactcgctcttctatcccttccaaaagaaaccaaagaccatcctcctccacccattgaaatcgccaaaccatctttgaaattctctctttcatcatctcattttttgcaaatcctctatctctcatcaatcatcgaaatcttcattgcaaactctccctttcactcctcaagaatttgttctcaccatcaccatacctcaccaaagttactcgatcattcgcaattccatcctcaaattttcgaccggtttttaagctcaaattccatcaccaaaaaccgaatcctttccactttgatacctcttggagagttgtttttgatcactttgttgaagctcaccaccaaactccatggattcaagaagaaatagttcatctcgggctagaagatcctctattgataacgaagaggttgcagcaattgacatgagtggtatgactgatcgccaaattcaccaagctcgccgtgctcaaaggtctagctcgattaaaggtggaagttcaagtcgttcaaccatgcagagagaagaagtagcaagaggcaagaggattgttgaggctgaggaagaacaccatgaagaggtagtctttgaagaagcggtttctgaggaagaggttgagatcattggggatgatacaccagcccctgttgggaaaagaaaccggccaagaaggaagagagagccaatcccaagcgagtattatcaatacttgaaggaattgaagtttgagggaattaactagataccctcataaggaaacaatacaagagcttggtattcgtggggaggtggaatacttaatggagttggccaatcttgcaacgttcatgagctgccaatttgggggatttaaagaggagagctgccaactccttgcaaccctcaaagtccattttcatgttgacgattcggagaaagaagaaagaggaggtctcggttacattacctttaaggttaagggtgtcgagtatgcgctggatatcagccaccttgatactatttttgggtttccaagcggagagagtatccaccaagactatgaccaagacgagctactctctctttggacaacaatcgctggtccaatgccctactcgcctgccaagagcaagagtttttaattcaaagtctcgtgattagatacctctaccaatgcatcgccaacaccctttttccaaagaagactaccagatttgttgatgaaggagagctatgtatgattgatcaagctttattcttcattctgagagagaccaaggatgagaggaagatggcgggtgatagaggagacacttcgttggctgttgttcttttggaccacctattgagctatagagagtatgctgcaaccatccatcgctcatggattcgcggaagtctttgtgttggtggtatcttaacaccaatcctaggagctgcggggatacacttgggaacccctgacgtgtaccccaagttcctcgaccttgactatctcaagggaaaggattatcttgacaagacgactccagcagatcactgcatcttcaagttcaaacatccggatcttggaccttctttgttatccctaccttgcgagaaccgaacttcagttaagacaaggcgcaacatcaacttcatgccatcttcctctgtcctgaacatcgacatcggaggagctagagaagatgaacaagagtatactcaagctgactatgagcaccaagagtattatcctgttgagtttgagcaacaagtcgaattcgagcaacatagcgaacaaccagagcaagagaccaatgaattcgagcaagctcactatgaagaagatgctgatcaaggaggagatgagatagctgaagttcacaagaatctcggtgtgcttgaagagcttgggaatcttcacagcaaaacaatgaaaggtttcaagaagaagatgagaaccatgaagaagtcgctgaagagtatggctgctcaaatcaaagacttccagagcaagccaaggcccccgtctcccaccctcgaagtaagaagaagcgttccacaaattctgctgcaagaagagctaacacgatcgatcaaccccgagcttcatcatttgagtctcgggaaatgatctccgagttgagagagccgaggagtaggcagagaagagcatccacacgctcgaccaactactcgaccggacaggacgagcaaaaccttcccgcctcaatatcagtccctgcttatactcaagagagtatggacgatttcgtatccgtctacttcacctgaccgctgaggtaacaccaccaccaccattgtttataccataactttttatttttcatttgtgtgttctttgttttggtcttgaattctctctagatttttattacacaagggactgtgtaatttaagtttgggggagggttcaagacatgtttgacattgtgttctcttttcttatttcaaattttgcatcatttaagacatagaaaaaaactataaaaatttgaaattttttcagaaaatgacttcacaaaaacagttaagcatcatgtagattgtatttcattttaggattgtatatagagtgcttgcatttaggattgctcatttgcataggggataatgatgatttcacaccgttaagcatgttttgattcggtgaagtaagttcaatgcccaggttgttagttttctgttgcataaccgactgtttctctgaagtaagactgcaccctgctttgaatttacaacttgactatactgctttgattcgaaactcgctaatctgatgccattccctatctattagaacctgaaatgaatttgcaattatcatgtctatgcattgtttgtgaactcatggctaccatatacatacttggattatcttattcacttcaccaccctttgttaatccaagtagctgactctcacttttagagcagtttctcataccctgagcctaaccttatttcaagccaaagatcatttgtgtgtgattgtgagatctttttccgattgagcttggtataacgtgttaggtatgagccgacaagagcagtctttcatgttgataggactaggtggagacttgtatttggaattgggattgtgtatggaatgaatgggaaagagaatgagcatgaaaagaaaagaaaaaagagtgtaagagtttagagttcttaagggggatacaaaagaaagtgttagtctagtaaattgtttggaattcaaagaaagttaggcattataattcaaagaaagggtaacacgccctctatgctaagattagaagaaaagccttaagtttgtcaaagtttaaaaccaaacccgctagattcttgaatcgttttaaagaagcaaaaaatgatagaatcagaaaaaagggtagagttaggacacctaagggactgggattatcttcttagctatcacactatatatcattgggtagatgggagtctgttcttgtatgtgtccgttggtttttacctttagcattgtactaaagctcaatcttttctatgagagtcccctattactcaaccatgtcattagaggaaccatttttgtctcttagcctaagcccgaaaccaaatgagttcataaccattgtattgcttgatccaatgttcgtgcttaataaacgttaaagggaattggttgatgtgaatgcttgaatagattaaagcagttgttaggttgcattgtgacgagtatggctaaagtttttaagtaaggatccatcaccttgcaacctagaattagctaccttggacattgatctcaaccgctctatatgcatgcttcggtttttaaatttccaccttcaaacctctgcttcaacttaagattttttgtttgcttgagagcaagcaagagataagtttgggggagttgataacaccgtattttactcattttaggcatgtatttatcatcatttagcttagtgatcactcattgtatcatatcattttgcatcacatttagcttattttgcacacttagacatttaggatcatcttgcgtacatatgacatgttttggtatgttttcaggtgcagaaggagcttacaaggaatctactcgaccctctactctatcaaactaggagagaagcagcaaggcaattcaatcgaccccttcacttgatatagccagctatagacgaggcagcagactctactcgacctcctactcgatcctctactcgaccagttactcgatcaagggcaacctactctacaagacttgttgatcgttcaaagcgtccccagatcctcctcattccccactcaaccagacatttgagcatacgaatagcagaggaagaagcaactactcgaccaattgatcactcggagcatggaggcaaaggcacagactttgcagcaccctctttactcgatccccaagatcgagcatccatccaaaccacctcaagtctcttttcttctagtgaatctaggatttttgggattttagtataaatatgctctttgggatttgtccaaaggaccaagcttttattctgtagtttttctttgtgtgtttagaatcttgaaaccttaattactcttaatctatttcgttttttcatttagttcttgagcaaagttgtttatcttgtttagatctacattttgatatgatttcagtaatttctgggtttgtgttcttagttatgttgcttgagtagtgattagggttcttgaggatggattagattagggtaatctctaggttagtcaggtggttaagattaggttagatcccttctggattcgttggcccctatgcggttttcgctggctaatgtgggaattcgaccataggtatccagcgtccaaaagacgttcaaatggatgcatgatctacgaattccagagatttgtagattctattcgaagagattggatgtttagactgcttaatgactttggtagattgttgcttaaaccctgctctgctatgtttcatcaatgagagttaagattaggaagtggtagagttatgagggtctctgtcacgagagtggattgacccggtttttgaatctatcgtctagggtatgtgcctttcgcctattagccacctgatgaaccctagagttgcccttatcaatgaaaccatccatggaacttctattattctcagagttatttgtattcaccccttgattcactacaaaaatatggagcatttgtagcgcccgaaaaacgctatttaattatactatagcgttattagaagcgctctatcatcgtccgtcataatatgtcggagacatattgtagcgcttttttgttccgctatcattatttaatagcgattagtttctgatataaataactattatacatagcatatttaatttgctacatataattagacaatagcatttagttaattgcaatatttatatattaaggcatttttaattatgcaatatttcttcaattatttccagttcataaattaatttttaatcccaaattcagaaagaaattcatattatttagatatcataaattcaaaatttagaaagaaattcatattatataaaattcaagatcccaaattacatttcaatgtcaaagtacttaacaaaaaaaacccatataatgtttacacaaacatgattttatcactaggccaagccacaatactacctactgcatcggcaatggtttgaatttcagagtttggtctccatacaacaacatctttaatctttgaaacttctacacataccttgctcgcatttggacctaggggcatatggtggactgtgtctgaacggttagaggtacatactcttccttgtgcaactctttctcttccgttcttgtaatctaacatgatgtatttcttcttggcagatttgctggtggtagcagtactgttacttaagctctacaagattcaaaaacaataccaagcattcatgcagaaataataccaagcattcaagcagaaataatacttaagtgattttataggctgtaagttaaagtgcagaaatttaccagtggtggtgatggtcttttatctgctgatgctgtttcataccgtggaggagatgaattcacatattttatactatgaagtggccatgcaatgttctcatttagtacatctcccatcacaaactttcctggacttggtctccacaaatatgcggctttgttaaacactttctcaaccttaacaattccagcagaaggaccaagaggcatattgttcacaagttctagttggtctgttgaacacaaccgaccctcaccaaccacagaatcagccatattccaatcaattatgatgattttaacggctgatgaatctttagcctaaggcatgatgcataaataataagtgactagagtcagtgtttaggttcagctagataattgacaagtgatgagaaaaagatattaccaaagatcctgcagtctgattctcagaaggtgatgatacatcaatgtctagaatgatcttatcgaaaggccagacaatcttgttccctaaagcttcacctagtgtgaaaactgatggtgtaggccttcacaaagaagctgtggcgtctgacactgacttcacaacaacagccgcagcattacgtccaagtggaatccgtccaatcttgttcatttgttcagtagaacagaattctccttcacctacaacaacatcatcatctgatcaccaatcaagtaaccgacatcgaacttctgcactaacattactagcctcagacttagaaacctcttccacatgttcctgacaaaaacaatggaattagtaacatataacattcaattttgcttaatagcacaagtgtattcagttagataatttacctttttggcatctaagccactaactacattttgcaagtcctcaagctttgtgaggaaatcagcttgtgtagcttcaagcttctccacacgtgaatctctagctaacatgaatgctaacttagttgcagtgactcctctgcccatacctttaagtcttccaggcttgtctttacctaatacttgactcacagcatcttctttaagatcggtgaatgatgatgagtccatttcactatcaatagatttgattttttcctgaaacagaatgtaatgacaataagtactagcaaaacaaaaaaagaaagcaagtgaatgattgtcttacaatcgtctctgcaaattcagggttgacagatctcccatctaagtgtgtatgacctgctatccaagtcttgcttcttgtcaccaatttagggttggaacttttttttttctacaaaacagatagtgattagttgatggtaaccaatttacacaagcttaattgattacagagtagacatatactataccatctcatgggctaggcgaatcattcctttgcggcaggtggtgtgtggaatctgtgccttcctcaacatcctgtacttgtcacttatttcttgcaaaagcaacttccattaaaacaaatcatcttctaaagatattcaaatgtcaatttaataacaataatacacaaccttgaaggcagtggtcttcttgttcttcacccaagcattccaagccgtcacagattgtatgttacttggtttcagcgaaagcaaatccgtcttgctcttcactgcacgcactttcgttgtgagcttcgacttagaagacctccacacataacccatcggcttaaaaacaacatccttttgccaattttctttcaaattgaacctcccctacacattgaaaacacatagttaaacacaatcatgcaatgattaaactcagcaaatgagactgatatacctgaatctcttcccagagtgtgtccctagtctcatcaggtaagtgcctccagtcatgaaccaaaacaggtacatgctctctcacaagaggaccaaagaaagatgaaagtgtgactgatcctgaacctacatattcacccagagaagtaaattcaacttctagcttctcgtcaggttgctttgctattttacgcatcctagttggttcccgtgtcttccttttcttggttgcgaattggtggctttgagttgattcagtggacagaatctcagttccctcttcttcagttccagcttcctctacagccatttcttcttcaattccttcttcttcaggtggttggtgatcttcttcagctggttcagctggttggatttcttcatcagctacttgttcagtctcttcctcttgtgcagccaagtctgaaccaagaacatcagctacttgttcagtctcttcctcctttgaagatgggctatggctgctttctctgccagagttttcttgctttttctatgtttctttaatccaacagtagaactcaactctatcccttgcacacgcttactgcggcgaggttggttctcctgttgtaaagtagacattctttacctgaaacacaccaaactaattaatactatctaacacaaaaaatcagaaactcccattaaccaacacacaaagactccattaaccaacacagaaactcccattaaccaacacgcaaagactcctataacgaactaaaagcaaaaagacattgacatcaaaagaatctcgtaaggacctgttactaaatgtttactaaggattggtttatttcagaatcacgtaatgttatatagattctaataataataatttaaataaaaaaatagatataaacttgaaaacgcttcatgaacagatttatcgactagctctgcaaacgcaaccggaataagtcgttgcatcaaaacatgacaatcatgacttttcattcctcttaactttcctccagatagatcaacacagttagatagacttgatgaatatccatcagagaattggacatcattgtcgagtcattgcaaaaaagttgattttgcatcggcttgtaatctgaatttagggattggagctttgccctcagctgttaagtgtagatcttttcgagtacaatactcttttaaatcaagacgtgatctgatgttatcttttgtcttcccctacacattaagtaaagtatatgtgcatcacatcaagattgtgtcgaagcataagatttttccaataaggtagctcccataagatgctttgcttatgccagttgtgagttttgccgtatcctcgtaatcgcccatggtttcctccacacacaactgttttcggacaacattcaacttctttcaagaacttttcacctgtacgcaaatcaggtggattgtcgttcacaactcttcctcttttaaatttttttgtgttccgtcgatagtagtgatctgttggtaaagaacactaatgtcaaaccaacttgtttttctaccattctttaactgaaatgccttcgtctgatccatacaataaggacatgccaacctaccatgcgttgtccacccagaaagcatagcgtacgcaagaaagtcatttattgtccacataagtactgctcgtaagagaaagttttgcttggtagatatatcgtaagcgttaacaccattaaaccacaaatctttcaactcttctatcaatggctgaagaaaaacatcaagacttctcttcggatgatttggaccaggaaccagaattgttaaaaacatcaattcttgtttcatgcatatctagtggcagattatacggagtcgagattaccggccatagtgaatagttatgtccagacattccaaatggactaaacccgtccgtacataacccaaggtaaacatttctaggctaagatgcaaaatcagagtatacctcattaaaatgtttccatgcttctccatcagaaggatgacatatttctccatcaatcatcgtacgttttgcatgccatttgatatcttttgctgtattttcagattgatataatcttttcaacctatcagataccggtaaataaaacatctgccggagtgggactttttatttactaggcctttgagtagggcgaaatctatcttttttacagaactgtaagtgctctccgtttgcagtatctttccaaaatatcatgcaattgtcttgactaacatcgattttctgataaggtaaaaccagagaccgcattagcttcttgatttccaaagcattattaccttctggcaaatattctttcataatctcacaaatcgagtccatacaattctgtggcaaattataatcagtcttcaaactcatgaatcgagcagctaaagagaattgtgaaagtccttctttacatccatcataaattggatgttttgcagcctccaaaatatcataaaacttttttgcatcagcattaggttcttcgtccatgttttgatcaaatcctgactctgtaaaatcaaacgcatctaaaactattgtcacataaggattcgctgactccgttaattagacataaaacctctattatattaatgcctcgacacagtctcctctggtagtaaaggttttccattctcgcatttgatacatggacaaaaaagtttcccggtttcgagatatgaaagttgattcttagttaatctcataaaaattttcaatccttggcaaaattcttttgatggtacattagttccgcgatcaactctttgatacatccaccttcttgtagcataaatatcattattcgacgacattaattttgatttgagataaaaaaaaaaatgtatattaggatcgtaatcaaattttataccaattaattagtattaaaataaaataaaatagtaaaacgtgtgtaaagttgatcctatctacggcacaatatagtttctagaagttatctctgccctttatcgcttacaaccaacttgatagtgatttttggattttttgtactacaatatcttgttctagaagcacaaaacaaaagaaaactagaaaactactgtttcgaatgttttaatcacaattgaccacggatcacaaaacaaaataaagattacttgtatgaaaagaaacttacttcccttgtgaaatttgtttcctgttcgttacactctcgatctttagctaatagctatagtctattgatctctttgcttttgtttataaatctagatataatatcttattatataaagtatggttttcaaagttactaattcataggatcgtgccacgtgtcaagtcaaacgatcagatgtttacatgtgtcattcaaaatttaattttttattctcttaaaaaaatagaaaatcttaaaaagtaaacaaatttacatatactaatttatatgtctatatatttataaacaattaacatttattcaataaaaggaaaattatcaaatttgtttttacatgtgttattggtcatttaaatgtagcacatattaatttacatttactaatttatatgtctatactagattttgaccctcggtacaccgcagggatagtttttttaccaaatttatatattgatgattttttgtatagttgaatcatatgttttgtaattgagtttaattgtataatatgtgatttaagcatgttacgtgggattgcggttgaaagttttagtttattaacggaatattataaaacgtttttgtgtagaatataaatatctttctactcgggatgttgacgaaattgggatgttgaagagtagtgtatatatgttgttttaatgattttttttataaaatatatgttaaggtcttttggattgaattttcgaatgttgtgagtttgtttttaaaaaagtgatttttttaaaaaaatgtggcaaattaaaaaactttagtaaacactatagttcaaaaagttttatttaaattccagagaagatagatattttaaaagaaacaaatttcggattttaagcccaaatcaaattagtattcctaagcccaacaataagacaacacctattttgtttttgcttataaaagatattctgttttgggctggaatcaggccaaatatgcccagcagttaattatttggcccaaacagagacaaaatcccttatcttcctgaaatatgttgtctttacgactgaaggattctcatctgacatcccgaacaatccgctctcttctccgttacaattagataattccgacagtttcttccattggaataagcttctcttgatggaaaaacctgcaagtatatttatacaaaacaaacgctcttcatcatcgtactcttgtagattcaagcaaccctccttctcccccttcagctgcacgaagccctcctcctaaatcaggttaatatgaacatcactgcgttatttgatttgtttgtataagatgctgctttgattatgtaattgtgttttgtatctgttttttcagtgaaccgtgttcctttttatgattttcttaagcaatctcttttcatagattagtggtttggtttgcattggtcgctcttctgcttaatctatcgcaaccaatagcaaagtaagaggaacagaaattcaacggactctgacactgcatcacacttccgatgcgcatgtaactaaaataagcttaagttaattaaacttctacgcccgtgaaaactttgtcttcagattgctaatgttcaaagcatagacttattttgtgtatttttttttctaatagtaacagccacagaaattcttttctcatgattctgcttcgcaggaaatggagccaaaaatgattgaaattgtcactgactcaaagtcaatagcgcaagcaatggtggatgcagctatgaaggtatttataatatatctagagacttcagagtcttctaaatacatagacgccaaagtcatacaactcaaatatcttttgtttaaaatatcttccctttgaattgtttctcatatgttattatgtctcttctcatccatcacgaaattgtgaatatggaatccaaagtcaagtcagatgctcacgtctttcaagtttggttgttggttgttgaatttgctcacgtctttctttacatatatcaactaatctcgcttgttcactattttctttgtgattcaatcctaatctctataaggtttaatattgatatgcatttcaggatatatgtttatgtaaggatatggtttgtttttggatattgcagcaagaagaggagatggttatttcaagcaacgcaagatgattgatgatggctattgcaagaaatcgcaatcatgttttatcatgtactttggttagtatgcatacacaatctatgtagctacatttagattaataggtgaaacttaggaaaagtaattgtattgcattgcctatgaatcaatcagatttctgtttaatcaaaatactaaagctgaaaaagaaatgataagatgtttacttgaaatgggagtagtgattaaacttgcattgaaataaaaatagacgttaatgaaaatagaatgaaacggtggttctgtgaattggttcgtttgaagttgagttccacaaaaatacctgcattttaaattagaaaagtaatagagatataagtttttatgtgattgtgattcaaaccgtaattgaaactattatatataaatttgataatgagaagttgacttacccaagtctacggtcacatagatggagtaacttttactcaaactatgttttggaaaacctccttgaaaacaacgtttgttgtttgtttttgcatgtttccgtctttgtctagtattaggattttcaaaccttttttggaggtaaccctggacaaagcaacatagagttggccatgggagaatacaggtttaggcaagtagagtccaacttgctcgagtgattgaccctgactcttattgatggtcatagcaaaagcaactgacagtggaaattgccttctgcgcatcttgaatggcagctttgtatctgaaggtgtaaggttaattagaggaatcaacacgatgtcaccaattctatctcgagttattactttggcttgaacaacttgtttggcaagttgtgtaatctgtagcctagtcccattacaaaggcctccttttggatcaagattcctaagcaacataacaggagcaccaaccttcaaccgtaaagcgtggtgaggcatacctgtcagctgtatactgttcaaaaaatctggagtaattacaggattggcgagtgagtccgaatctgttgggtcaatgctatcagcacttaaatagatccgttcttcacctacaaaaaaacaaaagcaacgtgtaataagcataaaccgttaaagttttcaattagtttaaaccgtaaaaatctaaggtagttggctgacttacttttcaaatgttccagcatatactggtttatagtattgacgtcttcattggttggtgctaaaatagctctcctttggaaaaacttaggatcatttatcatatgcagttctgacggatccccataaatttccttactgatagcttctattgggtttcctgcttctttaatcaacaattcctctggaatatcaataagtgcctctccatcattaggctcattaatcctaccatcaccgacagccaataaccaatcagaaaactgttgtatctctttagcttcctcgctacttaaaccgcctgataggagtcgcatgttctttgttaatttcagaaccttgcagtggtcccaaaggtatgaggcattgagtgaagacatcacaatttctactctccctgcaccattaataaccggaagtacttgtctaaaatcaccgccaaaaacaactacctttccaccaaaaactttgttgtctttgttattgagtatatcgtagaagcttttatctaaagactcaaaacagaatttgctcatcattggcgcttcatcccaaataataagagatgcttctttaatcaaattagcaagatcagattttggtgtgatcttgcaaacagaaaactcgtcaggatttagtgggatagcaaaccttgaatgtgctgtccgtccaccttctaacaacaaagacgcaatgccgctggaggctacattaagcacaatctgtcctctagatctaacagcagctgctaatgtcttccagataaaagtttttccagttcctccaaaaccataaataaaaaaaacacctcccaaatcattgaaaacagcaccggttatctcatcatatatgcctctctgctccgtatttagcatttgaaaccactcatcatgcttttctttcaagttagaatctatgttatatctcagctcatcaacaactaaacggttggagttatcaataccttctctagaaggctgtggaaaatcctgaatttctttgagtgttgcaccgttacgtaacataatcttctcaatttcttgcagagtgtagttcctaatttcagccagtgtaagtttcagatctgcacgtgtttattaataataaatagaaaaactttgttaggttttgaaacaaaggaataatgatttacgttttcacgttcatctagtataatgaatcacgttttgcttattttaaaatattacctggattcttaaagtcttctcttttcttgttctcaatatcctctgccaaaaggtgccatgtttctgaccatacgtgctcgggtcttgcgagagaatctgatagaagcaacatagcaaaaaaatttctcaagtaatctccaaaacagaactgactggcttcatgtagaccatctatataaacttgatcatcatccagaattcctcttgcaaaacatgcttctttgaatgatggatatacgacaccattaaatgtcttgatgtcatcataactcataggccctttgactatgttgagaagcactcgaagatagtattcaacttccattttcctacacacgtagttaatacgacccaaagaaaatcctctaattctcttaacccactgcttattctttccatcccaagtaaaataggcagggatttgagaatatagaagttctctagcacgtttaccattttttccaacatcattattcttattcaaagtcaaccaagccatgaacattgaatcttcattgcttatacgttcgaggacatcttcaatatcagcatctggtttggcataaacaggttgcttcccttcatcatggaaagatagtctttgaactgctgtagatcgatcctgaagtggaaatttgtaaatcctccaaacagcttccgacgcggatacgtacctaaacataataaaattaagtttaaatatcgcatattaacaatgccaatctatgaaatgggtgacggtttaaacaattacctgcagtcaaaccaatctttgatctcatccttttttttctcagtagaatttggaggttctccagaggtcgcattctctgttgttttgtcctggttgactggctctacaataaatacaacacgatctgctcctttgttgatatacttaaataagtatttgatagaaccactctggttacaccattccacgttgatatgagcttgatatcgaagtgacagcttcttattataagggacaacataaccattatcacatttaaaaccacccttctcaatatagtcttctgtcatcctccttcgatagatgggataaccatccttaccaactttggtaatatcctgatgtttctttgggtattgtttagaacatttaccttcaaccatacatggggaattcatatttgcagcaccacatggaccatgaatcattgaattcttgattacttcataaagctcgggttctttatctttatctgggatctctgcagaaataatcttatcgatatcatcagctgttggaagcttacttttagcatccatgaataacaggatatgagcatggggtaatcctcttttctgaaattcaacggtatgcatagctggtttgaaacaaaatgaaaaacaattagactaattcatgaattacttaaaacgtttattaagtataaagtgaagtagaataaatcttacaggcaactgtctttcccagcattttcccatctgtcaaatctttcattagagaatcaagcttgattttgaatatccttgcaacaatatcaggtctatcatcaacagaaagacctcttgcttggcaatgtctagttatctcaggccactttggattacatgtaaaggttatgaaaaggtcagggaaaccgtaatgcttgcagatggccattgcatcatagtagttctggaccatatagcgtggtcctccagtgagggaagatggaattaaaacctggttaccttcttcattcatagaggtagttccagcttcagaggcctttttcaaactgttgtagttctcacatcgtagctttgattgtttaaacttgatataagaaagccggttagattcaatagttgtataagcatcacagagaaattgttgaaataacctctttgagcgtgtcaaggttttacactcatttggtctctcttgtatcctgaaagcaaaccattgacgcatacttatacactttttctttttcttcttggctgaattgggcaagcatttctctataccaggagtgtaaccatcttcgccatagcacaaaataagaggatattgcaatgccaagtaggagatatgaatctgacttatccgtgttagatgacctgtagtcttttcttcaaggactatatctcggtcgaacatcgatggctgaaaacctccaggtattaaagcggcaacctcagatgatgtaggcatactgtatgtcctcctatcaacaccctttcgatctgcaacaatccgcatgtgaaacggttcatcattatcatcttgaattctctctctagcttgtctgaatttgtcaacataagggttgactttgtttagcatttcaatgagggcttcaataacttctttctttagcttctgttttgctggtgtattccgacgaccttttcccttgctacaaaatacagaaaacgtgaaggttgttgttaaaccatgttattgttttgagctgctgcagggaaaataaaatatataaaatagtagacgaaaatgattacttgatgacagtagctctgttatcaacttcgttttctgtatcaactatgtaaagttgtgaatacttagcataatcacccggattaggcttcaagctgccaatcaaatggtagtttcctccttgtagtctaaacatgtttggtcctttaccttttggcatagagttatcaactcttccaccaagtgaagtcattgcaaaaatcatattgtagattcggatattttctctgaaatttctgcttagcgcatcatcaccggtaagaaggttgtttataagcgcaggcgaatctttaagaagtggtaacttaacatttccttttccacaacacagtgtaaacgtaggagatttgttttgctgcttcttatttatacgctcagcaaaccacatcaacgccccacagtagttgcacttgtatgttgcatcaccatgatcaaggtaagctttacatgtaaatagaaaatcattaggaaacccatagtaactcttaaatattatacatacttcttgtaatgtaaagaccgcattatacctgattttgttgcagtctcagccgaattggttgtatctttattcaatcgtggccttcctcttttctttggctgcggcaaattcgggtttgctgctgcttttgcagccgttttcttaagagtagcaatgaatttttcatgttctgcacatttggcgatatgaggcgttgtaggttctgtcgggtttgcattgttctggcagatgtcagatgatgggtcagcaactggaatagaaatagtagattcatcatcagtatcatcttcagttggactgagatagtagtgttgatcctcatctgttgcattggttgatgaactatcatagttgaaatcaggcatggattcatcatcagacatttcacaatgaaagtcattattgatggtggccgaactttgacctaataattcaaaacagaatgtgtaaagattagatgactaacattgtgtgattagacattataaattgcacttcataggtaccttgagtaataggagagtggaaggcattttcaaagtcattttggagatttttccttgggaatctgtctttttctgtctgcaaagtagtctgtttgtgaaagaacatgcaagaagtagtactttcgttttggctcgcttgaaaacaaagattgccataattgtgttagacttttgtttaaacattgatatttaggttttgtcattgtatcttaattaaaaatctgttcaaaacactaaccttttccttttccagttgcagacgaaagccccatggagggaaggttggtcatgtctttaaatacaacagcttgagattgcttcatatgtctggagtttgcttggaccattgaagcaagtccagaaacaacagtggaccctaacatttggtaccgcgaatgattaattcactcttctaactaagagaaccaatgcaattagttaaattcccaaaaacagaaataagcgtttacctatatttgttgagtgagttttttttgcagaataggattgttgattgttagatggtgtcaagaagctgccaacagagctatacccaaggtttgtaatatctttaaaaactctagagaatgctgaagtaagaggaactgttgcattagtatccgcggtagtactgtgagttatttgactttgtggtgtttcaatgctctgaaaacgggtcctctttgatggattagaatcaatatttgtttcaggagaagaagaatcttgtttgtttttcatggctgacttccaatgaaaacaatgattttgcgtttaatgagtatggcgtctgctagagataaagtgtgttttttttttgcgaaaacctaaaatcaattaagccatgattttaggcgattttatagttccacatatatagaattcggattcacctatagcttgattttatttttatattttttatggtggctatagacatttaagcatctttttatttttgcagcccaattttaaaatctgtcgtaccgtgattagttggctacatctggacaaattattgtttccaagttatgtcttatgattgtttcataaacccacgatagtctttgggttatcacctttaagtaactttgatctgccataatcaagtctttggttttataaaatgatggatgagtataagatgtaaaaggtaggacgtaatcatgtgccatttttttgtttatgtataactgtgaaatcttaaaagcaaaatcaagtctgattatgtataagacgtaatcatgtgccataagtcaattttttattatgttcttcatactaatattttttttgttctcaggaacagaacgaattaggagatgaagtatccaggctacaatgtgagcttttataactgctgtagtataattacttacatcaggtacaatttccagcccaataatacagtcctttaattgaaattagaattactgtaatgtgatcaatattagtgatttgaatttaaaggtggtctaactttctgttgtaaccaaatagaaatagttatatagggtaacaataggcacttggattgtaagtagaacaaaacaatttggaagaatagaaaactttattaaggcacaaatcgcatgaaatagatgtccatgttaagagaacttattgtagaaatagaaaatttagaaaaacaaaaaccaaaaaaaaagggtctaacatgatgatcctaaattgggaaggagaatcaaagtgaagcactttgaatttatttgtaaaagatagtgagtgatcactccttcttctcaactttgaccctcacaaccacattcttcttttcatactgattgctgctcctcaaacttggatctccatccttaacgctaggatctccaagttgtgcgtgttctgaagtggggccgaattctgggtttgacttttccaagtcaataaggtttaatgcatatcttcttagaggtggaagattcatcagcagtaccatccgggtttgcgtaaatacgcttggaagaaggagtaccgaagtcagatgtgtcgtggctattctctaacatgagttgtggctgtggaaaaaaatcgtttaccatattagtttctaattgtaaatacacgggctacaaagtttgagttaatctttgatttaaaaacctgatcagctgactcaatagaggcaggattcacaatatcagcagaatattcaagaagctgttcctctagtagtccacctttgcaaagaactttccaaactttgtagacttcctttccatctgatatgtgttctttttcaacccacaccaagaagagaaacgtctttccaatcaagtttttaactggctctggcaaattctcagggtccacaacctaattacaaagaacacatattacaatcagtattggatctatcccttttctaccgtttctgtgtgtgttaatatacagagagaacatacctcatcgagtgatccgtcgagaacagatgtggctgactcgccagtgagttcagagcaaattgaatcaaataagagaaactttgcctcgccggtattgtccataacattagcgtaaagcatatacctgtcccagaattttacagaaaatttagaatgaaatagtttaactaagtccattataattactcttattaccttgggatgacattagtgaccacagttttgcaagtgtcacaccaaaatcttggttttttccctttgttattcacaccatggactccagcatggatgtggttcacttttttgttgcaagtcttacaactaatgtaataccatgcccaatccgtatcaatggcataaatagtacacaaaaccctagcctttccaatctacaaaagcagaaaacgtttttgacagatattaaagaggtgatctatatcgtaaaaacaaagatgtttatttgctagaggtgatatgaatacaacctcgattgaacacttcaagtcagaaattgaattcctcagataatcaagccagtcaacatctttgtttacaaccatttcccaccttggctgcctttcgcgggagatgaggcttaggccatcagagggcaggctgtaaaatacaattctagtaagcacgaacacattttcttataggattccatttgtaaagttgctgaaaaacttaaaatcaaacgtcacttacgcttgttggaagaaaaccgcttcagaggaaggcggattgacatgcacttgagtaacatcaaaggaatttgatagagtccttacacctagtataatatagaagtatcttaataacaattcatttagatataagagaggaagccgagaatgaattagatatacctttataagatttgattttcacaaatctgagaatgcaaatcaccattccacgattagagtcttgacatgccctaaatatctgttcagcaaatgtaccccacaaagtacagccaatcctctcatcactgtaaaacaaaaaaattgattagtgagatatataattaaaattgatttgtgagattagtagaaaagtcaaacgtccagaaacttacgtttcatcatgaagttcaaactcaattttggtcgttggctgcttctaagttctgcagctctccaatagaaacaatctgaccaatgacatctataaaagaaaaaggtgttagtttaatacaaatggaatatcgacagtgaatatttattaatattagcttttttaataaatgtttaccaactaatatgtatggattaaactctccattttggattttctgaaattttgccagtgatagaaacatagaatcagatacaggatcagatcccatcacagtggttccgttagtaaaagtcatcttgtaaagatgattcgttggccagaattgaccgccagcatagttgagagtaaaaatctcaacaaaaacccactgcccaacagttagcttattaacatgctttgacaccaagtctgtccgaatggtggcgtggatttttttgttctgaaatgtagattaattttcattcaattacaacatatgaagtagactatgtaaaaagcaaataaaaagttaatatagataacctgttcatcagagaaaatgagctcaagggtttcaccagtcttttgtgtatattgtttccaggaatgaagaactttgacttgaactctccatgctgtggtgtaggggcggacgtctttgaggtaggcaaaggtggcagccatttcgtgaggatgtttttttgtggttgctttaagtggcagatggtaaggtgagtgattcccacggattggtgttggttctttatatagtggttcgcaaagaaggttaagattgtgtttgaggagaaaaatatgggagggattttcgtgtgattagcttattttaaggtatgatgatatatcggacttatccttattatattttgcaataatttccttccgaaacgctagggaaaagattcggaatagtaggatgatcataattaagtattcggcgagttacattatcatttaaattaagtgaatagatatggaatatttggtttagcttttccaaattttaagggattgtatgtagatatattttggtttaaacgaatatgtaaggaatgttttattgtgtgttttgcatattcttagggatttgataaataaaagtggtatagacgttacatatattacgcttgatttctttggaataaaatggttcccacaaataatgtaggcgttgggccctttttttttgtaaacccaatatcatttcggatggcccaacagattgatctgatattaataacatgtaataaaagggaagggttaaaatcaccggaaatttcgtacgcatatacttggtaaacaaattattgatggaaaaaaaaaacaattaataaatccagtggcagccaccgtaaataaatcccaactccaggatttatttcacaaagtggctgcaaaaatgtatatatagatatttataaacaattaacatttattcaacaaaaggaaaattatcaaatttgttttttacatgtgttattggtcatttaaatgtagcacatattattttcttaaaaatataatttagtatggataacaatactaattaaaaagaccattgaagtttaaaatagtaatataattttctaatcattattttagttggataaaattatatttgtcaatgtaatacaatgtttttattcgttaaatcaaaacacaaaatattaataaacttataagaataaaattttgaatacttatgttttattctaagaattttaactcatcgtatgatggagcgttttgcatcttttgatgtgatactatacctatgttttattttaagaattttcactcatgtaatcataagtgaaaatagaatattttgaaaaaaaatagcttagcttataggatttaacttttcaattatttttaataagaatatttttatttattaattttaactcatttaatattaatttgcatgatataaaattaacttacgagattaccgcatatataaaaaatatattttcaacaatgtttggttttaaatattttgtggatttctgtttttttaattaattattagccctaagcgttttggtattcgagtcaggttcaggtcggctattttgggtttgggtttagaagtttaggacccgtttgggtaatttaagatttcaggtcgggttcggttcgggttaggattcgagtttatttatatattaaaatatcaaattttgtgtgcaaatctattaaattacttgaaaatttcaaaatatttccaaaacaacacgagtagttttgcttgaatatatctaaaaaaaacaaaaataactaaaatatccaaaaaaatcctaatattttctatatataagtataaatataactaatatatacttaaatttgagatatgtttggatacctattcgggttcgggttcgggtttttggggttttgatgtttagaaccgctcgggtctttgaaaattttgggttcaggttcgggtcggttcttagggttggggtattatgcctaggcctattagttatgttttgttaatttttaattatttttaatactaactaggatatagatttgatatgtcataaatattactttgatatgaaaatgttatcactcaatatgaagtgtgtaaaatttaaatcgagtttattatgatgacataaatagttaaactgtattacaaaattgaatgtgtatgatataattttattttttctttttcttttctagatattaaattacatatagaatgatgatcggttactttttagaattcaaatatcattgataagattgagtgtgtataattaaaatagaatggataagactaaaagtttgtttaaaccaataattattaaattatatatcaagaaaaatatattgattattatacaagattctatcgataaaatttgatttttgtatcttagacccgcctaaataggcgggccttatctagtatatatatatatacataatcagtataattcccattcatatcagcaataaaaaaaacttcagaaatattccttactagtatttagcccgtactacgtatatttttcttcgtttgaaaacgttcatgtgcttgctggttaattaaaaatatagatgacaaacgctaacgctaatctcttttagaacacaaaagttgatggttccttggtcaccaaataacgtaaatatatatatttcttttatctgcaatgtacactgaacaaatgttttatcaatcttagaccaaaacaaaaaaaaaaaaaatgttttatcaatcatgcctttgacactatgtataatattgaaataatacagaatatgtatgagatgaaatatttatgaaacttagcttactcaatatctgaaagacccagcccagcgtaaacaacaaaaacttttaaacttcatctttgctgaagacctctggtttgtgaattagattgtcaaaattcttctagacaaccttcaaaaaacctaacagagtactaattagatagcagaataaaagcaaagatctaatgtaaattgtttcaaacaaaagcagaaacttacaaaggcgagtatatggttggaggagatagaacctaccatggaattgaatttagccatatagatagatatgaactaatattttatgaagaactacatatattttataaagacaaaaaagagaaagataataataaactacattgaatgagaacaaaaggatggtggtggagctcgtatgccgtagcttctttcatatttcggtgaagcgacaacatgagaaagttattttaaataggacctattgacaaatgcttttatattggaaatgagattggttaatggaaaaagaaaaccgtggagaaagtggttagtttcgttgatcgaaatgatcgtggaaagatggggaaaactggaaaatgatagttggaagaaactaaaaagaatttctggtatgcatttttgcttaattatataatattattttttttccatgatccttttttttgtaattctttttaaaaataaattgtttttgctgatatgtcaaaattttattggtgtattgacttgtgctttataagataaaagatttgataagtaatatataagttttaacttttaacattacgccgtctagttaaatccattgttttgaaattgaaactaaacaaaaaaatagccctcgttccaccgacacactatgggccaatctcgtttcacctttctttagtcaattacacatctttggaagaagattattcaattcacgtgtgattcatctttcttaggcgatatactacacgattaaggtatgtaagttctttaatactcaaggaatccttttgtttagatttgggtttgttggatttgattaagaaacaaaaattgtagccaattgaaattagaatcattgtactagaatgcatgatgaactgataagtggatgttttatacagatgtcacctccattttattttaaaaacgagaagacgaaagagttatctcaacactacaggttttgagtttttgatttgctataacccttttaattctttactcttgtgcatgatttagatgatagtctaaattatgactcaccaatttctggtattctttcatccattttcttgttaattacattatttgattattagtactttatagaggaccataatctgttttgaccgatttgatttacagaacctccttctctaaaaaattggttttcgagctatgtctatgaatctccggagctgaattttagtgttggtgttgaattgtttgttcctggaaaaagtgaatgtgtaaaagagatgaaaatagataacaaaatgttgacgacagtgacatagagaacttaatcgttgaggacagtgacgtagagaaacaatctacttcttctagaagaagtctttttcggaaacctatgaccaagcaagatactatttctcttggcatgttacattcaaattattacaaggaaaacacatgtggagaccatgtaagtaattctctattaattacgaatactttgttttttctttaaaggaaaaccatatgataagaagactcattacaatgagaacctatcaagtatgaatgatgaccgatctcagctacttgaagctaagcatctaactatgtcgatattctttcagaatcacacaccaacaaatgatgaaacggaaataacttccttgaaaaaccgagtcaattatctagaagccaaagtaaagaaattgcatgatcttatcaaccgtctggttaattccaataacgactatagaaggtaaactatatgtgtcaattatgtattttggttatacttggagcatcaattagtgttaatatcattcttgtttatattcatggcgttttaaggattaagtgtttgagatggatgacataaagcaagcttgggatggatgtttacaaagttcaaatggttatctattgcagaaaacaatgaaatcattatttttatgtctctaaggttattacttatgaattgtgaaggatgtaatcgattattttatttttttacaaaattacattcaaaatatgcaaattagatgtactctggtatgttattataaaactagaatttcatttaacgttagtcacttagtctaacattgcaaccaatttattttgttattatgtaactagcattcacaaaaaaaaattaatgcttagtaaaagttcttgactgtcgtttagttactaattggtttcaatttttgactatagtttagtcacattaatgttgcaaattaagactcgtacatctgtcacaaatgcgtcacatatttgtggctacacagtagtaataatattgtcataattgttatgattgttattgttgttactatttcgtccctaatcgctacagtttttggttagcacttaatcctaacaatattgtgacgaaataattacgaatttgtgacaagaaaaatttgtcacaacaagtgtatcaaaaaagtaacaaatttgttacgatttttttctgtatcaaactaacgtcataatgattcactttttttgtagtaattataaatatttgaactttataaaaatttaaaataagtttaaatattataaatatttataaaaaaatattaatacgggacaatatacaacacttgaaattttagatatgacaatcaaaatacaattgtgaagtttgagtcgatattaaaacttttttttttcttctaaaacctttattagtgatggaaatcgcaatcattgtttacaagagacatgagaaagaaagggcatgtatgatacaaagaccaaggttgtggacttataatagcttttttcgccagcaggtctgcacaattattttgtttacaatgggtgaaggtgaatcttgagttcatgaaactacttctccaatgttgtattgtccccatatagtgtttgaatcgaaaattgttgtcgttcgcattgatgacgtggttgatgattttgttatcaccttcaaatatcacagaacggtatcctagtccccatgaagcttgtatagctcaaataagggtcgtgcattcagcttcctccactgtgctacgtccttcaaattgtcccataccacaatccaaaacactcccataggaatctcgaattatccaaccaagtcctgaagcccagagccctcatgatgtgacgcatcataattacatttaacccagcccctcgacggtggttgccatttatctcttcttgttctatgaatggttgtttcctcacttagtttggcctgatgaatgacattgtcaatccattcttgagtatctgttgttgccaactgaattatctctcgtgcactaatgacgtttttgttgaagactagcgcattgcgacctttccataatctccacattatccagaacagtagatacctactgagttcatcaactttatcatcattgtgaactttaaataagtacctcattttatcttctatggaggattgtgcacactagtatcaagacaagttgccctccacactactttcgcttgtggacaggaaaaaaagaatgtggttcccaatttcaaattctgtgcaacaatgtgcacaatatggattgatgatgatgttccgtcttcttaggttatatgcaactccaatggctctcaaagctgttctccacaagaaatgcttcagtttaggaactatattcagtttccataatccttctacaatatccgggtgtgcagctagcgggggagcattaggcgagtcactattctttgttgctggtacccaatagcctcacttcacggtgaatcttccatccttcgtgtaactccatacatatgagtcaggtgatcggatcggaggaacatatatttttctgataatagggtggtttatcggttcaattaactccgcaaggttttgttcattccattgagatatcgtcgggtcgagaagatcactaaccaacgtttctggatctgtcattggcactaacattggagggcgtggtgggtttgtcagtagccatgggtctagtcctattcttgtgccatctccatctccgatattcttttgagccccaagttttaacaactcgcatccaaatctgagtgagctccagccatatgagggtcgtgttcctcatgacgcatttaggaagaccccttgttgaaaatatcttacttaagcattatgtacagtaggcttattggcctatgtaacagcttccatacttgatttgctaataaagcttgattaaattggtgcaggtcacgaaaccctaagccccccccccctctctctttggggttgacatttctttccagggaacccatgatagtttcttttttgttggggttgttccccaccaaaatcttgatatcatgctatttagttcaaaacaaagttttatcgggagctcgaagacattaattgaataaatcggcattgcgaaagccaccgatttaatgagattctcctttcctgcagtagtgaggaacttgttctgccatccattaatctttttctgaacagatttcgatatgtattgaagcatttcttttttccttcggccaaattgctctggtattcccaaatatttccctccacctccaatgtttggtatttgtagggttcgcattgcttgatcccttgtttgttgatagacccgactcccaaatgttatggatgatttatcaaagttaatgacttgacccgaagcctctccatactcattgaatattttgaggaggctggtgctgtttttttggtctgcttttaagaaaaatagtgaatcatcagcgaattgtatgtgagagatggatggaccgccattgctaactcggattccttttatatgccctgtctgttgtgcattagtcatcaaagagcttagaacatccgcgcataggacaaaaaggtacggtgacagtggatcgctttgtctcagacctctagatgactcaaatctcccatatgggctaccgtttaccaaaacagagaaggaaacagagcggacacattccattatccattgtatccaacgatctccaaatcctttctgtttgaagacatcctgcaaaaaactccattatatgcggtcgttagccttgctgatatctattttaccgccatatattcgttagcacatctttttttgacccgtagaaaatggaagacttcgtgtgctatgaacacattatcaatgatatgacgttcaggtataaatgcagcttgattttcagagacaacaggagatagaaatgactttagctttttaaccaagattttggagattatcttgtataggacattgcatagactaatcgatcggaaatccttcattgtttttggttgttcaatctttggtattaagcaaagatttgtgtgattccatgctgtgtccatagtccttgtctcaaagaatttcttcacttccgccgttataacagggcctataatatcccaatagcgtcggtaaaaagaagctgtaaacccatctggtccaggagctttagtagcaccaattgcaaacaacgttgttcgtatctcatttgtggtgatgtccttcaatagaagttcatttgtcgttgtagagaccaccagttgtatatgttgcagcacatttgttaaatcacgttgattcatactcataaaaagttccccaaaatatctctcagcttcctctgcgattttttgattgccgtagatatcactaccatccattccttgaattgaagttagccgatttctagcaattcgattcttcgtagaagcatgaaagaaacgtgtattgaggtctccttcattcatccattgtattcgacatttcaatttccagtacatctcttccttgagataggccaaaagcagttctcttctaagttgacggagttgttcagttgatacaaggaaatctgtgcttgcttcatcaatgatcataaccagttccttaatccgtttaatagagtttgtgttgtttgttttcttccaacttgaaatgtacgatctgcagtttctaatcctttttattacagagcatcgataagccggtgtattattccaagcagcttcaataatcgtttcgacctcagggatgttacacaatcttgagtcaaagtggaacatgcgtgtacctttttctgatgttttccggattttgatgattgtaggccgatgatctggttcaatcacttccaagtattcaactttagaagcagggaagttagctttccattgatctttagccattgctctatcaagccagcattcaatagtgtgagttttcctttttccaacccaagtcatattatttcctgtgaatggaagatcagagactttgaaggtgctaaccatgttctgaaaatcaacaaaactccaattttgtcttatacgacctccacgtttttcattggcattgagtatttcgttgaagtcaccacacattagccaaggaccttgtctagtgatcgcaattctttcaagtctttcccataagatatttcttaactttctgataggatggccatagacacaagagaaataaaaagacgcatctttattacttatcttacaatcaatgagtcttgcatcaaacgaaaagaaatttacagaaacagatttcttccacatcaatgtcaaaccacccccaatgcctaaaggcgacacacacttcacataatcatattccaactgagctgctacatcccgaactacatcatccgggttctttgtctcgagcaaaaagagtaagtcaagggaatacgttgccttaatccctttgaggcgtcgaactaccagagacccttttaagccttggcagttccatatgttgtattcatggcggctccggtagcttttggcccatcgtgccctctcggtaagtgtgtggggtggtcgaagtggttctcccatggttgctagttgatataaccctatttttactggttttagctatgatgtaggtataggttttagagtccttttgttatttctatagtcttttctagtctttttcaggtctttacatttttcggattcatttggagataatggagcattctggaggaaaacagagaatttatgctgctgatgaaatctggagacaaaaatgcacgtaggtgtcgagcgacaccaatacgtgacggcaatttcaagactcaacttattgatgttttgaagatttccaaattcggcctagaactttctcctatgtttaatgaaggcccatcacgtgttttagacatataattatgtttttaaggtcattgtttagacctaagcttggagaggctattctctatctcttttgtactttgggagcaaaccttgtggaaactccctttggatctttcttaatctatcctcttcatgttttattcactgatttctattctaattatgttgtttacttcattcatcatgcttgagtaatcttcttgttaggtttagagtttctcattagggatttagatgatttagtagatcacccccttgctaggttatctgttaggattcttcatctttaattgttcttaatgctagatctagattgatcacctagaacttgaatccagataatagatatgcccgtcataggtatctgtagttggctctattacttgatgagcctggtttataggtgtgtaataagaattggcctatctactaaggtgaacaatcgaactcgtttagaatgcatgtttagattaataatctttcggcttctccggtcattcttagctatagacatagggagtttcgcggaacgccacctgttattccataattagagtttgagtttaagaacggttcgttaacaacctagctatcactagatctactaatcatctatctcctgagaataccctaaacctaactcttttcccatctcatttacatcttgatatttattgcttttctttgtttcttatataatctactggtctagcttgtttgaaaacatcataggtctattttgcgaacatcgagagttcagtggaattcgacccttaagtgctaacgacgatctcttatctgagggagtaagcttaaggcaatttgagctatatcaaatttggcgccgttgccgaagttctctttgtttcaccattagactaggtgtcggtttaagtctagactcttcttttctttcaatactaattcagtttttctcttctttttctttttcttgtgtttcaggagctttaggaattcaattgcaacacaaagatgttgatagtaatacctgatgctgcaagagtgttaagggacagagctggtcaggcatacaatgagtatggtcagaaaatcgatgagcaaggaaacctgctacctaattttgtcgagggtgtcgatcgataccaccagggtgtcgctcgataccaaggcggatatagagctgcagctgttgtagatggatgtgccattcaacttgatgactacaacaggcctgatatgttctctgctagtcatttcagctattatactcaccaagcccacctttcacccacttctacgattgggatggaatgcatgctagaaaagattctcaagagccaagtgatgacgaatcaaaggattgatggtctttataatgatgtacaagacttgaatgctcggttcaacacagaggatgttaatgtagttcagtcaaggagtggaattcagcaccagacctcagtgacaccactcacgactgcttgccacactgatttgcagaaccactcgacaccaagtctcagtgtcgatcgacacgaccttgatgtcgatcgacactcttctgaaacagacaatgcttcaacgtttgaaggagcgaaatcgagcgggctcgatagcaaagtgtcaacaacagatgataatgtcgatgaacaatggactgatgttgagttagctgaggttcatggtacaagcaagaaccacaagacgcagctgacgaatcagttaatgagaatcgaactccagcgatggtgtcgatcgacaccaccacttgtgtcgatcgacaccaccacttgtgtcgatcgacacccgacacaggttgagccagagttccttattagagctggttttcgtgttgagttcactactgatactccagtcactacggtcacgtcacccactgcacctctactccttgatccacctcctaaacggctaaggtactcatctcctcctcctaaacctcctgatttcatcaataagagtttaaaatttccaaaaactgttttacggttaagcaagccacgagtttctcgtcgagcgcttattctttcttttgatgattgttcaggaaaccggagtagaccacccatacctctgtcctgctctgctgacattcctcacttccttggtagaccgcacacaccgactgtttatacgccaccttggatgatgcgaggttctactaggaagtatttacttcctccatctgatccacctgatccccaaactctaccaaagtaaagctaatgactctaaacaagcgcttagtgggaggcaacacactggtttgctttttcttttccctttctttctttcttttcttttatttttgactaggtgagtacccacactacgcgtgggttgttattttgaaaattgtttaaaaagaattatgtttaactattttgactgctaatttattttattttcgtatatgttattatgtagttaataaagttattcattttatgtaattatatttgtatagttagattcacttttgattcaaatatcaattatttttttcatgtataaatcttcttatctatatacccaaaattctaatcttttttaactatcaggaattacttacatcaataatatatgatacaatgatatgcaattatgttacttatttggtttgaaagttgcctaacttgattctaagcaaacaatttattgtttcatgtattctctcctaatctaatattccaatcacatcatgataaactcatggctaagtattagattgacataatttcaataacaaatgtataactaactactcatttgctttaaaaaatttcacatgaaaaaaaaaaaaaagcaaaaattaaacagtcttttaaatcaacacttttaggtttctctctttacatttgcatatggctatattggagagagtgtcgtatattgaattttttggtatatctaacgtctcaaaagaccattacttaaaaaacatgcatgttattattaatgttaccaatttatcataaagcacaaaaagaccatgatcatatcatgtagaccaaaaaatgtaataataagaaaagattaagttaaaattactaaattaaaaaaggttaagtagcaaataggtaagttgcaatacacaaaattttctagccgttatcaaatactgactattaaaaaaaagagaatattacactgtgagacacttttacaaaaatatttgtcgttttaggcacttccaaaagagaaggcactttgacttgttaaattgtccaatttgccctcaatcttattttctctttctctttagcaatatttcttttattcttcaccatctcttttacgaaaacttctcttgttcctctctctatttttccagaatcaaaatcaaatattataggacaacttcaatattcaaaattcaaatttaaatcttataaggtttatcatcatcttccctatctctcaacaatctaacagtgtcaataaactacactatctttgattaccaaaccctactacgcctcctccgtaacttccagcgtcacctcctccttagccacctccctcacggccaccaccaccgtatctttttccaccacaacctccaccagatctgtaacctctgctatgtctctcgtaaccaccacctcctccgtatacattaccgcctcccttgcgatatctgccaccacctccgtcacatgcttctccaccgccttgagcaaatgggtggctctggtaatttgatttttgttttttaatttcaatctcaagtcaaagaataaattatcttaattggagagtaagagcccttgatttcttttagattgtgatttattttgcaaattaaatctaagttttgacataaatttgagatccagttctctaagaaacttcttcttcttcaacaatggcggtttgatttgatttttgctctctctcatgggtaaaactcgtttcacctacgtagcatcgagatttcggttaatcaaatctcatgttattatggacatagatcagtaaaaaggtttccgaatggaaatatttaaatggacacgttattctgaataccaaaaaattgtttgttgatttttttttcagtttgcagagacctccaccttcaagaccttacggacatgaaactttggtctctttacaaaccacggttaatcaaatctcctgttattatggacatggtatatagaatggatatggatcagtagaaatatttccgaatggatatatttaaatggactcgttattatggaaaccaaaaacttgtttgttaatttttctttaagtttgcagagacctccacctccaagaccttgtggacagtgaactttggtttctttacaaaccacgattaatcgaatctcttgttattattgacatggtatatagaatggatatggatcagtagaaaggtttccgaatggatatatttaaatggactcgttattatggataccaaaaagttatttgttgtttttcttacaggttgcagagagctccacctccaagaccttatggatatagaacttttaccaaatttctgagataatcgagatcgaattttttaagaagcttctcccatttgtttgtagaattggtaccaccgatatctggtgagccgccgccacaatcgataagaggaatcgtggaagggggagagagagagagaaagagagagagagaaagagagaaagagagaaagagagaaagagagagagaaagaaagagagagaaagagagagagagaaagagatttcctttatttctaattacgtttagttgaattgagggtaaaaaagtccaaaaaaaaagaattagtgtaaaaaagtgtctattccctagaaagtgcttcaaacagaataatattttctaaaagtgcctaatcctgtcacattccctaaaaaaaatagcaaaataagaaaagtaaactgaaagtagtgtttgatacattaacataattttttatatttgttttcttttaagtgaagatatttagttaaaagtggaattaatgaatgattcaaaacttttaatttttatcactaagttttgttactttttaatgatattaatttaggatgacatgtggtactcacttgtgtgatgatttatcactcatatggagagagctggccaactttcatatatatgatttatttttcccaccttttcggatttgaatgccactggggacagtgtcgtttaagtctgagggaggttcttactaacattgcctttatttttgagttttattattttcgttttttagtttatttagtcaggtttctaacagaaaaaaaaaaatattttctttagtttagttaggaatcatgatctatatttctcttgatgattccttgattgatgaatgttgcatgtttgactcaatccgactattggaaaatctagatggtaaaccaacagaattcaggatatcctggtttccaacacaatccactaaggatggagctaatctcactgttcttccttttacctcttcaaacggttagtattcatagatcttgactccttgttcatacctgatattgagaccaatgtgataaaaagaatgtgttcctctccccttataaaaataaaaagaaaatgagagattgacaggattttcagatagtgtataggggtaggaatatttcctatgaccccagtattatacattatttagaatgatcaattacaaaggttggaaaaatgccgagggtgtcgatccagtatgcgagttcccctttgtttactctctaaaaagaataagtatgggggagagaaagaacaccaaagaaaaacaaatataaagaatggtcgatttatcaaggtatagtacgggaaagagtctagaaggatcttgaatgttagcttgtttgatgagacccagcgatgaaagcctggtagatatagttgtggaacttaggtatggaatccagaatattgtgtaagcttgcagagaagtacatgttggttaggatttgattagaattgctagacatatggatttggttagaatgatcatggcaatagactagagaatgttgggagttcctttgttttcaaacctcttccacgggttcggcttttgtgttttgcttgagggcaagcaaaagctaagtctaggggagttgatataaccctatttttatcggctttagctatgatttaggtataggtcttagagtccttttgttatttctagagtcttttctagtctttttcaggtctttacatgtttgggattcatttggagataatgaagcattctagagaaaaatagagaatttatgcagttgaagaaatctggagacgaaaatgcacataggtgtcgaacgacaccacccttggtgtcgagcgacaccaatacctgacggcattttcaagacgcaacttattgatgttttgaagatttctaaattcggcccagaactttctcctatgtttaatgaaggcccatcacgtgttttagacatataattaggtttttaagatcattgtttagacctaagcttggagaggctattctctatctcttttgtactttgggagcaaaaccatgtggaaacttcctttggatctttcttactctattctcttcttgttttattcattgatttctattctaatcatgttgtttacttcattcatcatgcttgagtaatcttcttgttaggtttagggtttctcattagggatttagatgatttagtagatcgcccccttgctatgttatctgttaggattcttcatctttaattgttcttaatgctagatctagattgatcatctagaacttgaatccagacaatagatatgcccgccataggtatctgtatttggctctattacttgatgagcctggtttataggtgtgtaataagaattggcctatctactaaggtgaacaatcgaactcgtttagaatgcatgtttaggttaataatctctcggcttctccggtcattcttagctatacacatagagagtttcgcggaacgccaccttttattccataattagagtttgagtttaagaacggttcgttaacaacctagctatcactagatctactaatcatctatctcctgagaataccctaaacctgactcttttcccatctgatttacattttgatatttattgcttttctttgtttcttatataatctattggtctagcttgtttgaaaacatcataagtctattgtgtgaacatcgagagctcagtggaatttgacccttaagtgctaacgacgatctcttatttgagggagtaagcttaaggcaatttgagctatatcattagtttgtaaaccggcgatgttgtgtggagcaaaaaaccaattccggacttctagaacttatgattcccttctctgtcttttagccacgcagtgttgagtatcttctgtggcataggcctggcgcatgttgcaacacaccaagggacttccatagttagacgttgaagaagaggcttcagttttcctctttttggcgcattttggtgttcatcttcagtgctctcttccggatgttgctgattcattggaccatgaacttggtcagggttgtctccaggaacatcgggatggtcttcatttgcgtcattatcatcatcatcatcatcatcgtccgcatgaggaccttggttcccggaagttggacattcggaggcatcatgactcagcattccacaagtggtacaaaaattcttgagtttctcgtattgaaacttcagaacactgacttttctccgaatcggaaaattctctgaaagcgtagtggatcatcaatattacacagaattttgaccatgacatagtccgtgaggaccacaccatcgcgacccaaatttgtctcaaggaacagacccattctttcaccaattgaagtaataatccttgcagtgaggaagcggaggggtattcctctgatttggatccagaatgggattctcttgaattctgcatccgagtgcaatttcgtccatctttggatgacgcacatccaatcattaaacgaccatggccctcgacggagtattgagaacatggattcttcagattggaaaaggaattcgattttgtgaatctccaggattctgcctaccacctcttcatctacgctccaaaggcgaggcaaagcactcagcattgctcggagattctacttcttagggcaccggttttgtaatgaggctaaattgggtttcctgagcgcctcatcacatagttcaataaggagattgatagcttcctcttgtactcctagcgcaatttcttgcatctgtctttggagattatccgccattatcaatatgaacaaaggaaattgtgaacattcactcttatcaaccaatcgagaacagagacaatcgcaaggtataaataggttgggttgcgagtccgttattggatcttcaaccgttttaccgttattcacccctgaagaaaccactggtaaccggcaagaacactttcggagaccgagagacagcagttaaaggcgaagagatacaaccgttcgtatcatcgcttttctctcatttcgtttttacacattttaaattctcgatattaaaacttttatgaagtttcaaatattataatatttaaactttataaaaatgattcgatgatatttaatatcatatgacgaggttagatggtgggacgggttgggatccatattaatatgagacagtatattaccggtgaaatcataaaactaacaatctgtataaaattggcaataaaaataaaattctacaatcttaaacactaaacaaaacaaacaatattaacaaaacaaatacaaattaaagttttaatttttaattagaaaatatcgtcatgcagaacctttaaatttcaacctaatttcaacccactctaatgtaaaaccttttcttctatacataaaatattatataaaaaaccctgtttcttcctctaattccactcttctctctcgacagatgtaatgatttacgtaattcttcggtctagaatttaaatttgtttgatttttgctctcttaaacctaagactcgttgaggattcatgaatgttgaagtaaaaggagacgactttacttgaaattggaaatctttgcagattgttgtggtgagtaggaatctaaaggctacccactttgttttctcgacgcatcaaaattgaatgtattttttggattcaattattgatttcggtaatatttaccaattgatttggattttgcattagagcttgaaaatccagaaatccaagagaagttatacaagtagattaaaagcgtattgaaagaataagagaggaaaaagattccaatttcagtttcaagaacacatgaaacccagaagctacttatgatcttctaatccaaattgagaactcatcgcttaatccgccattgtcggcttgatagtttgtgttgattcttttcttgtttttgtaatttgattcccgattgattttagatgagaaattgagcaaactaatagataatgcaataaaacaagttttatgatagagatattgatttgggatagttagattattgtatttgcagcgatgcaattgaattc

SEQ ID NO: 1337 - DNA, 80450 bp, Arabidopsis thaliana
aagcttctcccatttgtttgtagaattggtaccaccgatatctggtgagccgccgccacaatcgataagaggaatcgtggaagggggagagagagagagaaagagagagagagaaagagagaaagagagaaagagagaaagagagagagaaagaaagagagagaaagagagagagagaaagagatttcctttatttctaattacgtttagttgaattgagggtaaaaaagtccaaaaaaaaagaattagtgtaaaaaagtgtctattccctagaaagtgcttcaaacagaataatattttctaaaagtgcctaatcctgtcacattccctaaaaaaaatagcaaaataagaaaagtaaactgaaagtagtgtttgatacattaacataattttttatatttgttttcttttaagtgaagatatttagttaaaagtggaattaatgaatgattcaaaacttttaatttttatcactaagttttgttactttttaatgatattaatttaggatgacatgtggtactcacttgtgtgatgatttatcactcatatggagagagctggccaactttcatatatatgatttatttttcccaccttttcggatttgaatgccactggggacagtgtcgtttaagtctgagggaggttcttactaacattgcctttatttttgagttttattattttcgttttttagtttatttagtcaggtttctaacagaaaaaaaaaaatattttctttagtttagttaggaatcatgatctatatttctcttgatgattccttgattgatgaatgttgcatgtttgactcaatccgactattggaaaatctagatggtaaaccaacagaattcaggatatcctggtttccaacacaatccactaaggatggagctaatctcactgttcttccttttacctcttcaaacggttagtattcatagatcttgactccttgttcatacctgatattgagaccaatgtgataaaaagaatgtgttcctctccccttataaaaataaaaagaaaatgagagattgacaggattttcagatagtgtataggggtaggaatatttcctatgaccccagtattatacattatttagaatgatcaattacaaaggttggaaaaatgccgagggtgtcgatccagtatgcgagttcccctttgtttactctctaaaaagaataagtatgggggagagaaagaacaccaaagaaaaacaaatataaagaatggtcgatttatcaaggtatagtacgggaaagagtctagaaggatcttgaatgttagcttgtttgatgagacccagcgatgaaagcctggtagatatagttgtggaacttaggtatggaatccagaatattgtgtaagcttgcagagaagtacatgttggttaggatttgattagaattgctagacatatggatttggttagaatgatcatggcaatagactagagaatgttgggagttcctttgttttcaaacctcttccacgggttcggcttttgtgttttgcttgagggcaagcaaaagctaagtctaggggagttgatataaccctatttttatcggctttagctatgatttaggtataggtcttagagtccttttgttatttctagagtcttttctagtctttttcaggtctttacatgtttgggattcatttggagataatgaagcattctagagaaaaatagagaatttatgcagttgaagaaatctggagacgaaaatgcacataggtgtcgaacgacaccacccttggtgtcgagcgacaccaatacctgacggcattttcaagacgcaacttattgatgttttgaagatttctaaattcggcccagaactttctcctatgtttaatgaaggcccatcacgtgttttagacatataattaggtttttaagatcattgtttagacctaagcttggagaggctattctctatctcttttgtactttgggagcaaaaccatgtggaaacttcctttggatctttcttactctattctcttcttgttttattcattgatttctattctaatcatgttgtttacttcattcatcatgcttgagtaatcttcttgttaggtttagggtttctcattagggatttagatgatttagtagatcgcccccttgctatgttatctgttaggattcttcatctttaattgttcttaatgctagatctagattgatcatctagaacttgaatccagacaatagatatgcccgccataggtatctgtatttggctctattacttgatgagcctggtttataggtgtgtaataagaattggcctatctactaaggtgaacaatcgaactcgtttagaatgcatgtttaggttaataatctctcggcttctccggtcattcttagctatacacatagagagtttcgcggaacgccaccttttattccataattagagtttgagtttaagaacggttcgttaacaacctagctatcactagatctactaatcatctatctcctgagaataccctaaacctgactcttttcccatctgatttacattttgatatttattgcttttctttgtttcttatataatctattggtctagcttgtttgaaaacatcataagtctattgtgtgaacatcgagagctcagtggaatttgacccttaagtgctaacgacgatctcttatttgagggagtaagcttaaggcaatttgagctatatcattagtttgtaaaccggcgatgttgtgtggagcaaaaaaccaattccggacttctagaacttatgattcccttctctgtcttttagccacgcagtgttgagtatcttctgtggcataggcctggcgcatgttgcaacacaccaagggacttccatagttagacgttgaagaagaggcttcagttttcctctttttggcgcattttggtgttcatcttcagtgctctcttccggatgttgctgattcattggaccatgaacttggtcagggttgtctccaggaacatcgggatggtcttcatttgcgtcattatcatcatcatcatcatcatcgtccgcatgaggaccttggttcccggaagttggacattcggaggcatcatgactcagcattccacaagtggtacaaaaattcttgagtttctcgtattgaaacttcagaacactgacttttctccgaatcggaaaattctctgaaagcgtagtggatcatcaatattacacagaattttgaccatgacatagtccgtgaggaccacaccatcgcgacccaaatttgtctcaaggaacagacccattctttcaccaattgaagtaataatccttgcagtgaggaagcggaggggtattcctctgatttggatccagaatgggattctcttgaattctgcatccgagtgcaatttcgtccatctttggatgacgcacatccaatcattaaacgaccatggccctcgacggagtattgagaacatggattcttcagattggaaaaggaattcgattttgtgaatctccaggattctgcctaccacctcttcatctacgctccaaaggcgaggcaaagcactcagcattgctcggagattctacttcttagggcaccggttttgtaatgaggctaaattgggtttcctgagcgcctcatcacatagttcaataaggagattgatagcttcctcttgtactcctagcgcaatttcttgcatctgtctttggagattatccgccattatcaatatgaacaaaggaaattgtgaacattcactcttatcaaccaatcgagaacagagacaatcgcaaggtataaataggttgggttgcgagtccgttattggatcttcaaccgttttaccgttattcacccctgaagaaaccactggtaaccggcaagaacactttcggagaccgagagacagcagttaaaggcgaagagatacaaccgttcgtatcatcgcttttctctcatttcgtttttacacattttaaattctcgatattaaaacttttatgaagtttcaaatattataatatttaaactttataaaaatgattcgatgatatttaatatcatatgacgaggttagatggtgggacgggttgggatccatattaatatgagacagtatattaccggtgaaatcataaaactaacaatctgtataaaattggcaataaaaataaaattctacaatcttaaacactaaacaaaacaaacaatattaacaaaacaaatacaaattaaagttttaatttttaattagaaaatatcgtcatgcagaacctttaaatttcaacctaatttcaacccactctaatgtaaaaccttttcttctatacataaaatattatataaaaaaccctgtttcttcctctaattccactcttctctctcgacagatgtaatgatttacgtaattcttcggtctagaatttaaatttgtttgatttttgctctcttaaacctaagactcgttgaggattcatgaatgttgaagtaaaaggagacgactttacttgaaattggaaatctttgcagattgttgtggtgagtaggaatctaaaggctacccactttgttttctcgacgcatcaaaattgaatgtattttttggattcaattattgatttcggtaatatttaccaattgatttggattttgcattagagcttgaaaatccagaaatccaagagaagttatacaagtagattaaaagcgtattgaaagaataagagaggaaaaagattccaatttcagtttcaagaacacatgaaacccagaagctacttatgatcttctaatccaaattgagaactcatcgcttaatccgccattgtcggcttgatagtttgtgttgattcttttcttgtttttgtaatttgattcccgattgattttagatgagaaattgagcaaactaatagataatgcaataaaacaagttttatgatagagatattgatttgggatagttagattattgtatttgcagcgatgcaattgaattcaataacaacacagtaattaatggcgttttcaaaaacaaagatatgattaaggcagtggaggttgttaacggttcttcaattttctttcagaaaaatggaatttgaaaacaaaggataaagaagagacgaaaaaggggatgcaattctaacaaaaaaaaaggggacacaattttttttcttttctttttaacgtctgttattaattttttgttttaataatactcttttaaatcaaaagaaagtttgatacaagtggtttggtatcgctttgattggtttctatcgaattgaatttataaaccgatttaacccaaatttatggggaaatagatgaaaactatagattcgggaagacatatgttgaaaactattattttatggacattaggaccaaagttaaagtttgggctctatctattatgatgtgatagttttcggggggaaatagaccgtttttcggaaaatgggtaatactagtacaacatgaaatactatgtcttgtctacgtgaaagtatttatttgtaagtgatagagataaaaaattatttgtttgagtatttgtattgtgattttttattttttttcatcaactgcattttatcacacttttaagttaataaattaattttgacttgtacactattaatattggacaatttttactgttataatactacatagattcatgaataatcactatgaatgcctttcaacactaccctttttcaatagggaatgtgacacgtttaggcacttttagataattttattcctttagaggcatttatgagggagaggacactttttccattatttgacttctattaagacatttttacccctaatttaaccaacaacttttattttaaatttaatacaaattaaatactttatctctcttccacgatccttacgcaaaataaaagaaatctctctctctctctctctctctctctctctctgctctctctctctctctctctctctctctctctctctctctctctctctttctctctccacgtctctataacttctaggtttgattcctcttatcgattatggcggcggctcaccaaaaataggtggtaccgattctgcaaataaatgggagaagtttcttaaacaattcgatctcgattatctcaggaatttggtaaaatttctatgtccataagggaggtgaaggtctctgcaaactgtataaaaaaatttacaaacaattttttggtgtccataataacgagtccatttaaatatatccattcggaaacctttttactgattcatatccaatctatataccatgtccataataacaagagattcgattaaccgtggtttgtatagaaaccaaagttccatgtccataaggtcttgaaggtggaggtcttgtaaactgaaagaaaaatcaacaaacaattttttggtatccatattaaccagtccatttaaatatatccattcagaaacctttctactgatccgtatccattctatataccatgtcaataataacaggagattcgattaaccgtgttttgtaaagaaaccaaagttccatgtccataaggttttgaaggtggaggtctctgcaaactgaaagaaaaatcaacaaacaattttttggtgtccataataacgaatccatttaaatatatccattcggaaacctttttactgatctatatctattctatatagcatgtccatgataacaggatattcgattaactaaaatctcgatgttacgtagatgaaacgagtttgacatatgagagaaagcaaaaatcaaatgaagccgccgttgttgaagaagaagaagtttcttctcatattttacggagagagagagagagagagagagagagagagagagagagagagagagagagagagagagagagagagagagagagagagagagagaacgtgggttaagagaatattttagttaagaaggtattttagtaaaaaaaaacatagaaaaagtatctagtcttttgaaagtgcctaaacacggaaatagtttttaaaaagtgtctaagagtgtaatattctcttttcaataatgtcctttcttatttgcgatcttcatttatgccatctcttaatttttaacgatcattttacctctatttataaaatgttttaggttaacaaaatgaaatattgactttttccccctatattcagaaaataaatttcccaccaaaaacaatttcgcgccaaaactttttttccaaaaacattgttcccgcaaaaaacaattttggcaagaaatagatttttaaaatgtttaaaagggttttaaaagattcaaaagagattttaaaagacttttaaaggttttaataagatttacaaggaattttaaaagagttttaaagaatttacaaagagatttaaaattcttaaaaactcttataaatattcttaaaaccttttatagaggttacaagagttttaaaatggttcaaaaatcattaatgggtttacaagggttttaaaagatttttaaatagtttacaaggattttaaaggatttataaaagatttacaagggtttttaaaatccttgtaaatcctttaaaaactcttgtaaattttttaaaatcattgtaaaaggttttaaaataatttataaaagttttaaaacgagtttttaaagtatttacatataattaaagactttataaagattttaagagattttaaaatgatttacaagggtttttaacaactttacaaaggttttaaaaaactttacaaggtttttaaaagagttttagaaaaatttacaaggatttctaaatgcatgtgttttagctgggaaaacttttgggaggaaaaaaaactggccgaaagttttttttttgatcgggaaaaaaacattttggcggaaaatttcagtttctaattacatgttctcattagatgagtgtaatttggtcattttgcttaaacgaagaggtatttataaaaatggataacaaaattaggtattattgcaaaagggtagtaaaaaaaggataattttgcaaatcttcctagattcatggttgataactctatagaatgatattaaaaaattaaaaaattttgaattctaaactcacagatgcagtttttacagtaaattattattttatcaaatttttaagtgctagtaatagcttttatacatgtagaattgggctactgattgaaaatccactaaaaagcacaaatagaatttttggttacaaattaaaaagacctctctctcttaacccactcttattttccagagagagaaggagatttccggttaaccagaaataaattccggcgacagcttgttttttgttttatacatagtttccgacgtttgacggatctctctttccaattagtcggattttaataattttttgcttagcttggttcgttttccggctaagatcggattatgttttttgtttttctctcctctttctacatgatttcagtgtaaatcccgcttgctgtcaattggtttatttcatgttcatctgttggcttgaatcttctccaaagttagagaaatatcttcgccgtaatatcttcatcgttatgcgaagtggacctttctttaggtcttgggcggagattcttcctttgaagttggggttgagatgaagatctacactatctcctattattcaaggtggaaacaacagatccaatttgatatgcggcggtaatatctttaggaggatgtctccaagagcgtgaattgaagctttcacctggtggttacgaccgtcgtcggacgtgacagcaaattgaagatttggcggtgagcaaccaaaggtgttccggcggttttctcgcttgtgccacatgaatccattaggttttagcatcaaacacgtgtctcttacgtatcttctttgtgtaattgagtttattttaaaattaggcttcaaaagactttgtatcacgtatcttgtaatctgtcctttatgagtttcgtttttttttaaacgatttatttcattagttgaatcaagtgtgattacaatgtaaagcagataaaatgaaatatggaacaaaataatgatattggaatgagttgtcatttgttattctgtgttataaaacgaaaattgccgacaaaaaaaaagaattttcggttacgaaaatataaaatcttatagatatagaaaatgtaaaaggtcttttgtaagaataatacttttctactaaaatattaagaatatagcatattatatatatcaattatgtaaataacatcaaaggtatgaaaaatgactaatggtggtggtggttattccggtgatggtagtttcagcacgattccggtgaagattccaacggcacaagttcaggcgatattccgaccatagattttcatcgatgatattccaacgatatagatatcagcgatggtggttgcgaagattacggtggtgattccagtgatagtggtggtgactttgtgatggtgatggtgatgacgtggggatgatggtggtgccgttgtggttgtgatggtgatggtggtacagtggtgatatgatatccatgataaatagtaacagtgtggtggttttagtagtgagaacgtggtggttacgatggtggcggtgatgacgttgtgatggtagtggtgactgtggtggtgatgacatagagatgatcacgttgtaataccggcgtcggtgatagaggtgactataacgtcggcgagttaattggtttggcttaggatcaattatttccaaaataccgaaaatacacattatatcattaaaccatttttttggttagttacataatataatatttttatatgttatttatgcaaatttcccaaatgtaaatcacttgggcacgtgtcaagagaaagcgcgtaatcatcacgtaatcaagcgaaagggttttgcttacaaaatcctgagccgtctttcaaagcccaataactggcccaaacattctcagtaatatttcgacctaaatccttatttagacgcatctttattcgataaaagataataacaaaacttatctctttgccttgtctgctttttcatccaaaggtccaattagcttcttaagcccaaatctctctctctttctctctttctcttcctctctcaatctactcgccggagatcggctcgattcctccgtcaccaccgcatccgaccggagatttccttccgttttctttacttcacaacgcagagcttcaatttctccctcgcaggtattcttcgcgaaaccctaaactctcactaatttcccctggatctaattggggatttttgagttttgcctcgattgtttgttaaattgttagcttttgtttgttaagtttaaatgttttggtttcactcatggaggcaaatcaattttgaaaaaaacttgaaattgttgtttgtgtttgtgtttgtgtgatataaagaaaaaagcccgatctttttttttgtttgattaaattctgtgttttgtttgaatcagtttcgttgtgttgaaaactttgtaatctgggctctagttttctcaagagacatggaataatcacaatgtcaacgaatcagttggctaagcgatttcggttaggttagtttccggttaacaaaaactaatccgacccgattaagtcactcctaggccttacccgacccggctcatcgattagtcacacgaagcttgactttaccatttctttcgagtttctctgttgagtatcgagaatcgagaaaagaactttgctcaatctttgtttctcgtttggtaatcttcgtttctaagaattggaatggtctttttcataggattcatgatagtttttggctgcaattttgtatctttcttctgattatgtgaggaatttgattttgttgtcgttgtcgttgtttcgtcttagggatttgcgagaatcattgaacaatttttcaactttgacaattaatagcacgaaatgagcttcagatttatgtgtttgagtattcaaagatatagcttttatatttgcctttgtgggtttcatggagctgaatctgtatacttatagctcattagtaaagtctgttgttgttttcccatcatttgcttctggtttgacattgtgttgagtagtaagattagagctttcttgctttacatgaagcatttcatttgtggaaagtgcttcaatccatttgggtttctctctgatttggaagatatgtctggtgaaaactttatctgggtattgcttcttttcagtgattgatcaaagatgggaagtcagaagaatgtgaaacacctcgaggaatgcactgtttccaagttagtgtctttgtttgctaatcattagagagagtaaggaacatatattcagtctttgtttcttaactgtgatattgaaatttgtgacttaggaatcatacaaagttttatcagcgagtcattagttattagccactgttacttgttttcacttgttacagttctcaccattatacttaatcactattcactacattgcttttgaattggaaaaagaagtaaccttagcatctaacgggtgtattggtgtctagtatcttatggtgtataacagtgtggttgttgttctaagttgaagcattctaaagtgtagaaaatttcaaattcttctggtgtataaagtgagcgtttcttaactgtgatctaggaatcatatttttgtcattgagtcatcagttacatagcccactcttagtcgttttcacttggtcatgccaccatgcttaaccactacattgctttgatttgctaaaagatgtaaccttagcatccaacattggtatctagtatcttctaatgtaaaaacacagtgtgattatcgttctcgaagttggaacatcctaaagtctaaatatatctatcttttttgggtgcagtgcattgggaacttgggtattctcagtcctaggcgcattggttgcaatcccggtaggcatcaaacgcaagtctctaggtccacttgtgttcttcggcacaaccggaacaatgctcgacattatcattggtgtgagtcaatgcgagagagaacacgcagaacaccaaacgaagttactccaagactctcaaaatgccacaacaacaacaacaaccaccaacacagagactgaggatagctcttccatgtcctaatcttttttacatctttctcattgatgtactttgatgctactcacaagttaaacttttttcaagatattgtgattattccacttctcttgagaaaacaaagaaaaaagcttttgatgattaaaaactgattcgttgacattgtcattagttaattagatgctaaaatgttaaccaactagattataatctgcggtacaccgattgttgtagtacatcaagggctattacgtaattacctacaaaataattgtagccgttgttacatattgtaaattgctactgtctctaattaacaaaatgccaactgaataaacaaaaaatacaaataaatgttaccataaaaccaacaccaagggggaacaaaataaaaacttaaaactaattaaccgtgaaaatttaccaggagttggcttaacttgttgagagctacttcctagcatcaatgcacagacgaatgattcaacatcggtcttaaatttttccaagtcattttccccgttgtaaaactccttaaaataagaaaataacaagaaatattaatttagatcaacttactgttatagaatttaacgaaattgctttagctatatatactaaccgatgcctgcgaatttgttgtcccaggtaaattcattcacggcttggctccaatcttttttgcttataacataatttaagtaattttttcccccttttgctttgtataaccaagtcgcagcccacaaaagttcatcctatttttacccccaaaatatttgaaaacataaagtatcttgttaagtaactcatttacgtaaacatgaaaatatatctatgtgtatcagtttcattatctggtagcctgagtgtgagcagtagaaggggcaagatgcttggtaagaacctctgtacttatcagcaaattcaaatagctgccacaaatatctacacgttaccttatgattaaattgatgtaatgaaattttatggacttaacatgaatatatactcacgaatttagaatggtttagtaacgtggatgaataagtagaatccaccggtttgaaaacaagtgaggccgcggcaagagcggttgcggcttcagcagagacttcggaaccaggggaagaagaagatatattgtagagagttctaggtgtgtccatatcttttcgcctttcccaaccactatgatctgaatttccatctcccaacttttttataaaaaaaaacagtgaatttgttgaatattatagagatagtacataaaatacgagatatatactatttgggatatttaacataaaatgaaatattttggaatatttctctatacaaaagttggtttacctgtgtatatagcatgttgggcgaagtatgagcgcggaagataaaattgcttccccatttgatagtagaccggaggtgatgcggacatccaaatcaaaccaaaccgggagcataccaaaccagacggtacatttatcaaactgactaatgaggagcattttggaggactcttgcccaattggagtctcaatcaagcacaaggcctagggttaattattcaccagcaaattaatcctaagaagacaaatgaaggttcaagtggagtcaaagaccaaggagccgagtcaccttattatgggaatatgagtgttgcacttttttcccttatttagggtttgtcccaatgggtttacatagaaaggtttttaacgaggcaacatcaagtcatcaaagaatcatttacctagcaaatgattcaaagatatcaaaagtacatatagttgatgtacttgctgacagaccgactgaactacccgctgcactaccttctgaaataccacacgaaatgaagccaaacaatgaaatcttccttattctacacttggacgcacctcaaagctacatatgaaaaccaggagaacatctacaccaaacaagacatgtactatacgaactttggtacatcttaccacacaagaacccgcagagttactacttgccatatatggagtcgaaggagatcgatttccaacaactctttccatctttgtttgtgcgcttatgtgaaaatcttgagacactccagaaccttccaatacgtcacaacttcctccccaagttgacaagatacacgacacacctcacttcccttatttggacatattctacaattaatgtccaatattttctttaatgttttgtttctttctttgaagtcttagaacattgtactcagctctatataagttgaattctcattcattgtaaaggacccttgatcattttaaagtaacaaaaacgttttctacttgtgaaagtttgagtctttgtcattgttttgtagttttttgtgagtgagtcactaagtacttcaagattctgcggattaagtttgttgagtgattcaacatccttcatttgtttattgatcgagtgagtcgattaccccactgattgagcgagtcaatcacccttctatccatcaattctccttggatcgatcccacacgagaaaagcgatcgacaacgtgtcagatcaccaccttcatcatcccaccttccgtgtggcaagtttgaaactcttgatcatcaagtgatcaaaggatggattagctccaattcttgcatcatcttggtatcagagcttcaaaagctcatatccccaaggttgtatctcttcaacctatatcttttgatttttttaattttgttatttcatttttagaaatttaaaaaccaaataaaaattttatgttttgcttttggtattgtttatttgcttcagcatctttattataaaaagaaataaaaataatttgctttagtttattatttattttggattaaaaaaacaaaaaaaaactcataaaaccattatttgttgctttaattgattttttaaacttttacttttataaaaccagaaaagaaaaataaaaaaaaatcgttttctcttttgatattttagattctcgaattttattttttgtttttgcattgattttagaaaataaaaagaaaaataaaaagtttccatattttattttctttaccataatttattgatttacttttgatacatctttctcttgtttgtgcaaggaattccccgaaaacaaaggagcaaggatgacgtcatactatgtggaagaggaagaaaccaacctggagatgtgtctcaatgataattatgaagaatggtggcatgaagagtattctgaatcatagtttgaggatgaattaggccgtgaagtaccagaaccagaaccgcatgactcatacaacaccaataatggctattctaaaccatggattaaatttaatgatgatatttgcagccatggttcgaaatctccattgactcgagatatttctttcttaggaaaagagaattatgctaagcagggagaagtcttggagtataaaggggcaacgatgaaagaatacaattgccaacgtcttccaaggcatgaagagaagctcgacaatcacaccttgttatatcgagggcctaaagcctcacgtcaagcaaaaccgagacacaagttctttcacacaaatccccgagtagtacaggaagtgcttcaagaagtgacgcagagaacatcaatgtggggtaaaccatatccccgtgatagacgtgattacctagctgagagagattcaaggatcagtaatctaaggggaggcgagctgagtaaaaattttgatccacatggaacgaaatgacactgcagttgaagcgtgactatagatactaaaaactttattttaatttatgataactgtttgtacttaaaaacatggtttgacaaagacatgtcaatggaaattaatctcgggtaaatcctttagcatggagtttgtgaacattaattgtcgaatacatccaaccaaagtggtgtagttgtatacaccctgttgaaacgttttatccgcgttttctcataaccttttatttgtttgaagcttttacttaaagttgttcattaatcttatcgttttctctatgtgcaactgtcgatgggagtgcatttatggctcaagatttgtgcattctaaacacagcagggccaaagaagcggcaggccgtggctctccgtattagcgctgatgcgacggtcgtttatcgttgcagaatcaatgcctatcaagacaccctttgttgctctgtttcgtgaagttataagattaatatgttttttaaaaattttaagtgtcataagttactgtttgattataaaaatatcgtgatgtggcatagcatattggaatatacagctctattaaaaccatatattgaataacactttggttttagtccatcgttctacacaacttagggcattacagtagaagaacatatttttataaaaaggttttaagtttcctatgtttttaaaaaaacaattataggccttttttatgtatttatatttgttaagcttttcattcactatttttctttaacctttttaaagttaataaaatgttttgttaatgaacttagtttagtaaaagtttagacttaagaaaaataaatcttaaactctaagactttgattacaaaataaaaaataaggactttctagtgtaaggtgcttaaactttgattacaaaataaaaatttttgttttgattaatcaaataaatgagttagttttgctatccattaagacaactatgtttgaaaaattcgattatgtgaatttgatgaatggttttgcaggcaaaaatctaaatagatgtatatttaaagaatgtaattttgatttttcctccatttttgcttacaaaatgcttataatttttttaaaaaaactgttttataaagttttagtagaacttttgtatattattattatttgtgattatataaaaacaataaagggcataaatgttttatttgcgtacaaaattcctacatggcgggccggtcctggttcttctagtcatctcttgactcttttttttccgtcgtctcttgactcttatcatcctccatttcttgaaattaatgagatcacgtgtgacagtttaatttgtatgattgatttatttatgatcagtctcttagttgcagacttgcagtgatatgtgtgcaatgtgtgactcaacattccatgatacaataatgtggttttaaaagagggctaacatcttttgaaagaacgtgttttttcctcgtaaaatatagtatatatactaaaaaccttaaattatcttaatatatgacaactgtttgtatctttagaaacgtggtttgtcaaagacatgtcaaaagaaattaaactcgggtaaatcctttggcatgcagttggtgaacattaattatcgaatacatccaaccaaagtggtgtagttgtatatttgtactaggttatgaacccacgcgacgcatgggtctatttgtaaaacttttaataattttttgtgtgactaaaattctttattgaaaattttgaaagatatgtttttatatgtctacttgttgttaatattataaactctttgatttttaaaattaccatgacaaatagttacaatttaaatatataactaaaaataactttaatacaacttttaggtttacaacatttatcaaaagaacattcttttggttcataactatctctttatctttagatattttggataacgatgttctttacgtataaaataaattcttgtatggaaaataactacgacgactttcttattttggtacccgcaaatagggatggcagacgggcgtgtccgcggccgtttggaccgcctgcgatgtacccgcttttcttctgatccgcgacggacctgcccgccgacgaccgcgggttacaaaactcagtcctaacccgccccgcaaagcccaacggtttgtttattctcttgtgtagtaatattcagaagtgagctatagctgctaaatggtcttgagtttgtttattctcttgtttcacatcagagaatttaggatctttgaattttggtttatgtaacatttcatagcttgataattaatatatcagtcttagttatgtttatgtctgtgtgtatattttctggagtttatccacaagacccttgtttcaatttcctttagtgatttcgttttacatttaaaaagtttgacttattcccattgcaatcaattttcatgatgcgtaattctctacatttgtatcattatttactaactcctgttttgaaccaagatcacaaaatagaaaaacgttctctgttcacaaatcacaatcaaaagattgtgagctctgttttcttactctcttctgtggaaataacaattttccaacacaaactaagtgatcttcgatccaagaagtataaaaagtaactaagcagaagcattaactaaagtacttaactgaaacattaaattaaagtcataaactgaaaacatgaatctcaaactcaagatgtctcttcatcaatatcaagctttatcgtcaacatgaattaagagaaaggtgttttgagttctgagtctttgacatgagacatatttccattcatctgttgggttaactataacaaacccaaaattctcaatctctctgcttattccttctgaattttacagcctcaacagctcgcttaggagcgatcactgattcatagtaaaatcttagtttttttccaacttcgattgaacaaactacaaaaactaaaagaacaaaggagaattcgagaagaatagaagcaacaaaggaaattttacttcaggattcgagaaaaattgaagcagaacggattgaacgaaggagatgcaaaggttttttttttgtttgtctaattttttacgggtcgcccgcaaacccgcggcccttaatgggcatgtattgtttactccgcagtccaaacggaccctacccgctaggcccgctttttattggacttcactacatataggtccgtacccgccccgctatgtcactaaacggactagacccgcggacttaaggtccgattgacatccctacccgcaaatatagtattgtttttccgtttatcttcgctgtattagttagtatagctcttctaaaaataagatattatatagaaatatattcataagtttatctacatttaacaactcatatttttctcacattcttttcaatatgtatatgaatttctgtcttcacaatattttagtgagagttatcactcttcctatctttttgcaagcactcgttttatttgtttcattttttcttacaatgtctctttccatcctcttatgatttgtccaagcaatatgtgccataccttctaaacttttcacatgctccataattgttcttcgaaaatctcttccttttcttgttattatgattatttttcaagctggtcaagatgtgctctattttgttttctgttattcaaagaaaatgttttagcttctaaattgatacttaactctattacttctctctttttatgcagtttagatcctcttccccttcacgcttcctagagtgaaagacctcaatttatatcttcgagaatttgattcaaattgatacgattaaaaacaccactatcaaaccacgtctttgttacgtttctttaagttatacttaaaaatattgcattagttgtataaaatcctataaaggtttgggtttaatattacataattatatttatatagtttccttatttataagtttaaatttaatatttgttagttcacttttttattttaaattttaaggaagtaattactatttttaaaaatgttagttaattagatgctaaatatgttaattattaatgtggcagctcctgactggtcgtttaaaatccgacgtggacggctttagaagcaaatagttttatcaccaccttcatcatcccaccttccgcgtggcaagtttggaacactgatcatcaagtgatcaaaagatggattagctccattcttgaatcaggaggtaaccaatctgtttaacggaagtaatctcattttgatattcaagtgcagcccaactcaacaaggttgtggtaaatgacattagtcaaacaaattttacgttgtcaccagcatcataatatcctctaatcaaattcacctaggaaatcaaaaacacccataaatttgttcagtctataagagataacatattgccaaaacttatgaaataaggttccatttcggaaaacatatatatacatatatagagagatgtttaaaagtatagttggtttacattagctgatgcactatgagaaaggccagaatcagctcgccatttaaccctttggttagtcgggactttaccggatatttatagataccctatgcaagtaaagttgcgtacgtaattttagggtaattttgcatgcactttaattaatatttctaattgtcagcattttcttatctaatatattttcatcaattctaattacttacaaaaaggagaaatcttaggacattgttaatattatattttattaaaagataaatattttagttattgaaagtttattaaacggttagaatatttaacggaaaaacttttagaatatttataatatgtgaaatctttataaactaaataatcatttgaaagaaaactttgatttgaattataaatctttgaataaaagtattattaaaaaaaaataaaaaacaataatgtttaattttaccgaacatgattagatggtagaacgggtttataatgttataatatatgaactttacaacaattaaataactatttgaaagaaaacttttaaattgatttgaattatatatcttttaaatcaacgtattattaaacaaaataacaaaataatgtttaatttcactgaacagagttagatggtaggacgggtttagtcgatagtaatacgagacgatatattacgggtaaagtacattaaatatatttaatttcactgaacatgattagatagtatgacagttttgggtcgataataatacgagacggtatactacgggtgaaatcctagatataacagtcaaaatacaattatattatcttaaacactaagcaaaacaaataatattaataaaacaaatataatttaaatttaaattatatagttataatttagatcttaacttaatgaactatatgttagtgtttctatatttttaatcagtaaaaatcaaacatagtaattgtatactaaatatttatagatataagagttgtccatttggaaaatatataaaaagatttaatctattaaataaattatttctttttaattttttaaaaaatattatagcttcgcgctgtacgtatgttataatattgtagatctagaaaacaaatcacttagccacgtgtaaaaataaagcgcgtgatcttaatcaagcaaagggttttgtttacaaactcctgggccgtctttaaaagcccaataaccggcccaaacattctcagtagtatttcgacctaaccccttatttagacgcatccttattcgattaaagataataacataaacttatctctttgccttgtctgcttttcatccaaaggtccaattagcctctgaagcccaaatctctctctctctttctctctttctcgctttctcaatctactcgccggagatcggctcgattcctccgtcaccaccgcatctaaccggcgattttcattccgtcttctctacttcacaacgcagagcttcaatttctccctcgcaggtatttttcacgaaaccctaaactctggatctaatttcgcctggatctaattggggattttagagttttgcctcgattgtttgttaaattgttagcttttggtctactctgcgaaaatacgtttggttcatttactttatgcaattaccatactggatctgctaattctgaaataattcaactcataggacaattttactgggttgataaagttcttaaggtcgtttaggagccaagttcaaatgttttggtttaactcatggaggcaaattaattttgaaaaaaaaacttgaaattgttgtttgtgtttgtgtgtgtgtgtgatttaaagaaaaaagcccgatcttataaacttctgtgttttgtttgaatcagtttcgttatgttgaagactttataatctgggctctagtttttgatttgcagcccatgtttgatcgactcttaggaccttttaaaacttcagatctgttttttttctctctctctttttaagttgttggatctacgcgatgttgtcaaataccgattttgcccttataccaatcttattatttaccgttggtcatggccttttggaataggcccaatgtttaatcattgttattattatagtgggctttgtttgggtaacagttattttcctttttatgttatgttgcaaagaagatggaagtgtacaatgacgatactgaaatgaggtcaccagagacacaaccaatcaaggaaacagctttggaagtgtacaatgatactgctgaaataaggtcaccagagacacaaccaatagaggaaacagctttggaagtgtacaatgacactgaaatggtttcaccagagacccaaccgatcaagcgacgcaagaagaagtcgatggtgtgggaacatttcacaatcgaggcggtagaaccgaactgcagaagagctttttgcaaaggatgtaatcagagttttgcttacagcaacggtaacaaagtggctggtactagccatcttaagcgtcacatttttaaggggacatgtcctgcacttatccatacgcatgacaatgacaacaacccactgatgtctactccttacactcccaagactgacactccgagaaggcgttaccggtctcagaacaacgctagtccctatgttgcgtttaatcaggacaagtgtcgtcaagagatagctaagatgatcattatgcatgactaccctcttcacatggttcagcatccaggttttgtctcgttcgtgcagagtattcagcctcactttgatgctgtgagctttaacaatgttcaaggagactgtgtggcgacttaccttgctgaaaagcagaatgtcatgaagtctttagaagggattcctggacgcttctgtctaacgctcgacttttggacctccaagctaactcttgggtatgtgtttataactgctcactacattgacagcgattggaagatacaaaagaagcttctcaatgttttgatggaatcgtatccagaagctgacgaagccttgagtctcgcggttgcaaattgtgtttctgaatggggtctggagggaaagttgtttaacgtcacctttaaccacccggcgagtaactctgcggttgaaaacatcagacctcaactctgcatcaagaaccctgggattctggatggtcagttggtaatagggaattgtgttgcccgaacatttggtagcctcgctaaagatgtcctggagaaagggaaagatgtgatcaagaacatccgggacagtgtgaagcatgtgaaaacgtcagagtcccatgaggagaggtttactgagctcaaggaacagcttcaagttccaagcgagaaggtgctttctcttgatgatcagacgcaatggaacacaacatatatgatgcttgtggctgcttcagaattaaaggaagtgttctcgtgcttagacactgctgatcctgactacaagaaacctccttcagcagaggattggaggcatgtggaggcactttgcacattcctgaagcctcttttcgaagcagtctccactcttcaatctactggaaacccatctgctgttaccttcttccatgaagtgtggaagacacagtcagatttgtctcgggcgatagctggagaggatccttttgtcacaggtattgctaaaaccatgcaagagaaggtagacaagtactggagagactgtagcttggttttggcaatggccgtggtgatggatcctcggttcaagatgaagcttgtcgagttcagtttctccaagatatttggagaagatgctgggaagaacatcaagactgtggatgatgggatccacgagctcttcaccgaatacatggcgctcccgtcgccccaaaacacgacatctgaaggtgggaaagcagatggactgtcggattttgacacgtacataatggagacaacggggcagaatctgaaatcagagctggaccagtaccttgatgaaaccctgcttcccagggttcaggagtttgatgttcttgactggtggaaacagaacaagctcaagtacccgaccttgtcaaagatggctagagacatcctttcaatcccggtttcagctgcagcctttgactatgtctttgacatggaaccgagggaaatggatgagtacaagacgtcactgaggcccgagacagtggaggctctgatttgcgcaagggaatggcttcttgagagtaatgcttcttcttccgcagctgcgcaaaatgcaagtgctaccatcaaatctgaagcataggtgagactttgcttcattatctctaaatgttgttgttttctagaagtttatgtatgttgtcttttgtggttagtcttaaacccaccgtgtgatttgctattaggagcttccctctttaagatatctactgcacattttaaaatgctccttcttagatgaactctatagcacatcttcaactgaactaaaagcctcgttgaatcctatctttcaattccaaaactgaaagtctttattctaacaatttttacaacgtatatgagtaattaaagctctagacaactgttttggtacatggagattttttaaaacaactcttgaaagaaatataagaacaaaaggtattgtaatgcaatgactatagtatactatcaagaaggcaacctaatgttaagcctccttaaccaaaccgagtgaagaatcatgtggatcacatcaaatggttgagccggacggttcaccacaaaatgccttctaactttcataacatttcgatacatccttaaatatttgtcatgtggaatctcttgcaaaatcttcttaatatcaggaattttgtcgaccgggatctcaaccgagaacttgctccaatcaagcacgtcgttgaacggaagcgagtagttgtccgatatgacaaccgggacgcagcctgagtagatggcttcgacctctctaggactagccacctcgtagccactaggacaaagacaaaacttgctatgaccaatcaattcatgatagttttgtccctttgtgaggtggtcataaacttgaacgtctttatccttacccttccagtgactgaacaaaacttccctaatgtatccgtgagctcttcctgcgaagaaagccaagatcgtcctgttctcagggttttgtcccataaatggtggctttagcttccttttaggaatgttaatctccggtatagagaaatcgatgtttcgtctgaaaccttccgatgtgttggcgttgcatagtcctctcatgaagttcttgaaaaactctggtttactatctggcacatcgggagcctaattatatcaagttaagtagaaaatatttagtcattgttaggtgtaaccaatccaaattggtaagaaaaaaaacccaattaaaaccgaacctaaccaaatgatatgttgaaatgatttatagaagttatgtatacgttacccaatcgtggcaagagaccatgaaatggtcagcaccattgctttggttccaaaaagggtgcttgtgagccactacgtctacataatcgttaaaaatccggtggagacgggcccggttgaaatcggctggcgaggtaatgggttggtagacgtagtgaacaatgttggcaacggagaagggtaagaagaaggcatgggcttcttctggccggctagctctaaaccggccacttggtccgcccatcacgtaactaagctcgtcaatgaactgtccctcgattccgtagatatcatttaccggtccatcgtgaaccagtggctgctctccttctttgtacgaccacaccttaaatgttttcatcatttctatgtgactcctgttttattggttcaatatattatatctgtttagagttagtatcaatatgtaaacgacaaacaatgttttaccaaagaagttcttttatcaaatatcaggaacaattcttgggtttacccctaggggatgaaccattcattcatcccctttgtagtgaccaattagaatttgacatatcatatatttaaaatataaataaattaaatcacaaaatttaaaacctaaccattattttatcaacccaaatcaaaatataattttgttaatcacaaattctagaccataaccactattttatctacccatacaaaatataatttcgtttaatcacaaaatctaaaccctaaccactattttatcaatccaaaccgaaatataatttcgtttaatcacaaaatttaaatcctaaccactattttctcgacccaaatcaaaacttaaatttgtttaatcacaaaatctaaactctaaccactattttatcgacccaaaccgaaatattatttcttttaatcacaaaatctaaactctaaccacaattttatcgacccaaatcaaaatataaattcttttaatcacgtaatcgtaaccctaaccactattttatcaacccaaaccaaaatataaatttgtttatttataaaatcttatccctaaacactattttaaaaacccaaaccaataatttccttaataaattaaattctacagaatttgtttctttaatttattttattttattgattttaatttctttattctttaaataaatgacatgtcaaattctaattggttaatgaaaaaggggtgaatgaatggattcacccaagtatttttcaaatataagcacttcttagaaaatgtgatttgaagcatttttgaaaatttaatcttctattgaatataagtgtgagatttaaacgacccaaattacaatatacttctttctgcttctttctgcttgataatttcaatgagtttagggttttgtaatcaaagtttttcgttttttcgtgggcaagttgggtcataaaccctgctacaggggcgagcggtagtgcatcggacacccacaaggcaaggttctctcgcgtgtgctcttgcgccctagcctcccgttcccaagcttgctcctctaatcaaaattgcacacgttcacgcgataagcagaagctatgcagtggaagggaaggagcctaaatcgacccctttctcccatgattctcgtcgattttctgtgaaaagatcattatgatttattcttttagttaccaacgaacatgttcgcgggctatgaaatatttttgaatatgagaaactattctcgcaggcgctcgtgatagtctaaggccttttaacataaatttgtgagtgggtcaaaatgtcaatatatctcagttgaccgaaaataaaagaattccaatactcttcctcgagatatcaaaactagaaagaaagagtgttataatatttttattttggattaacaaaaaaaatagagaaatggaaacgttgaaagtccaattaaatttgttatattatgaattatgtgatataacaaattaagcaaattggcttctaaattaatttaaaagtataaaaaattggaagcgttgaaagtttaattaaatttggcatattatgaattatgtgatataacaaatgaggcaaattgacgtcttaattaattaattaagaaatggtagagttgaaagttcaattaaatttgcatattccgtggttccgtaacactgagtgagaatgacttgcactcaattttttcaaaacagtggaaagtttggtgaaataccttcaagttaggcaattaggcaatctcttatatactattaatcttggttcatgcatataacatcttaagatgataaaaaaaatggattcaaaacgtaaaaattaacaaaattcagtaaaataatatataagaataatatttttaaatatgttgtgttatgttttcaaactatggtatagtagtatcatctatagttttatcatcaaagtaattttattttgatattgacagtcttaaaagttgtcaaaatacgacaaatgcatcatatatttgaaattgtgtaaattgttttattggtttttatggtttccactgattcaaacgatcaaactgttgttcaataatataggttacattgaataaatagttttaacttttaaagtactttgttattaaggggttataatatttgtatgttgatatatataaaattacaaaacttaaataaatataattgtaaatatataataataattaattgtatattagtgaactcaaagtttttagtaaaatttcaaaggttacaaaaatttaaaatatatatttatttataagtagtcatcacaaaagaaaatgtaatcaaaagtataaacttaactgatgaaaggcaaatgagtttctgtagatctggcctgtggggatataagtaataacttcttcgttggacgtgcaattcttaaacctgacggctcttctaattgcagcccttgctttcctcaactcttcttctcttttctcaagattgctccttctctgccgacatttcatttaattttgttattacctttacttcattttcactactacaaactacgactgttttctatgtatatatgcatactatatataatatacacatgtacatgtcaagttgaccagaataaaagattagttatgtacgttccaaaagtcgtacgaatcattacaatatacatgaacatcgacatcgagtactaatatagcaaatgactaattcaaataatatataacacatgcatgaatcatcggaaaatcatgtattgattttgagaatttcaccatatagcatgtagatttgcaaacgttaatatatgaaaacatcagtatagtaatgaaagaggaaaactatacatatgaatccgagagattcttacctttacggtaatcggaggagagtataacgaagaagaagaagatgaggattgtaatgcatttgtgtgaacaagaagagaggacatagtaagtgaagagaagaactgttgaggtggagattcattattagggaacgaagaaaaaagtaagaagcttagaagaagaataagaatcaatggaaaccctaacaagcaaaaactcttggaagaattgtttgacatgtttttgcttttgctaaatgctttctctcgttgttcactttcatttggcctcttgaaccatttatatgcgacttcgagcagttcatgtttgactttgcgagttttttataccaaaataatatttttagactaacaaagcctttttagtcgacgtcatagcttcttcctagacgcaaaatcttttacaggtgattactttagaatggtttagtttaatccgttggttttgtcggctaattagacatttaattggtatggaaataattaatggcaaatatagtcatgtatttatgtgattgtgaagacaataaaataattttcagtacatatatatactacaatcaattactaatcgcaacaaatttgcgaggaaattggatttagtacgaaaaatttgagagatatataacttttcatttggagatatcgtcatatgttggatcaaattttattaagtcaagtgggctttataaaattaaattgtgtgaatgagaaatgggctataatgatttggtttgttctcactggagctccaagagtgtgttgagtggagttgaacgcttccatgagaatcagtatcttttgtttcacgtctccttgagactcggcttcattgtgagatcgttgcgtcatgctatcacccacttctcctggatttgcattggttgtggttgattgatcttaaaaattaaaccaatctcaaacctcaatatatggacgtttgaggtctttttcttaagggactgagaatttcatatcgctcatatagaaacacatatatccagcaatttctctttgatagaaagtattcaaaagtatcgtagaaacacttggttcgttagagctgttttccgaaaatagtttatagaggttgtatcatgggatccttgaatcacacagaaaccgtcacactacggatgattcaaagggttaaggacagagttcatcaactcgactcctctcttgtctttccgtaacatttgtgatttcaatttcaattgctttacgtagtgtttgctaattttagctcctacagtcttaaccctttgaatccgttttgttctataaacattaacagattggaattggaattttataaacgtgggaagcttgtgagtgtgtacattgagtttattggttgcgattggtaaacgtcaaactcattgtgacgagtggcgaggctcgacttggttgttctttcggaaacagagaaacatcaatcgaattcaccttgtataagagtattaagtaaatacttagttagggatatcaatgtaaattatgaaagttaactctaccctaattctctcatatgttctgtataaatagatgtaaaccatattctttgattaataagattatttcaatccttgtatggtatcagagctatcggtcctaaaaacctaaaaattctccattttttttactcagccgtcaccatggcaaactcaaaaaacacaaacgatgcaatatcgatcacaacaaacaccatccacaacatcaacatgttcaatatcacgaaactaacgaccacaaactacctcgtgtggaaattccaagttcatgctctcattgatgggtatgaactagtgcaccaccttgatgacaccacagaaattccggttgtcactgtaatagttggatatgtgacatccccaaatgttgcttacaccaaatggcgtcgtcaagataggatcatatacagtgttctcataggctccatctcaccgtctcttcaagagattgttggcgtcatcaagataggcttatatacagtgccgctgagatctagacgaagctagcctccacatatgtcaatccttcatgtacacacatccgctcactgatagatcagctcaaactcttccacaaaggtaccttaaccattgatgagtatatcaagggaatcacaacttttctcgatactcttgctcttcttggaaaacctcttgaacatgatgaccagattgagcacattatcgagggtcttcccgatgactacaaacctgtcattgatcaaatcgttgccaaggataagcctcctcaaaccacagaagtccatgaacgacttcttaaccatgaagccaagcttctctccaagcaagctgctgccacatcgatggttcctgtctctgccaacactgcccaacaccgcaacaactacaacaaccgcaacaataacaatagaaaacgatacaataataacaacaacaacaacaacaacaacaacacatcctagcagccttcgaacaatcagaccataccagacgaaagggtctccaaaccgtgtttgggcaattgccaaatatgtcaaacccaagggcatagtgctcgacgctgcccgcggtttcagtctcttcaaacatcacagagtcaccctcaaagctctcctttccgcccatgacaaccacgagcaaacctagccattgggtcacaatatcctgcctcgccttggttacttgattctggcgcgactcatcatcttacttctgatttcaagaacttggcgctacaccaaccgtacaatggcggtgacgatgctctcatagctgatgggtcaacaatatctctatcatacacgggttccactcttcttcccaatcaaatacgtgctttacttacttgataaaatattatgtgttccggatacacaaaatttcatttctgtatatcgtctttgtaacactaatcgtgttttggtttaatttgcttgtgacatctcctcaaactactgcgatggtttcttgttccggtccaaagacaactcttacatcttggcactcaagattggggcatccgtcttcttctattttgcattctattatttcaaagcattctctgccgttttcttcttcacaacaaaaacacttaccttgctcagaatatcttataaataatagccataagcttccttctactcaaactaccattgtctctacttgtcctctagaaatcatttttaccgatgtttggacatcacctctttattcctttgataatcacaaatactaccttgttttggttgatcactttacccgttatacttggttatatccgcttaaacgcaagtctgatgtccgaaaatattctaagcctttgtagccctagttgagaatcgttttcactgccgcattgggactctgctttcggataacggaggggaatttgttgcacttcgaagcttcctctctacacatggaatcagtcatctcacctctccatctcatacgcctgaaaacaacagccttgctgaacgcaaacaccggcatatagtggaaactggtctcatgcttatgtcaattgctttggttccaaaagagtattggacgtacgccttctctatcgcggtctatctcataaaccgaatgccaactccggttctctccatgacgtcaccatttcataaactctttgggatatcacctaattatgagaagcgtcgggtcttcggttgtgtttgttacccttgggtgcgttcgtagacgagacataaacttgacaatcgttctcaacaatgtatcttccttaggtactctacttctcatagtgcatatttttgctttcatccccctaccaagcgaatgtatgtgtcaaggcacgttcaatttgctgaatctgttttcccattcgtgaagcccaatcgagaggaccacaccaataatgtggtaaattccagctcgccgttgttgatattgctcgcaccacctcagatatctccgtcaccaccgtcgacgcctactgtccaacctgaactccaactcatccgctgcctagacataactcacgtgtttaagacgacaatggtcatcaagactcaccaagaatattgggctcaaatcaaacaggcccattccaatcaaataatctggcccaatacaataacccatcaacaacaagcccatcatccatcacccagaatttgcccaacaacacaacaactcgtacatcatcatcttcgtcttcaccttcgtctcacaccagagcttatcagatgtcaccggtcaccccgccaacttcgtcaacgccaccgggatccccgcactctggccttcgcctctcaccacaaccatcgtcatcgtcacaagtattatctcatatccctaactcttcctcatctcatatatctgagcctacagctccaattatacatgggtcgcaaatctcgacccatgcagaccctctttcaattgagcccattgctccacgccaaaatgagttgcaacccacaactcagcaaaacccacaaacaaatccacaaaatctaatccaagctgcgcctattcaaccacaaaaccaaattcataaaccaccacaaaataatcacaatatgcgaacttgagccaaaaacaatatacacaaaccaataaacaaactcagcctcacagtcactgccaataaacacaaatccaagtacaaatccaaggaactgacaacaattcaacaagccttgaaagatgaaaattagagttgtgcctcttctcatgaattcgatgcacttatgaagaatcacacctgggatttagtcccaccacaacctactcaaaatatcattggctgcaaataggtctttatgacgaaattccatgccaatgggctcctagatcgatataaagcaagacttgtcgctaagggttttcatcaacggtatgggcaagactacgcagaaaccttcagtcctgtcattaaatgaactacgcagaaaccttcagtcctgacatttcatacgccatcaatcgcctatcccaattcattcacaagcccactaatgagcattggcaagctgcaaaacgggtgttacgatacttggcaggtacacttacacatggaatatatcttaatgctgcctcaccaatgcttcttcatgcctattccgatgctgattggggtggtgatactgaatattacatctccacgaatggctacttaatctatcttggtcgtaatccaatctcttggacttcaaagaaacaacgcggtgttgctcgcttgtccagtgaagctgaataccgggccgttgcaaatactgcttacgaggtacaatggctatgttctctactcactgaactacaaatatccttaccgacagctctagtgatctactgtgacaacatattgccctcgactactgtgacaacatactatgacaattgcctatctttgcgcaaatccggtattccactcccgcatgaaacatattgccctcgactatcatttagttcacaatcaaatacatggtagaatgatgcgtgcagcttatatctctacacttgatcaactggtggatacacttaccaagcctcttccacgatcacgatttcaacaagcatgtgtcaagattggagtcactcaagtacctctatcttgagggagcgtataagagtattaagtaaatacttagttaagtatctaaatgtaaattttgatagttaactctaccctaattctctcatatgttctgtataaatagatgtaaaccaaattctttgaataatttcaatccttataccttggagattcaaaaaataagtgcagcgtttgttataactcagctttgaattacgattacaagcccgagtacgtaagatgcagccttttatctctcaaaagaatcaagaattggtgcttagaggttcaatatcagacttgaattgagattctattctgccgtatcctgcagctttgtatttgagaattgagattctaaaagctgttttgaaaccaattgttttggtattttgatcagactttgaattgtgtttcttagactgttgtgaccaacacattgttatcttggaaaaagatataatcacaagtgagtgttgttgcgtcatcgagacttaacctattaaacctgcagttttttttttgttttggattatctctagaaaacgagaattcatagtgatacaggactgagtttcaaagtctgtccaaaatcatatagattaaacttgcagtttggtgtttcaatctttacaaattgaaagtttagagacttattttgtcttggtttcaattctctgcaaattaaaaacattaaaacgtgacctcgagtttttggcttggaccatttggctttgcaaacactgtaacgtcgtattggttttgaatttttaattaacaattggctttaaaacaaattgcaattatttattattttacgtgaagtatacgaattctgcaacttgactttgctttcatttttgtgcatatagaaaacattcatcaatgtaaactgcagtttttgtattgactaactcacgttattaatctggttttgggtctattgtaaacatggcaagtgagaacgtttacaacgtcgctgaagtcgacaagaccataaccaatggggataaaacagaaatccagtttggaactgtccctgaggtgaaagacatgtgtgcggttgtcagcgaggctaatgttgccgaaagccatccaaaaacttggtggttcgataccggtgcaacaagacacatttgcttggataggtacatgttttctacctatatcaagaacaagagtgaggagaaactctatatggggaactccgccacttcaaaaagtgaaggctgggggaaagtggtcttcaagcttatctctggacgtgagcttaccttgacaaacgtagttcacctgccggacatgcgtaagattctttgtaggaattcgtaccggtgtataaggatttataaatactaataacgaaatctattgccaggaatcgtgtaaataaagaattaaatctagatcttagggtttaaatatacctgaatattctgcagcggaaaaatgaaccatattaattcgaggttgttttagcaccctaagtgttgtgcctctacccgtatcagatcttgaatgctaattcatttgagatcttatctcaaaactttataccaacttttgtgtcttatattttagggttcttgtgattaaaagtatatctcacaaacgttgctaatatatcatatatatagttaaacgtttaactctaactaattaggattaataatggaccaaagtccaataactttttttctcccttttgaaattcaagtacataaatatgtgtatatcatatataacatatatagtataataaatattttattatatatgcacaaatacaaatatatttgtgtatcttatataacatatatattatattattattaatccaacattgatttagtttacttaggtgtgtgaccctttatgtttgtataatattagaaatgagttatgactcatagattataagctgtctctagcaaaacattataaccacctaatattatacaaatgtcaaacctcgacattacaactttaactagagtaaagtacaactgatttcaggacatttccaacaatcttccacttgtactggaatcatctattctcatattccctttgtctctatatcccgatctcagcataaggcaagaaattgtcatccttattctgctagatcatgtttatcgaactctgatttatactgataaaacaaacgactgacattcacctcgtttgagcgcggccacacatttctcattatcaaatctttgataggcccaaagatatttctctccctttatatgggagggacaaatcccatcttgttccatctttgttccttaaacaattcataacgcgtccaatcactgtctttataattaccttttacggctgacaattgagagagtcaacgcgaactaatccatgaataagaaatcatgaagaactcatgtcaaaggactatactctatagttgtgatgagaaactcttatgacactcatataacaatcttgtagagttctcataacgggtcagtccaatactgtgttttctaaaatatatctaggtgattgactttaataccacatattaatgactccaggaaatttagtgaatcgattcaaattgccttaaacctactctccaaataagagatcggttgcagtatttaagggtcaaattttctcaaagttcttttgttcacacaatgaattagatgtcaagattaagttagcagagaataagtgaagtaaaaagtaaacaaagtaaaaagacaacagactcattggttgtgaaacgattaaataaagagctatgagtaggatattctcaagaaaatattggttagtagatctaatgaaagctaggttgttatcgaaccattcttaaactcaaactctaattatggaataaccggtggtattccacgaaactccctatgtctatagctaagaataaccggagaagccgagagatcttagaatacctagaaagactctaaaaagactggagaaataacgaaaagactcaaaatcctaaatctataataacactatattttactcattttaggcatgtatttatcatcatttagcttagtgatcactcattgtttcatatcattttgcatcacatttagcttattttgcacacttaggcatttaggatcatcttgcatacatattacatgttttggtgtgttttcaggtgcagaaggagcttacaaggaatctactcgaccctctactctatcaaaccaggagggaagcaacagagcaatctactcgaccagttacttgatccaggcaactacagaggaggcaacagactctactcgaccccctactcgaccagttactcgatcaagggcaacctactctacaagacttgttgatcgttcaaagcgtcttctgatccttctcattccccactcaaccatacatctgagcataagaataggagaggaagaagcaactactcgaccaattgatcactcggagcatggaggcaaaggcgcaaactttgcagcaccctctttactcgatccccaagatccagcattcatcaaaaccgcctcaagtctcttgtcttctagtgaatctagggttttcgagattatagtataagtaggttctttggagtttgtccaaaggaccaatcttttattctgtagtttttctttgtgttttagaatcttgaaacattaattactcttaatttatttcgtttttgcatttagttccttgagcaaagttgtttatcttgtttagatctacattttgatatgattttagtaatttctgggtttgtgttcttcattatgttgcttgagtagtgattagggttctttaggatggattagattagggtaatctctaggttagtcaggtggttaagattaggttagatcccttctggattcgttggcccctatgcgattttgactgggtaatgttggaattcgaccctaggtattccagcgtccaaaagacgttcaaatggatgcctgatctacgaataacaagagatttatagattctagcccaagagattggatgtttagactgcttattgactttggtagattgttgtttaaagtctgccttgctatgtttcatcaacgagagttgagattaggaagtggtaagtttatgaggatctctgtcacgagagtgaattgatctgattttgaatctatcatctagggtatttgcctttcgcatgttagccacctgatgaaccctagagttgcccttatcaatggatccatccttaggacttctattcttcttagatttatttgtattcatccgtttgttgcacttttattcacatgttatttgtgtcatcttgttgagttacctttattgcatttcagtacttaaagttctcatttttgttgtttgaatcttgatttaggattgttactagaaacccaccatcattataatctggcttatcttatttgtttctgtatacatcttgattgctaacaataacagtggactagattgacaccctctatagttgcatcgacatgttagtgtttattgggaattgaagtgaaccacagttcaacatataactaggtgtaaaaacctagttatcaatttggcgccgtagccaattcattgttgcattgttacattcaagatttcagaaaaagttaagatcaagttcttttacattactcaagttacttactcatcttttcatctacttgtttttgtggtacatgtactaatctttgtgcatgcaaactcgtttcaaaggttctgcacacctactacctttcaaagacagaattgacagaatcgctcatgagttacaagaaaccaaagcaaagggagcatgtgatcatcaaagaccagcttctatggatcaacagaacagaccagttgatatacaagacccaactaatgttgaacaaagaaacattggtgctggtgatccccgaagaaatcatcaccaaagacaagggatagtgccaccaccagttcagaacaacaactttgaaatcaagagtggtctcatctccatgatccaaggaaacaaatttcatggtttgcctatggaagatcccctggaccatcttgatagctttgataggctctatagcctcaccaagatcaatggtgtcactgaagatgggtttaagctcagactattttccttctctttgcgagataaggcacaccactgggaaaagactatgccccaagactccatcaactcatgggatgattgtaagaaagattttcttgccaaggttttctctaatgctcgcacaactagattgaggaacgagatctcatgcttcacccagaaaaacaatgaaactttctgtgaagcttgggagcggtttaaaagctacataactcagtgcccccatcacggttttaagaaagcttcattattgagcacactgtacagatgagctttaccaaagatgagaatgctactcgacactgcctcaaatggaaacttcctgaacaaggatgtggcagaaggatggcagttagtcaaaattctagcacaatctgatgggtgctacaatgaagactatgatcgctcagtgagaggaactggagaaactgaagatagacagaggaaggatatcacgaccctgaatgaaaagctagataaactgttgctggctcaagagaagcatattcactatattactcatgaagagcatttccaaatgcaagaaggggggaatgaataatgatcaaactgaagagctctgctatatccagaaccaaggaggattcaacaagggctacaacaacatacaagcctaacccgaacctctcctacagaagcactaatgtcgctaacccccaagatcaagtgtatccaccacaatagaatcagtgtaagccatttgttcagtataaccaaggttatgtctctaaacagcagtttaatggaggataccaacaatagaatccaccaccaaggttcattcaacaaccacaacaaaccccagcatcacaagatactaacacaaaacagttgcttcaacaaattattcagagtcaaactactggagctctagttctggaaaaacgattggctgaaattaatagtgaagttgattgttcctacaatgagctaagaaacaaatatgaggacctaacatccaaaatgatatacatgaaaagccaagctacttccaatacctcctccaagtatacatggctggccacatccaggaaaagccattaaaaattccaaagaatatgtacacgcagttacacttcgcagcggccagaaactacttaacaaccaaaccacaaaaaagatcactgaggtcagtgaagttcaagaagggtaagataatcatcaaaacaaagttcaaattgatgaaccaactaaacttgatcagccttcagcctcactcagccctctactcgatccatcaaagccaacttttgagaaaagaaaagctgcggttgctgaaaagaataaagaatttgctctgccaccctacaaaccaactatgcgtttccgtggaagattcaaaaaggaaataatagaaaaatacaaaaccctttttgataaacagcaaaaggagattgaactaagaatgccgttaatggatgctttcatgctcattccacattcccacaagtacctgattatggaaagaatcaaggaagtacaagggatgatggtaataggccatgaatgcagtgctatcatccaaaaaagtataataccaaggaagttgggagatcctggatgcatcaccctacctttctcagtaggaccattatctttcaataaatacctatgtgatttgggtgcctcaattagtcttatgcccctatctgtaactagaagactgggtttcagtaaatacaagcccagcagcatccaactgatattaaatgatagatcagtcagaatttcccatgaagtcctggaagacctacatgtcaaagtcggatcaattgaaatcccacagatttcgtaatactggagatggatgaggagacaaaagactcattaatcctaggaagaccgttcctagcgacggcagggacaattatcgatgtcaagaagagaaagatcgacctaaacttagggaagtatacccaatctacgtagatgaagatgacattcgacataaacaaaggtatatatgaagaaaccaacaattaatggacaagtcttttggatcgaagagatgatatattggctgacgaattactagaagagcttacagtgcgagatcacttagcaagtgccttaaccaaagatgtagaagaagggtaccttcacttagaaactcaggggtacaaagaatatctagacgcccgcaagccaatggaagaaccagaagagtttgaggaattgattattccctcagaagaagtagtatcgggatgcaccattagcccaattactgaaaaaacaaactctaccgagacactcaaccatgttggagagaatgcaagttcagatgactggtcagaactcaaggctccaaaggttgaccttaagccttttccaaaaggtctgaggtacgcgttccttgatccaaacgatacatatcccgtcattattaataatggattaagtgatgaacaagtgcatcagttcttaaatgaacttagaaagtataggagggcaattgggtatccattagctgatattaaaggaattcacctagtttatgcactcataggatccatctcgaaaatgaatcatatactagtgttgaaccacagaggagattttatctggatttaaaagatgtggttaaaaaagaaattcttaaattacttgatgctgatatcatctacccaatctccgatagtacttaggtctctcctttgcactgtttacctaagaaaggaggtatgactgtagttaaaaatgatttagatgaactcattcccactagaactataaccggacacagaatgtgcattgattatagaaaactaaatgctgcaactataaaggatcattttcctttaccattcattgatcaaatgttagaaaggctagctaatcatgtttattactgttttcttgatggctataatggtttctttcaaattgcaattcaccctaatgatcaagaaaaaaccactttcacctgcccctatggaatttttgcctataagagatagacattggatgctcctggaactttccagagaagcatgacttcaatattctcggattttatcgaagagataatggaggtattcatggacgatttctcagtctatggatcctctttctactcatgtttgttaaatttgtacagggttctagaaaggtgtgaggaaaccaatttggtactcaactgggagaagtgtcacttcatggttcaggaagaaattgtgctggggcacaagatctctggtaaaggaattgaggttgataaagcaaaaatcgatgtcatgattcagctgcaaccccctaagatagttaaggatatcagaagcttcctaggccacgaagggttctacatgagattcataaaagttttttcaaagatttctcgacccctcaatagactgctgtgcaagaaaactaagttcaatttcgatgaagattgtcataaggctttccattcaataaaagaggcattggtgttcaagcacccaactaggactatccattttagattatgtgtgatgcatccgattatgcagttggagcagttctaggccaaaggattgatggcaaacttcacgtcatctactacgccagtagaacaatggacgtagctcaaacaagatatgcaaccacggaaaggagctgttagctgtggtttttgcttttgagaatttagaagctatttggttggctcgagagagaaggtttacacagaccatgcaacactaaggcacatctacgccaaaaaggaaaccaagccaaggcttttaaggtggatactattacttcaggagtttgacatggaaatcattgataagaaaggtgttgagaattgagttgcagatcatctctttagaatgaggattgaggattcaatcccgatagatgacactatgcccgaagaacaactgatgttctacgaccttgttaacaaaaacatcaccacaaaggacatactggatgaagcatatgcagttgaagaagaaaagttgccatggtatgtaaatttagtcaattatttggtaagtggtatgatccctcagagtcaggatgcatataaaaagaagaagttctttagagaagtccactattactattgggacgaaccatacttgtagaaaaagggaaatgatgggctattcagggggtgtgtctctgaaggagaagttcacggtatattggaacattgccatggcttcacctatggagggcatttcgccacttttaagattgcccagaaagtgttgcaagcaggtctgtggtggcccacaatgtttaaagacactcaagagttcataacaaaatgtgattcatgccaaagagtcgggaacatatccaggaggaatgagatgccacagaatcccattcttgaggtagaagtttttgacgtacgggggatagacttcatgggtcggttcaatcctccctcatatggaaatacttacatcctcgtagcagtggattacgtctccaagtggatcgaacctataacaacaaatgatcacaaagtggttctaaaaatgttgaagtccattatctttcccagagatggtattcccacggtagtaataagtgatggaagctcgcacttcataaacaaagtctttgaaagtttattgagaaaacattggggttaagcataaggttgccactccctatcatcctcagaccagtggccaagtggaagtgtcaaacaggcagatcaaagctatactcacaaaagttgttggtaagggattggtcagctaaacttgatgagaacctgtgggcctatagaactgcatacaaaacgtttattggaagaaccccattccagatgatatatgggaaatcttgtcatttactagaagaagtggaatataaagccatttgggcaaccaaacttctgaacttggaaatcaaaggagctcaagaaacagttgacctgcatgaactagaagacattaggctggaagcatatgagagttcgaagatctacaaagaaagaccaaaagcctttcacgacaaaaaaatccaccaaaagatttcaacgttggagaccaagttctacttttcaactccatgctcaagttgtttccaagaaagctcaaatccaggtggtctggacctttcaccatcaaagaagtaatgccatatgtgggcagttactcttatcgggaagggaagttctgaatttactgtaaatggacatagggtcaagcgttacatggcagattgtcctattcctgaaagaactacagttcacctccaggagtccattagtgcctaagatagtaagaagtctagcttaagactttaaactagctcgcttgggaggaaatcccatgtctatctctgtacatatttaattttaatattttgatatgcttcttagtgtttttggaatttaggaaataaatcaggatttgtggagctgtggagtctgtgatgaagaaacacctactacaaaagcaattttactctatcaattggtcgagtagcacgtttaaacgaccaagcatgatgatcgagtggctcacttgtttcccaatcactatattactcagcggataatgcatgtacccatcatactcaacacgatttggtcaaactttcttatcccaacaagaaagtttcggagaccatcctcctccactcattcaaatcgacatcaaggataagaatttcaatcttacttctttttctcttgtgagcgcacctaactatcatctctctcacttgattcccttagcaaaaccattcccaacatttcaatcttgagttttcattagacatcactcatccctatttcactcgatcaaacccatcgattttcttttttgtttttgactcacctattaagcttcggttttggtttctaaaagttcagtttcacaatgagttcaaacagcaacggatcttcaatggacgccgagcatgaggctgaatcctggtatactaggtctgagagggagatgaaagagtacaaatggtttaatcaacaaaccgccgaagctcttgctcgtgaaagaaaaagagctgagattgcaataggaaaaagagccatggcgggagagagaagccttgtggatgaagaccttggtggggatgtagactatgtcactgaaataactccaagagccaccaaatccttgatgaagaagactaagctatcgccggatggatactatgagcttttggcggttcatgatttccatggcactcgataccctcactccccaactatgaataagcttggcataccagaagatgtcgagtacctctttgaaaagagtggtcttttgggtctcatggccaaccctcactcagcctacatgacaaaagcgtttcagttccttgcttcactaaaagtagagttgttttaggggctatctagccatgaatcgagagaagaagggcttgggtatatcaccttcaaagtctatggaaaagactacgttttggccatcaaaactcttgaggatatgttcggtttccctagaggtactcatgttaaacccaaattcaagaaagaggagctttcagatctttgggtaacaataggagatgacgcctacttctcgtcttcaagggccaagagcaacgcaatccgcaacccctgcatctgttacttccaaaaagcaatggctaacgttttctacgcaagggagaagactggaccgatcaacaatggcgagttagagctgctggacattgcactaaacgatcttctagtctacaccaagaacaaaatgcctatgaagggtgacacaaacgatgcttcaccatccacgcgtttattgaatcaactttgtagttatatgaaatgggcactagctaataagcacaagagaacaatttctataggaggggtgataacacttatactactggcttgtggagtgccactttagtcgactccctttgccccaagatggattgacattcctcaccggaaatgggccttgttcattgagcatcaacatcatatagggatgcacattctcaagtttcatcacaaaacggccatggatggtaggattgtcctaccctgccaagagctcacaaccatcacagtaagaggtaacatcgatttcaacacgcctagtgagacgcttttcttcatggatagggcaccccgacaagagaagctctagacaacaaagaaagggctgaggttccattttaaggaacacaatcctccatcaagagtgagtaaaagtttgagtgaagcacacaagaacattggttcagtaaccgcttggaataagtttcaagacaagatgttggcaaaatgtggcaagaccatatcagcaattcaagctgcattaagctgctcatcctcaggcgccaccatgataagagagaatcgacctgaagaagtagctccaacaagacacagagtttcaccgccaaggcaatcggcctatgagcaacgggaggtaagtcgcccccaagcttctgcaagacatttatctcatgagcaccgcgagcagaaaatgagaagaagaacaagagtggttcgcccaaggagcaaggaccgtcttatgagaaacaggagatcactcaaccaaagtgctcaacgtggtatcgagcagagtgtcaagcacgatctgtaggctcagaatgagcagagtatcgagcaagagtaatgggatcaagacgggcagtactcgaggatgaattgggatacatagtatggcatcaatgagcaggaaaacacctctgaccgctaaggtaacaccaccacatccattgtatatataatagtttttttttttttctttgtttgttctttgttttggtcttaaattctttctcagatttttattacacaatggattgtgtaatttaagtttgggggaggtttcaagacatgtttgacattatgttctcttttcttatttcaaattttgcatcatctaaggcatagaaaaaaccataaaaatttgattttttttcagaaaatgatatcataaaaaatagagggtcatgtagattacatatcattttaggattgtaagagtgtttgcatttaggattgctcatttgcattggggataatgatgatttcaaaccgttgagtatgtaaactcaatgaagttcaatgcccaggttgttagttctctgttgtataactgattgtttctctaaagtaagagtgcaccctgcattgaatttacaacttgactttactgctttgatttgaaactcgctaatctgatgccattccctatctattagaacctgaactgaatttgcaattatcatgtcaatgcattgtttttgaactcatggctaccatatacatacttggtttatcttattcacttcaccaccctttgttaatccatgtagttgactctcatctttagagcagtttccattaccctgaacttaaccttatttcaagccaaagatcattttgtgtgtgattgtgagttcttttttagatttagcttggtataacgtgttaggtatgagccgacaagagtagtctttcatgtagacctagctcacgctatttgggttagctaggactaggtggagacttgtatttgggattgggattgtgtatagaatgaatggaaaagagaatgagaatgaaaaagaaaacaaaaaaaaaaaagagtaaaagtttagagttctgaagggggatacaaaagaaagtgttagtctagtaaatggtttggaattcaaagaaagttaagcattttcattcaaagaaaatgataaaacgccctctgtgctaagattagaagaaaagccttaaagttgtcaaagtgtaaaaccaaacccgcgagactcttgaatcgttttaaagaaacaccccttagaacttgaaccaaaagagagaaagaatgagtataagtgtagagttaggacatctaacggactgagatcatcttctgagctttcatactttatatcatttggtagatgggagtctattcttggatgtgttcgttggctctaacctttaacattctgctaaagctcaatcttttctataagagtcccctgttactcggccaattcattagagggacaatttttgtctcttagccttagcccctaaaccaaatgagttcataaacattgcattgcttgatccactgttcgtgcttaaaaatgttaaaggaaattcgctaatgtgaatgcttgaatagattaaggcagttgttaggttgcactatgacgcgtattgtagcaccccttatagggaagtaagaagtctggaggagttgagcaggattttgagcttttgcgtgagttaagtaagcttccattgaaggagaaggggaagagcaaaggtgaactccatggaagaagaaaaaccttactggaggacaaagacgagaagaaaggtgattatgttgccctcgctttaaacccgtctcaaattgaattgaaatgacttgacccgcgagagtggttcccaaagcttagagaagtgagaagaaatccgattagggaagaaagaataggatgaaattaaaggattcatcgatcgagagatcaagctgaatcacccgaccaagaaatctatggttgagagcttggattcagaagaacttttgagactttgaagatttttgaggagaagatgattatttttgtctaagtgtttggaatgaatgaatgagggttgcgttatttatagaagagaaggaaacttggagccgaatccattcaggcgaagccatgcaaatcaaatatggcaaactttgtgaccaagtcggcttgcatggagccgaagcgaacaaaacttggcgccctagtcccttggtcggacgccattcaaaatgcttgccatttgttgttgccacgcggccgaattctcttgcatgtgcgagttgtagaacgtgcctcgccaagtgtcaacggacgtgagccaagtgtcctaggacgctaactctcgccaaacgatcggaccgtatatataaaccaccctcttcagttccgaacattcctcttgagaatccaaaaataactaagaagtttttaagagtttctagtgagttttaaagagagtttccgagagttctagggagagtttttgcgagagcttttagaggagttcaagagaggtttcatggagaaggcggaggaagatcttgacgagaaagtcgggtaaccaagatcgccggtgaagcattccgagccttaacctctcgagccgtttctagttctatgagttcgcgtccaccttttcttgttgcattctcatgctagggtttcattcattctcggatttggttacatgttgataagctatgaccttaatgcatatagctcacttagaaacctcaccgttcatttcttcactacatgtctaaaatccggctaggttaaatgaatctcatacagaactcatcacccatcatgcttgtctttgttattcttaatccagctaggttacgttgtgtgttgcatttagttttctagggcttgcttgtttgtttgtgtgtttctttgcttgttgagtcttgtaagtcctgcttgagtgtcgccatcttcaaatccttgtcggatgagagatgtgcatttttgtattgttgagtctaggtgatcttggacgcggagtccatggatcgtagatcgagtctagtttagggtgctgctatttcctgcctgtgtatgtggaaccttcgagccttggtcccaagggaacgatcgttggttagtctcagaacctaggccgatggtgcatgacgatgcattatgggcttattggtatcctgtgtgggttcaataaagtcgtgatcttgttggtttcttgtgtgggttcaacgagtggttggtttgtttgacggatccatgtaggagaacttaacttccgacgttttgtgtgaggaggaatagagcacaggacccataggtcgtgtctaggtcgagtctaggttgagtcataggtcgtgtctaggtcgagtctaggatagatcaagtcttgtcatgtttgtgtgtcttgtgtttttctttgcttccgcatgtttttctgatccatgttgtcttctttcttgcttgctttcgttcattaacctccctctaggattgaactgcattagacagcttagaattgccataggttgtgtgctgcatggtcccgactcacttagtaatgctagattactcatgattttacttgtctttcaggcgcctgtagtctcggacgtcaagacgaaagacgaacgcaaggccattcggactaggttattatttttctttagttgcttttgtaaaacctcattttgtatctctacgagttttatatgcggatccgtttactaatcgtttgctttttgtgggttttattcgaataagtacaaagggttttacaaatgcggatgttttgagatgatacaaggctttgtccgagccgcacaacactaggttcatcgcaagggctggcaaacctacgcggggaatctcgtggggagatgaccggatgcggtttggccgtggacttggaaccccgagactttggccgagttgcgaatggttctctccatctgtgatgcccacccgagtcaggcgtggttagtccggtcatggccaggctcgggggtgttacaagtatggctaaagtttttaagaaggatctatcaccttgcaacctagaattagctacatggacattgatctcacccgcactatatgcatgcttcggtttttgaatccccaccttcaatcctctccttcaacttaagattttttgtttgcttgagggaagcaagagataagtttgggtgagttgataacactgtattttactcattttaggcatgtatttatcatcatttagcttagtgatcactcattgtttcatatcattttgcatcacatttagtttattttgcccacttaggcatttaagatcatcttgcatacatattgcatgttttggtgtgttttcaggtgtagaaggagcttacaaggaatctactcgaccctctactctatcaaactaggtgggaagcagcagagcaatctactcgaccagttactcgatccaggcagctacagaggtggcagcagactctactcgaccccctactcgatcctctactcgaccagttactcaatcaagggcaacctactctacaagaattgttgatcgttcaaagcatcttctgatcctcctcattccccactcaaccagacatctgagcataagaataggagaggaagaagcaactactcgaccaattgatcacttggagcatggaggcaaaggcgcagattttgcagcaccctctttaccagatccccaagatcgagcattcatccaaaccgcctcaagtctcttgtcttctagtgaatctatggttttcgaaattttagtataaataggttctttggagtttgtccaaaggaccaagcttttattttgtagtttttctttgtgttttacaatcttgaaaccttaattactcttaatctatttcgcttttgcatttacttctttgagcaaagttgtttatcttgtttagatctacattttagtatgattttagtaatttctggggttgtgttcttctttttgttgcttgagtagtgattagggttcttgaggatggattagattagggtaagctctaggttagtcaggtggttaagattaggttagatcccttctggattcgttggcccctatgcgattttcactggctaatgtgggaattcgacactaggtatccagcgtctaaaaaacgttcaaatggatgcctgatctacgaattccaagagatttgaagattctagccaagagattggatgtttagacttcttattgacttaggtagattgttgcttaaagtctgccttgctatgtttcatcaacgagagttgagattagaaagtggtatggttatgaggatctttgtcacgacagtggatttatctggttttgaatctatcgtctaaggtatttgtctttcgcatgttagccacctgatgaaccctagagttgcccttatcaatgaatccatccttaggacttctaatcttcttagatttatttttattcaccccctgattgcacttttattcacctgttatttgtgtcaccttgttgagttaccttttattgcatttcagtacttaaatttgttgcctatatggttttgctcgaccctgtgatcaagtagggtacttaaagttctcatttgtgttgtttgaatcttgatttatgattgttactagaaacccaccatcataatttggcttgacttagttgcttgtgtatacatcttgattgctagcaataacaatggaatagattgacaccccatatagctgcatcgacatgttagtgtttaaggggaattgaactgaaccacatttcagcatataactaggcgtaaaaacccagttatcaatctaaaacatagataaactcagaaaaaggattatatcacttagtcatcaatcacctcacatactagtcattcttagttattaatatcccattttaataaccttgactaggaacttcaataatttatgtcattatccccttacagggtttcatgatcaagtcacgtacttgatgacctataagaatgatattaattatttaggactattatttaatcatcaaataaataaataatattaaaacaaatttaattaatttgaaaataaatccaaacgtattttaacatgaacatcatatcataaaataaaaaacctcccactagaaataagatcacatctttataaatctaatgccaatcacagcagtatgcctctcatgcttcggctgcggaagaggttttgtaaaaagatcagcaacattttcatccgttgaaactcggctaatcttcacatcacctctaccagtaatctcatgaatgagatgatatcgcctttgtatgtatggatttctggtgtgatctaggttcttttgcttgcgcgatggcaccattgttatcacaccaagttcagtaatgaacttcctaatccaaacagcctccttacccgcttctgaagcagctatatactcaactttagttgtagagtctgccacaatgctttgtttggaactcttccaactcattgctcctcctttgagacaaaagacaaatccaaattctgatcggaaatcatctttgtctgtctgaaagctggcatcagtataaccactcacaacaagttcctcacttcctccatagaccaaaaacttatccttagttcttctcaagtacttaatgatgttcttgactactatccaatgactttcacctggatgagattggtatcagatcgtcatgctcaaagcacatgcaacatctaggcgatgagcataacatacatgatagatcctatagtagaagcatatggtatcttactcatccgctctcgctcatcatgtgtcgaaggacactgagtcttgctaagagttatgccatgagacattggtataaagtctttcttagaatcatgcatattgaacctgtgtaagaccttatctatataagtatcctgacttagtctaattattttgtttaatctatctctataaattcttattccaagaatataggcagcttcacttatgtatttcatcgagaaacaacttccaagccaagtcttaacagactggagcaaaggaatgtcatttccgaggaggagtatgtcatctacatacaataccaaaaatgtgactgcgctcccactagtcttcttgtaaagacaaggttcttcttcgtttctaatgaaattaaactctttgattgcctcataaaaacgaagattccaacttcgagatgcttgcttcaatccatagatgaagcttgcataccttcctagcaacttcaagaacagtgaaacgtttaggttgtctcatgtacattctcttcgagattttcattaaagaaagctattttcacatccatttgccaaatctaatagtcataatgagcagcagttggtaggagaatccgaatggacttaagcattgcaactagagaataggtttcatcatagtcaataccatgaatttgcttgtaacctttcccaatcagtctagctttgtgtatctgtatattaccatccatgtcaattttcttcttgaaaatctatttacactctatggcttttcacaatcaggtaaatcaaccaaagtccatattttgttttgtgacatggattccatttcgtatttcgcggaacctgttttaggaatcagggcccatcagcgcttcttcgtatgatgtaggttcatcactctctataataaatagatcatgatcatccatcatccaatctccaaatctatcgggttcgtgatggctccttttggacctacgtacctcaggttccacaagtaaaggttctacgactcttcgtagatccaactgatgttcatcctgagaatttggaacatcaccatgtggttatcaaacttctttgagtaatactttactcccacaagtttcttttgaaagaaactctctttccaaaaaagcaccatttcaagcaacaaacactttgttgtcagtagggtggtaaaagtaataacctttggtctctttcggataacctacgtaataacacttatcacatttgggtccaagcttatcagtaatcaatcgtttgacataagcttcacaaccccaaattttcagaaaagacaaattaggaacctttccagtccatatctcatatggtgtcttctcaactgattttgatggacatctgttgagcataaacggagacgtttctagagcatatccccaaaagatggaagatctgtgtgactcttcatcgatcgaaccatatccaataaagtttgatttctcctttcagacacaccattccattgtggtgttcccggaggcgtgagctgtgaaacaattctacactctctgagatgatcacgatctcatcgacgagctttaattgatttgccaagttgattttgtatttcattttggaactcttgaacttttcaaaggattcagatttacgtttcataggataaacataaccatatctactgaagtcatcagtaaatgtaatgaagtattgatagtttcctctagcacttgtcgtcattggcccatatacatctgtatgtataaggcccaataagtcactagccctttcactgtgtccagtaaacggggctttagtcatttttcccaacaaacaagattcacatgtttcataaaattcataatcagttgagttcaaaagttcattactatgaagcttttgaatgcgtttctcgtttatatggcccaaacgacaatgccagagaaacgttggattcaagtcattagacttaaatctcttgttacgaatgttatagattggcatgctttggtttagaacatatagcccattctctaatagaacgctaccataaaacatatcatctcgctcaaatgaacaacatttgtttttgatcaaaaagtgaaaaccttcaagtccaaacatgaaacagagatgatattcttgtttaaagcaagaacatagtagcagttcttgagctccaaaactatgcctgaaggtaaagacaacgactatgttcccacgggcaatgtagagacttttgctccattagccacacgtaggtccacttgtcctttctcaaaagttctagtgttgtttaggccatgcgcatttacacaaatgtgagcaccacaaatggtatccaatacccaaggagtagaaccaaaagtagtaacattgacttctataacatagatactcgaagaatatatattgaatattttcttcttctctagatcttccaagtgttcaggagggtttgatctattcaatttgtccttcttaaggacatctcgaactgaataggaactttgaaggtttgacataactgtcgaaaaagaaagcagaaattaatatgatattcataaattttgaattttcgacaattaagaaaagtaacactatactcaaaacaaatttcctctaatgagtacaatgatccaagatccatattttgtaggagctcagaaaccgaattgagaaacaagtacgaataaatatatgacagtttgatatgatagttttttccttaattcaataaattggccgtaagtgctttttggacatcacgatttatgaatcccaggatacaaccgatcacgaactaatacccgagcacataagtattagactcaagcgaacttgatctacgatatactctcaaaactactaaactaagaacttacttttaagaagcaatagagaggagagactttagaatttagagtgttttgtgtttgagagcttgagaaataatgagaggctgggtctcttcatatagtagagggaaataggattttgggagaatattctcaggatatgcatgacatattttgagactatcctgagaatatgaaatattttgagaatatagaatattttgagaatatggaatattttgagaatatttccataagattcaactcagcaagcccaataactcacaaatatgacggccagatggtgaacatgatgtcttgaaccatccgaagtttaatgcaaacttagacaacaagtataacacaacttcattttctcgtagaacgaggttctctgtttgtgttcattgtggccttgaacatgtctggttaatcatgagtgaacttggagagtatagcctcacataatctcctagaaacggccccatttcacactcacaaggtgatttactagctgcttgtatttaaaaaagtatcctgtaattacttcacatatcttacaaagctaggttcaaatcattaaaagcaaatgcttaacctttacacatacaggaagcactatacatcatgttaggaactaggaagagacaacagtctctcagtgcttataacagatttagtttgatttagttgtccctttgaacctatgtcatgggatctccaatctttgtaggtggggttaccatcaaacttcctcttaggtggtaggctttaaactcattcctcttgatgatcttgcaacttgatctcgatttaaaccttttgtaaatggattcgctaggttgtcaactgacttgatgtaatcgattgtgattactccagttgagataagttgtcgaatagttttatgtcgtgttctgatgtgactagatttaccattatatagggtactttgtgccttacctatagttgattggctatcacagtgtacacgtattgcaggcacaggtttcccccacattggaatgtcttccaagaaattatggagccatttggcttccgctgcagttgtatccaactctatgaattcagattccatagttgatttcgctgccacaatttttttgctagatttcgaggatactgctgcacctccaagtgtaaagatatatccaattgtggatttaaagtttttggaatctgcgatccagttggcatcactataaccttctaaaactgcgggttctttaccatagtgcaagccatgatctttggtataacgtagttagttcaaaactctagttatagccttccaatgcttatgtcctggattgcttgtgtagcgactaagtacatttactgagtgcgctaaatccggtcttgtactgtttgtcaagtacattaagctgtcaattactcttgcatattccatctgttgcacatgttcacaagagtttttggtcaagtgaagttgaggatctactggaatttttgtagtcccattagagtaatgcttgaaacgatcaagtatcttttcaacatagtgggtttgagacaaattaaggccttcattagtactgatgattttaaacccaacataacatctgctagatccatgtctgtcatttaaaaatatcttttgagcatgtttttagtttgatttatgatatctgtgttgctctccaagatgagcatatcgtctacatataaacataacaaaatgtatcctcttggagtaatattgaaatatatgtatttgtcacattcattaatggtaaaaccattagacatcataacactgtcaaacttctcatgccgctgcttaggagccagtttgagtccctataatgacttcacaagtttacacactttgtgttcttgtcctgggataacaaacccttcaggttgtttcatgtagatttcctcttccaaatctccattttaaaaagctgtttttacatccatttgatgtatttcacgatctcgtaaggctgcaatgcctatgagcatcctgattgaagttattctcgttaccggagaataggtatcaaagaaatctaaaccttctctttgtcaaaatccttgtaccacaagcctagctttgtaccacaagcctagctttgtacctatcaatatcaccattcgtttttccttttaatagtgaaaatccatttactccccaatggtttagaaccttgtggtagatctgatatctcgtaagtatgatgttgcaagatagagtctatttcagtattgactgcttccttccaacaaggtgcatcaggggtagacatggcttctaaataagttcttggtacgttttcagctaaaaacatcatcaagaaaccatcaccgaaagatctctctttgcgagctcttttgctccgcctaggttgttcttcaggttcctgttctgtttttttcaacagtaatagtatccaaagaattgtcctcagttcgattctttcgttcagcaactccgttagattctggtgattagggagtagttatttggtgtataatgcctttttctctgcaaaatgaattgaatggctcattatattctcctcctctatcacttcgaactatttttatagttctttgaagctgattttctacttcgagtgtaaattctttgaattttaccagagcttcatctttgctatgtaatagatatacataacaatatcttgtgcaatcatctatgaatgtaacaaagtatttctaaccacctctagtttgcacatattttaaatcacaaaagtctgtgtgaattaaacctagaggtccagttgttctttcaactcgtggtgagggagttttagtgagttttttcgtgtacgcatacttcacatttttcttggttagttttgaattttggaattaaattcatgttttgcattttttgcattgttttataattgacatgtcctaaacgtttatgccaagtagtaaacgactcaaccaagtaagcaataggattttcattcatttcaacaacagaagcagaagctacatttttcggaaagactgtcatttaagacattttgactagtctacctttaacaaaactctttcccagatacactccatgtttcttaagaactaacttatcagactcaaagttaacggcaaagccattgttgcttagcaccattccagagatgagtctttttaagcatgtcaggtacatgcttcacgttttgcagagtaagctcacgtccccaagtcagcttcagaaccactttgcccttaccttccatcttagacatcaccgttttaaaaaattcaaaaaattctcaatccgtctaaagcgataaggtaaaagtggatttattgaattaagattgtaggagcacaaacactgaattgagaaacaagtacgaattttattaaataacgataatgataaattacaataacagtaattaagcacataaagtaaatcacggaggtaagatatgatatattttttcttaattcaataaatcggccgtaaatgctttttggacatcacgatttatgaatcccaggatacaaccgatcacaaactaatacccgagcacaaaagtattagactcaagcgaacttgatctacgatatactctgacaactactaaactaagaacttacttttaagtagcaagagagaagagagactttagaatttagagtgttttgtgtttgggagcttgagaaataattagaggctgggtctctttataacaccccaaaccgtacatcaatagcccatcctattgttttgtcaaaaaaaaaagcccatggagcccacttaaattcaagtgaagcaaatcaataatgttaaagggttttgttacgtgtattgttggttgcacatatatattggtatatctatctccctcttctccaagccgccaaataagaatcttaagaaagcaaatccaaagcatcaacacttgagttctagagtgtggtcgttaccagatcggagagagaagagagttcaaaggtgaaggaaaccgaaaagattcatgccaccgttcctaatctgagagtcaccgcgtcatcttaatcttaaccttaattaaaggtctgccactaccgttgttgttgagtatgttagtcactgtggaacgcttgaaaagaagaagaaaaaggaagagaaagagaagagatgaaggataatcgtgaggaagatgagagaaagcggagacgaaggacgatacgttgcggaggagaagagatcatcaccaccgcaaaggaaaggcattaacagatggagatttcttttgtgacagtaaggagaagtgagatgaagcagatcctaataaatcagaaaaggcggctaggctaaactagaagcatataaggaagaagataaagagaaaagagtagtttcaagttgaggttatacaaggatgtttcccgtcatactagaaagaatcagttgctaaataagacatctctacaaagatcacgtgccatgaagccatagcaactgacagagtttcaatcgggtttatattcgagaagttatacacgtttttttctggacaagtaactgccaaagctgtccaaatctatgctaagtagaaatccagaacagtgtgtgactactagttttgtgatacgttttccagatgtactagaaggaattatatcgatatcaagacgtttatggaaagatatttctttaaggaactcatagtagctgacaacttgtccatcggatttaagctctctctggaattgaccttagaagtttgcccataatcatctcaagttgcagaaacctagatatcagttctgaggcagcatcttcagaagaatgtgggagattcatgtgaaatctgatagagataaaactttgtgtagacgttcatgttgctactgtctaactattcaacggtgggattacattttgcacggttagttattgatgtatgtatatgtttccgagactgataattatggggtaaattgtgatggtttgtgttgttgttttgttaaacgagcttggtttgaagccaaaccttacaggagcttttaagactcagtgttttacttcatggttgatggagagccaagatggtgttcaatagtatgagcttggaagcaaactagtaacttgtctaaaggataaaggagaagagagttgttcttcatcttcaattaggctaaggtgagggtggtatttgcggatatgtagtaaactctttccttatatactttttgatagttgctgggtataggctcgagaattgtccttgttgatttatgtgaatttgtgtgaagctacgttgttagtaacataatatttgaaatgcattggtgacatgatttgatatatttaatatatattaaattacaaaacttcttatgtatatgagattataaaactaaaaagtatgaaaaatatatttaaggatgttggactgtaattgggctgacaggcccattacagatcattaaccgctgacaagcaatgagaggaaggatcgagctacggccgtggtcttccaaaaaatatgcttgagtagccaaggttaataggcttgagtagccaaatttaatataggcttgtgaagccataaagttaaatactaaaactaaaaacgaaaataaaatataatgttgtgagcaagacgcatgtttgtttgtttaattgttagacattctgaatctttgctaagtaatggttgttgattatatttggaacgtttttactgtatgtccagtaggcagagttgatcccctaactaagtaaacttgttttactcacccctttttcccattttctccaggttagtaagtatcaaaagttgcggttgaaatttgttcgttggtgaattttaaataaagaaaagttttggcaagaccggatgaataacacgctatcttagcctgtatggcgggacatgtgttatactctttatatagtagagggagataggattttgtgagaatattctcaggatatgcatgacatattttgagactatcctgagaatatagcatattctgagaatataaaatattttgataatatggaatattttgagaatatttccataagatttaactcaacaagcccaagaactcacaagcatgacggtccacaagcctgacagccctcgagctgacgacgggacgacacgacaacccgcaggccggttcggttcggtctggtttggtccaagtgtcccactttacacccttatttctcattcaatacaactccgtttttgacgcatgagtatactattttgtagtactctttaacagctttccaatacactaatgacccgataattccgttcaaccctttggtcggagtttgaccagaaagtcaccggaaaagttttgtgtcaaaaaagttataacatatttcactagaatccaagtgagctttggcttcacccctaaatatctagttatttaggtaagtaacaccttgttaattatatccagtataattcttggttgtggatgacatctaatgtcttatccaaccctatatctttaagctcaaaaccgttttaatagtttagtcaaataaaccaattttatttcacatggtaactgttaccatatgcctcactctcaaacaattgcagaccactgctttggcagacccgctaaacaacaatttaaattttaagagttgataaaattgggaagacatcaaatacttggtattagctgaggaattaattttataactcaattttatatttaaaatttatatccaatataaataaaatatataatacatatctgatatgtaattcattaaagtataaaatttttaattaatcttaatcaaattaaattattagttttaaaaaaaattgatcttaattaatttttaataattctaatcatattaaaatatattataatcgagttaatcctaatcaaattaggatttatcaaattattattatcacaagaatgattatgatcaaatcaaaatctttacacaaatattacggtaattaatttccctcttctcaagaaagtaaatcacaaaccaaaaatattctataatatttatggtaagaatcttttaaataaggaacaatttcaaatcaacaaaaaatctcattattactcgtaacatgatatatatattatattaaatatttgattataattactttaatccggataaatatggaaacacatatacgatatatacattgaatcctgacattatatttaaatatctatgtataatgattaatggaaatttcacgtgatcaaggtaaatgtctaatcaaacttcataaacacgtatatctttatatattatacctttattaatacttaacattaaagcatatctaatttatattatataaaagttgaagctatttgtttttaaagccatccacataggatttaaaacgaacaatcggaagctaacacatcaataattaacatatttaatatctaattaattaacatttttgaaaataaccaattaggagctgccacatcaataattaacatatttagcatctagttaattaatatttttaaaaatagtaattattttttattttaaaattcaaaataagaaaggaaaataacaaatattaaatttaaacatataaataaagcaagttatataattataattatataatattaaacccaaccttataggattttatacaactaatccaacattttaatataatttaaagaaatgtaacaaggacgtggtttgatggtggtgtttttaatcgtatcaattttaatcaagttctcgaagatataaattgaggtctttcagtctgggaagcttgaaggtgaagaggatctaaactacatcaaaagagagaagtgatatagttaagtactaatttagaagctaaaacattttcttagaataatagaaaacaaaacagagtacatcttgacgagattaaaaaatgcttatactaacaaaaaaaaaagagattttcgaagaaaaaatatggataatgtgaaaagtttagaaggtatgacacatattgattagacaaaatcataagaggatggaaagagacaatgtaagaaaaaattgaaacaaataaaacgagttcttgcaaaaagataggaatactattagctctctgtaaaaaagttgtgaagacagaaattcatatacatattgaaaaaaatatgtgaaaaatatgagttgttaaaaaaaagtatagataagcttaggattatacttctacataatatcttatttttagaagagctatactaactaatgcagcgaagataaacgaaaagatagtaaatttgcgggtaccaaaattagaatcgtcgaatctattttccatacaacaatttatttcatacgtaaaaaacgtcgttaacctaaatatctaaagctaaagagagagtcatgaaccaaaaaaatgttcttttgataaatgttgtaaagaatttttctagttatgggggaaatcaaatctcaaagagagaaaaatatatctttaaaaacagtctccttttttataattttacaactttttttttgtagattactaattaattgtataattttcttaattataaaagtatatatagataacaatgtaaaacccaaaactttattttctgctttctgaatcaaatcagatttcaaagagagaaacgacgataatgtccaatcttccgtcagatttgttagaggaacgatggctcatgcaaggttcttgatgaaagcggcaatatcgacaatgacttgcttggtaaaagtgtgtctttgaagggtaatacttaatggtgtgctttggatatagaacacataggctataaattgttactcagttttgtttttacagcaagaaagatttagacgtgtcttctgccaaatcgaatgacggtcgcgtggttctatcagttcttagagaaaacaaactctcacttctagatatgagttttgttacattaaagattgatatatgggtgaccaataagttttatactgtagttgcaacgttgcagtggaccaaatactttacaatggatacacccattgacattaagcttcctctgtattttgtcagttttgcattcgacgaggaacaaaaaaggctttgtattgtgatcgaattcttaaggaaatggtatacattcttggagatatcgagaggatgataagtatatcaaattctttaattatgttccaagtttgattcatatccagcaagatacaagctagaaagaaaactacgaaactagagtcagagaaaaataaggaagtgatttcttgtggttccacattcttttcttttttgggtatacaatacaatttctttaatctttataacattaaatatattaattaattgattgactgttacaatgaattgatatattatattactttgattcctttcttctttgcattacattcaatttttatttttatttttggttttaacattttttgttaaattttgtcaactctaagactgcaagtcttacgtaaataacgcaacatctttataggtaatttacgtaaataatttatgaaagagtaatttatagtataatatccgaagactgttaaggctcacgttgaaatggccaaagatgttgattcatttcttgcttatccatgaggccgttacaccttcgagatgatgatgaagtagataaaggagagggaaaatgaacaattagctacaacgtgttttgtcgttcaggggttgttgtacgttttgcaattggttgtcttacaagcagctccgtcaattcaagaaggctcagtaatagacgagactatcgagtctgattctgaagaagcggaagacgatgttgaagagggtcctcgagagtccgtcgctttcaagcttgggaatgctaaggacttggatgcaaattgttcggtaaaacatttatcaattatctttgatatctgttaatacaataatagtggataagtatcttgttaattgctaacatttttgccatgtagttatccgtggctgatttgattatcttcgttttctgggacatgttcgtgttgctacgattatttgtcctgatatgttgatggatccgttggaagatttgtcatagtctgatgatgaggaagatgagggtgtcgataatattcttatgctggctggtcagggtctaattttcaagaatgatatgtttggtggtggatgcttcccttcttagatgcaattgccatcttaaaaacaaaagcggggtggtaagtctaatattagtcggaataggaaatctggcaaacctataaagaacaccggtgggatcaggagcaaacctcaaagacccatacctgaggaaggcagtacttcagagtttttgtcgatcgacgctatttcccgtttgttggacgagaagcttgatgctcagaaaaattaatcatcgctggtttgattgattggtttcgcaaaaacactgttattgaaagtgatcgagcgaaagctcctgctagtgggattagtcggcccgagaagtctaccccggttggtaatgttcgagtatccaattctgaagatattggttgtaatgatggcaatgatgagtttggttttgattctctccgccgtccttgtcccaatgttcggtttaacagtcgtgatgcgaatgctaatgtcgattataatgttgatgagattttatcgttttacactgacaaggtttcaagtggtgttggtggctccgagtcggaggtaaatttattgtttttattagcagttaactttgttgtagttgtgaaaatttttgtctcatgttttttacctttacagcgggacggagttgttccaatggaggaaggtaatctcactgagggtgacgtcgttaataaccaacaggtgggttgcttgttagtcgaacaaatttatattttagtaagtatattatttagaatgcaaatcttgtgttagcgtggcagctgaaactataagggttttgtacctttttcatcaatatacattgtgttatattgtttctaggccggtaacgatgctggcgttgacgttgccccgactacagaagctgccactgaagataactcctgggttagttgttaagttctcctctagttaacagtgatttaaacctctaatcttttgtctgtgggtttaatcctctcttcgtggaccccgcatgcgcaattaatattgtttcttggttctagcgcgaggacaacacccccattgatgtggatcctatagatcatgcgggtatgatccatgattcgcaggtgggttgcttgttattagaactaatttataatttagtaagtatattatttagcatgcaaatcttgtgttagcgtggcagctgaaacgataaggggtttgtacctttttcatcaatatccattgtgttatattgtttgtaggcctgtaacgatgctgacgttaacgttgccccgactacagaagccgccactggagataacttcggggttagttgttaagttctcatctatttaacagtgatttaaacctctaatcttttgttcgtgggtttaatcctctctttgtggcccccgcatacgcaattaatattgtttcttggttttagcgcgaggacaacgcccccattaatgaggatcctatagttcatgcgggtatgatccatgattcgcaggtgatgtgcaataaaataaatctgttaattattacaatagctgacatttaattattttgttaacttctacataaaaccattaccctaacttatttgtgatttggtactgtagggcccgaactctgtagatgtagatgccgccccacttctgggcgatgaagaaaacacagaggttgatgtagatgccgaaacccctatgggtgatgaaggaaacgcagaggttagtagttatgtgtgtagtgcactaatttatgttgtaaccaccttttcaattccctcattattcccccttggaatatttaaatttgtaaagtagttggggtaggatcctaaaaatgactcagcaaaagaatagcgccctcccattggtgttggtgaccaggtttggttttaccatactcctacattttattatcttaccaaagataactcttaggttagatgttaagttttttagcgaactatcttttgtcttaacgaccagtttgaacacttactctattttgatctgttaactaactgtttttattggttcagcgtgaggacatgcgctcattgatcaagattctccatctcaatccggcctgttacatgattcgcaggtgaggtagtaggtaacatttgggattttatttcgataagtgttataatagctgttaagttgttagtgagtttacacttatattacccacctaacgcaataatgaattatcgagatgaaagttggttagtaaatgtaacgtcgctgtatgtgtcttgtagggaccggtcaatgttcctgcacgaactgacagcactctggatggtgaagatatttcagaggttagtagtgaggttggatattgcgctaactattgttccaccttttcatatccattcaatctgtaatctttcatatcgaggagaccgtggatattcattaatgcgggtttgtgtctgtagtgctgctgaaaaaggcaattccgaggttagaagtttatgtacttaatgatctaagtattctgttacagtataatattcgcctgtagtaatcgagtcaacttgttgcatagcagagtaactatgcttccgtcaaagtcactcacacccctgcatctcttgttaatgaggttagttaataatcttttctgtatatcttattacctttaatttacccttgattactctatgctttaagatttagaatcgaatgtttgattaatttgaggattttcacttttgtctaggttggcgagattgtttcagtgaatgaatccatactatctccaaaggaatccaccattaacgaagaggttagcaattatcccagtaacgaagtcattatcatcttactgtagttatttgtgttttttttacagcgtcttaccatatgttaatttgcttatagagtcagattcaatgtgctcagccgacaagtggagatggggtccatctttccaatgttgttgaggaacgccaggtaatatggctatattatattagctcgaaaggacatcgtctttcttttgtattataaattatccgttaactctttcatctcttcgctgcgaaggtgtgtcctgtgtcggatgatggcaaggcgtctgcggagaatctggataacgtggttagcagctaaattatcccccatatgatatagtttctcaggcttttatttagatccgattcttgactccttgtaaagattaagtatgggacgataacgattttaggtgctcaacgaaactctctcaaaactgttgcggttgtttgaaatacttttttttaatcattatgagttagttattctactctattgatttttccatattagccaacgctaattttatttctaaaggttaacatttattttaaactgatatattaaactgtatgggcgataacattatacgttgttgttatcttaaaacttgtgttcatttaaaaaactttgcaataggctgccttaccctctgatggcggggttgtattacccccgagggtgattctattgatttattaggaacaaatgaactggttactaagtcaacaagtacctgttgattattcccttacttctttcactgttattagatactacgacatttcaacaggctgtcgccggtaatgaggattctcccagggaaggggttgaaaccccctacaagtttaatatgcaggttaacgaataacctcgtttttaattgataaattatatcttttattatttgctaacgactttgtatacctgtataaataggatgttggcagaggcgctccttctgtggtttcaacagtttgcgaggtatgattttttataagttagtgttctagttcctaataatttatttatcctataaacgtcggattacctaataattttggcgtttttgttgcacatgttaattggtgatcataggattctgacgaggtagtcactaacctgttatccatttaatgttggtgttatgttttacaatttatttaacaatgtttacccattttcaggattttacgaccccccccctcccccttcaaaagctgcaaagggctccctccaggtaaatttgtttgtttatttggaacttaaaataggtgtttgccctctttatttgttaacctattgcgattcaggatgatgtcaatgctactatcccgaacgggatatgtgggagaagaagtaaacggctatgaaccctttctagcaagttagatggtcgtttccagtatgacaagaaaaccaaggtttagttggtcatccatcccttgttctcaaccaagcaaacatttttgtggatcccgaggaacgttttcaaaactctatgaagaaactcaaagcgataaggtttgtgttatctgttataaataattgtagctactaactgatttccattttctctaggtgatttataattgcttatgtatttgtatatggtaacagttctattagcatttgtggcggtgttgcactgtctaacaaagatatcttggatttaattgaccggaaaaaaactcttacaagcaaggtagctgatctctctaaaaatcctaatagttatttagttatagtcgttgccttaattttttatttttttcaatccctaaggtaatggatgccctcatcaaatttagccgtcatttgttgagtaccgatgatgctgatggagagaaacttcgggttgaagtccttgattccaagtttgtttccttattctgctggtagcacctaaattttctcgctgcaactccaaaccggacttccaattcccaccagcttaagccggacttccgactcaaacatccaacgtcgcagagattctgttattcaggcagagcttaagccactagcagtaatggtgccattccttttaaacgatgttctttcaactctaatatgagtaactttctgctggctccattttttgtagatggccaattgacatcccccaggtagcttcacttgatactagaattttttctatattccttatccatactcatgctacaggcggtataactgaatgtattgaatttgatattggcggtcttcaaagtgaagtgaagaagttggtatcggccttaattctcgctggtggttactaactaacttttatgttaccctaatactttaccatttgtgttttgtttccttaccctcttcttttcacctcctctaataacgttgaccttcgttgtgttctcattgttgcttgtagtatccgtgtttattctgggatatctatgccaaccgtcatttaacgttttccagttgtttgatattatctcgttagcgataagggtttagaagtaagcatattgtctcgaatagttattaccattactaataatagatatgggattaattaaaattatattgtattacgaatccacgaaattaccttggtatcgggtataaagctacaacaattctgttgactaacaaaaattaacttatccgaaatctattattaatggataagagattatctctgtatatttgttatccaggtatcttttttgtattcattgtctatcactacctgttagttaatcactggttttaagcctattattttttgtccctaacatgtctaatatatactattgtatcgcgataatatgattcttgtcaaaacataattacacaacgatatcgttatatgtatagttacccgttaacagattattatgataattggttactttttccaagatatttgtttttgtttaagatgtgttaatttactacttctagttggtaagaccaacatcacgatgtcaaattatctggaaacaatgaaacccaacgttttgttaactcgcgatagtaatggtataaccgtgaatatcgtctgtgttatcgcattttcgaacccaatggcgcggtagccgttaatattatactgtccatctggtagccgttaatattatagtgttttgagcatttagtacatatgtgtcagataactgacactaccttctcgcgttagagttatcgtgtttcgatgtgttatagtattactgaatgcatcgtttttatcttaataaagcgatattaatgttattataaacaagtgaatccctttagtaagataaaaacgggataatcattcatttgataacccgatatctgattgtcttcaaatatcgggatatgagcctaactgatatcgcgatgtcgcgatatttgattgtcttcgagccatcgttccttcatttagggacataaacccgaagtagataatgaacccgtctcactctcactccttcatttagctattcttcgacccccccccaaattgaaatctaaagaaccttcaaatcggatccaacgatcttcgatcttcttgttaagtatgagtaatcaatcatctagttcttctggatctacgggacctcagggtagaggaaaagttgttggggtgccaaaaagatgttggtgccgggaaggagtcatggcactcatttcaaaatcggatctgaatccttgccagagatactatcgctgtgggtttgctgcaaaacatagggtaatgttactcatcaagttcacctatatcatagatttattcaatcttcatgtttagcttgttcttaattatgtagattaatgttcatatgtagctaaggaacgatgaacacacttttaaatgggttgataaagctttgctcaatgagatcgaaacattgacagacaaaacacgtgaatttgagcaagagttgaaagagcatagaacagagaggatggtgtttgaaagaatggtttcggagaaactcgaaatcaagatcgagaatgaggttcttgagaaagttgaagaagctttgtctgaagcgaaagcaagcagtattgaataaatgcgatacttttgtaactactaactcgaataatgttcgtttcttaattaaatgttttttggtctaaataaaaatgaagattgtcattggtattagaataaatccgaagtcggctaaaaaaactatgattattatactctaattactaagcaggaccatgagatacaaaatataacaacgtgctcaatatagctgctaacaatggcaatatcgaaacgttaccagataacaagacgaggaatcggtaatataatatcacagcaaaacacgttaacgctaacacgagaaggtagtgtcatttatctgacacacatggataaaatggtcaaaacactataatattaacgactaacacgtcgttatattctcactgtaccattaacgactaacacgaccttgaattttgtaatgcgataacatagacgatgtacacagttattaaaatatcgttattaacattatctttatcaacattaccacttccaggatgttgtgtatgtgatttgctaagctcggctaagtagtttatcaccacgtcaagtttgacaaacgataagaaaatttttagggtgacacactttttaacgagtaataaacaagtaggttgacacacttactaaacaggaccgtgagatacaaaatgtaacaacgtgcttaatatagctgctaccaatgacaatatcgatatgttaccggataataagacgatagattcggtaatataaatcacgatggaaacacgaaaacgttaacgcgagaaggtattgtcagttatctgacacatattaacgactaacacgctttttggattcggtaatgcgataacacagacaatatacagagttataaaaatatcgttactaacattatctttatcaacattaacacttccagggtgttgtttatgtggtttgcttagatcggtaagtagtttatcacgacgtcgagtttggcaaatgacaagataatttgtaggttgacatactaattaacgagtaataaacaaggcataatatttgaaataacgaaagttggatgggttccgatatatatacatttgggaacagatgtcgtacgtatgtacattgaaaattttcttatctcattggttccttatttatttcacatggccaggtcagttcctgttaatcctggcaacctccatccttcaactttgctcgccaaaaaagttcttatcttcttcgttatggttcctgcattcaggatatgtattttaatatcaagtaattgatatgataatccgtaactcttttattaccgtgattggtccattgcaggttgccctgttatgacctaacgacttgcatcgtgagcatctttttcttgatgttctctacaaatgtgtcagaagtttataacctaataagtttagcatataagaattatattagcggttacaagctttagttaagctagttaccttgaactcgcctctggagaatagtcttcgtttcctcgggtgacctggtggtctccaagcatacggtggagctagtttaccccctcccacatcatttggtgaaggagtccgcgtctccgtgtctggaaccggcagcgcttgatatgacaatctagttgaggggtggtgtgatggattccaaccatcgtgtccactaagagtccttcctgtattgccgcggctatggcatgagtgcaaggaatcgttagcagctgaaactccctacaagtacatgttcgttcccacagattaacagcaaatgctgcacctcttctctctggaacttcatagagcccatccccaatttttattacagcacatcctgctcccttctttgtaattttcgatcaccatgtcgtgtacctttggcggtaggatattctcctcaaactgggctgcttgcctccggagtgcaaaccatgtgactagagtagttcgaatggactctaatatcaagattaccggataatctcgtgccataattaacacattgtttagtcatgtagttatacctgtttccaacaaaatgtaccagataatgtttaagttacctttcgcataaatagaggagtgtctgtcggacataaacactaactccggatcatctggtattgctgccgtcagctttgtcatgaaccaggtccaagcttcgtcattctctctgtttacaatcccaaatgcaatgggaaacacttgaaaatttgcgtcttgcgcactagctgctattaagcatcctccagagcgtcctcgtaggtggttccatctattactatcaccttcctcatgtaaggataccccacaacacatgcatgaagcacaaaaaacaagtacttgaacctctccactccagtattatccttttctatctccatggcgacaaaggagttgggatttgtctctaaaagcttcttgaagtagggttggattagtgtgtaactccccatagctgacctcattgcattgtccatagctatttctcttgccctccacgccttccaataatagacgttgaggctgaactcttgccgtaacatccttctcagcacattaggtctaggtccccggcctactccaatatatttcgttctcatcaacttccctataacagccgttgaagcttgcttatggaagtctcctctagcatctacgctacatgtgtgggttgaagttgtgctcctaacctcgaaacgatcgctatccggtaactcgccaaggacatgtatcgctgacacagacagccgccaccacattagatgaaatggaacttccgatgaatcgcatgaattgctagtttcgttgcacaatcttctttgtttttaccttcctcccctgggtcgtcgaaataagatggggcatctctgtcatacaagactgttgcaaccggtgtatccttcacgatcattgcatttctctgtaactccgtaacccttggattatttgaacttgatccaatctccttagagggtaacacgtcttctatcattattgttttccctttatataccattgtgatgggttgaggctccataacgagtgggccgtcattatcagaataaacgtgtgccagtgtttcctcacttgtgagtaaatattggaaggatggttatcgactaacataacactaggttgattagcagataatattgtatgtattaggtaacccacctacgatcgataaggtcatgttgttcgacgattcagtatcatccataaggtcttcgctactgaaagaagcgctcgtggaaattgtggttggagtcccaaatgtcgaatcactcgaagagactgcaactatatgtggtccaacagattgttccactgatcttgcaaggaacaaactcaaactttcacttggtcgtacgtttggctgttcgccacttccgaaatgaagggctctcgctgttttctctttctcggaaacgttttttttctattgtttgagttcctcctagggtcatttgtgttgcacacatttcacgccgcatctcatcttgttgattttttcaccacagctcgaataaccgatctctttcaatatctccgtcatcaataaccttctcttttcctttcaagcttgcaattgcctctgattgtatcaccgtacttggtgtcccggttgttccagctgaaatatccatggtgtctcgtattataacccctgcattcgtgttgtgttggtccttgcctttgcgtatatccagctcggtgtcactccccatgttttgcatatcgtctctgttacctataatacataatattctctaataagctggtatcagctaacctttctgaacacaaggtattatattctcggaaaaaggaaaaatattcaatatatgttttgctgataacataactaaaatcgtttaagtttagagttatcaggctcacctgaaaggttccaaagcagcattcttgttaaagcggtcccccacacagctcttccagtatttatccgctatttccttagaactcaatccgcttagatcaaagttactccgataactattaacgtttcgaacatttccaccccgatttatccttacgcgtagatgcacttcatctagatccgcccttatagccatgaacagagtcatgtcttcgtcgtctagtatgtcgattgggttgcacgtttccaatcaggccccatcatccactgcggccactggtacgtcagctcgatatcgtcgtcaggccccagagctaaccttcttttaccgccataaccactttgacaaacccgtctttctcgctcagtcgcactcccagtgcaaagccatccacatgcgaaacatgttcgaaatatccgttttcatccctcttccattccccaggaactaatctcaccacgaatgccattgttatctgcaggttttccgtaaataacaattttgttagcgttctcataattataacaatagtctgacaaaccctaaagtaaagaactttccaaatgataactttaaagtacaaaatactcagatctttaacttttacctttcagatttcaattctctgtgtttagctccttcttgcatttaagatgtcggaagctaaagaatttagtatgatagtttttcggttgctaacagagtgaaaatatcaccctaataaatagcatagcatgtgtaagtgatatttccgcaagcccgtaaatatcagtaataatttcccatttctttgatgtttccaatgccggcacatagtatcttccaatataacctcgatatcttgagcattaaatggtgaggcagatagactactaactgttatcgttttttcggttttgtaggggtattaacgggataaataaaagcgccgaagagagagggctaaatatgattttattatgcatggtttcttaatttttggatcgtccgagcatagactttaatatcacctttaaaataaagtctatcgttacacatacttataaaatatatgaatataatatcatcaagtctcaataaatttattaatatgtcatcttagtcacaatattaggagtgcacattttagtttcatgttaaaaatgattcgttctaacaatctaactagagtttagcttattatttataatattttaagaagtgacaacaaatatatatatatataatttataatgtatataatttatacattgagaaacgaaaatacaaaaataaatggaagaaatataataaaataatatcggtgtatgggatgtttaagggatataagagatctattaagatttaaaatactattaatttgatcttattatcctacaataagacaaaatttctaataataatacataacgaaagataaagataatttttcttctcagagaatggataacatatattgacttgaactaacatgtgaaacctacaacaatgatttttttataatgttaagaaaagcatatcaatggttgtagtctagatctttaaaaaaaacatttagttttagcgagctgtgaggaaactaggtatttgcagttgtttaatcaaaatggttatctaaatcctaaactatattaaaacaattaataaaaataaaccttcgcgtagcggaggttaataacctagtatataccaaaacatgttgccgtgtcattgtaaaaatttactcaataccataatcaaaatatgacccttaacaaaccgtatatccaataaacataaacgaatttcctctaagtgaattatataattttattttaccatgtttaacgaattaaatttcacaaatttcaacatgataaaccataaaaattatttatctatatcataatatagattaaattagattcatattcagtattaaacaagtaggctctgctacaattgaagaaatttgtaccggtttataacgatttataaaaactaataacgaattctatagccagaaaccgtgtaaataaataattaaatctagatcttagggtttaaatattcctggatattctgcagcgaaaagatgaaccatattaattcgaggttgttttagcactccaagtgttgtgtctttaccggtatccacacgcacaaaatgtgaatcagatctgtaatgctaattcctttgagatcttatctcaaaactttagacaaacttttgtctcttgtattttagggttcttgtgatcaaaagtatatctcactaacgttgctaatatatcatatatatagctaaacgtttaaccctaactaattatgtatcatatataacatatatagtataataaacattttattatatatgcacaaatacaaatatattatatattatattattattaatccaacattaatccaatttgcttaggtgtgtgatcatgtaggtttgtataatattagcaattagttctgactcatatattataagcggtctctagcaaaacattataaccacctaatattatacaaatgtccaacctcgacattacaactttaactaaagtaaaattcaactgatgtcaggacattaccaacattcttatctcgggttctcgcctgagcaagcatggcttcgctatcgagatcgatgcagataagctt

SEQ ID NO: 1338 - DNA, 108879 bp, Arabidopsis thaliana
aagcttattgtcttgttagatttcctgcatttcaccaaccaattacacgttaaagaagattaaaccagatcacatatgagaattaagattctctaccttgcaagaatccccaccgtcgtacagaaacttcacgttccctcgccctaccaactcaaccggagaactgatagtgagatatacaaacgtaaagagagatatccttttccaacagagaacaaaaacaattgatcgagtaatctacaaaaggaatgtataaaacagagagaagtaaatcagaaaaaattgaggttcaggtaatttaactacaatcgagtaattattgctgccttttacgttcgttatgaataacgttttgtcacttttaaaaaaaacagtaatcaacatatctagtaaaatcaaactatttatacataaacagaaaatcaaaacagagagaaaagcaatacattggttacatgttcctctcaaaaaagtttcagattttatagtgatttggataactggaatcaccttatgagaggaggaggaaaaccagcggcggtggaaagttgaaatgaatgaattgtgaagatgaaacgggaatttggtgttgacggatcatgtttggttgtcaagcaggaaggctaatagtaacagtaattttttgatggtgatttggataaagtgaatggaaaatgattgtgataattgattgtgtgatatgtatacatgatgatttgctgaaactgatgagagtaggaatttagttaatttggggatcgtggaattcagagaggagatcatgagattttttattgacttgaagaaaactgaattagagaacaaaggtggaggcttttcgtagaaaaaatattttgtttgaggggagaggacgttaagaattttagatcgtggggaaaaagattaacagttgaaaagtaataatgtttttcttttctcgccaatgtgttttgtttttttaatatttaatttacaaaagtaaaagtaaaagaattgagacttaaaacacgtgtaagatagatagagttgcagttattgttaaagtgactgttgatttagtataattagatataagcggcaaatttgagacataaaatgtgttggagtaagtttgaagataaagacttaagttataagttatttaaatataggattagattaaatcttaaggagagatcttaggagttaagttaggagttatctaaccataatcctattgtcattttgttttaaatctctatatatatgagtcccaaagttgtggtgaaccatatgagttttagagagattaagactttgagattgtttaggtttgagttatttcctaaacttaataagagagtaattcttatatatctttgagttcttaatcttctttgaaactagatttggtatcagagcatccaggttttcgatcaaagcaaaggattgaaaacatgagtgagattattgcagtaaacaacaaatcaaaagatggaggaggatcattgtctattcaatgtccgatgttgaataacacaaactatacggtatggtgtatgaggatggaagctgcactacgagtgcataaagtctggggaacaatcgatcctggattagaggacgaagagaaaaacgacctagcccgagcccttctcttccaatctattccggagtcacttattcttcaagtcggaaaactgaagacttcaaaggcagtatgggataagattcaatctaggaatcttggagcagaacgagtcaaagaagcaaagctacaaactcttatggcagagtttgacaaactcaagatgaaggacaatgaaactattgatgaatttgcagggagactttcagaaatttcaacaaaatcagcatctttgggagaagatattgaagaaacaaaagttgttaagaaatttttgaaaagcctaccaagaaagaagtatattcatatagttgcagcccttaagcaagttctagacctcaagaacacaacattcgaagacatagtagggagaataaagacctatgaggacagagtatgggatgacgatgattcactagaagaccaaggtaaattaatgtatgcagattcgggttctcattacatgtatcaagaaggaggcagaggaagaggacaaatccgtggtcggggtagaggcagaggaagagttggttataagcagagagatcactctaaggttacttgttatcgttgtgataaacaaggccattatgcctctaattgtccagaccgactattgaagttaatcaagctccaagaaaggcaacaagaggctgaagacgataatgatgatgaagcggagtctcttatgatgcatgaagtagtgtatctcaacgagggaaacatgaatccagagatttatgaagcatgttctgacaaagcttggtatttagacaatggtgctagtaatcatatgactgggaatcgtgattggttctacaaacttgatgagatggtcactggaaaggttaagttcggagatgattcacgaattgacataagaggcaaaggatcgatattgtttttgaccaaaaatggagaaccaaagacactagcaaatgtctattacatacccgatctcaaaagcaacatcataagcttgggacaagctactgaagctggctgcgacgtgagactaaaggacaactatctgacattacatgatcgtgatggtaacctgttggtgaaagcaacaagatcgaggaacagactgtacaaagtggagctaaaagtcgaaaacactaagtgtttacaacttgcggcacttaatgactcaacaaagtggcatgctcgattaggtcacattaatcttgagaccataaaggcaatggtaacaaaagaatttgtgattggaatacctagtgccccaaaggagaaggagatttgtgcttcatgtatgcttgggaagcaagcgagacaagtttttccgaaagctactacttatcgtgcttctcagattctagaactcatccatggagacttgtgtggacccatttcaccacctacagctgcaaagagaaggtacatactagttctaattgatgatcactcacgcttcatgtggtcatttcttttaaaggagaagagtgaagcattcgaaaaattcaagacttttaaagcaacagttgagcaagaaaccggagaaaaaatcaaaacactaagaacagatagaggaggcgagttcctatctcaagaatttcagacattttgtgaagaaaaaggaatcattaggcacctcaccgcgccttacactccttagcaaaatggagtagttgagagacgaaacagaaccttgttgggaatggctagaagcatcatgaaacacatgagtgttccaaattacttgtggggagaagcgataagacatgcaacatatctcattaacagagtgggaacaagagctcttatcaaccaaacgccctatgaagctctcaagaaaaggaagccaaatgttgaacacttacgcgtgtttggttgtgtgagctatgccaaagttgaattcccacacctaagaaagcttgatgacaggtcgaggattctagtctatctcggaacagaaaccggctccaaggcttacagattactagatccaaccacgcggaaaatcatagtaagcagggatgtagtgtttgatgagaataaaagctggaagtgggctaactccgaattgattgaaagtcagaaagaaccaggaatgtttactcttgctcaaacagagtttcacaataacgaagaagttgagaacgaaatctcagaagaaacagaagaaaatgaagcagaggactcaactaatgaagacgcagaagacggtcttgatgaaccaagtgttcctgaacccaatcacagtgatgatgtaccagtctttacacgctcaggaagacaggtcataaaacctgcacacctaaatgattatgtgttgttggctgaaattgagggagaacgacttctgcttctgattaatgatgaaccctgggattttaaggaagcaaataaatacagagaatggcgtgatgcgtgtgatgatgagatcaagtcaataataaaaaacagaacatggagcttagtctctcttcccgtcggtatcaaaccaatagggctgaagtgggtgttcaagataaagagaaactctgatgagaacataactaaacacaaagcaagactcgttgcaaagggttatgtgaagaaacatggtgtagactttgatgaggtgttcgctccagtggctcgcattgagacagttcgattcatcatctctcttgctgcatctaatgggtgggaagtgcatcatctagacgtcaagactgcattcctacatggtgaattaaaggagaatgtttacgtcaaccaaacggagggctttgtgacaaagggaagtgaagagaaggtctacaagctgcataaggctctctatggtttgcgccaagctccacgtgcatggaacattaagctcaatgagattcttaagaagttgttattcgaaaggtgctctaaagaaccttctctgtatcggaaacaagagggtaagcatcttcttatagttgcagtctatgtggatgatctacttgtcacaggttctagtccaaaacagatagatgacttcaagaaaggaatgtcaaagaactttgaaatgagcgatttgggaaggctcacatattatcttggcattgaggtcacacaagaagaagacgagatcatcttaaaacaagaaagatatgctaaaaagatccttgaaaaagctggaatgaatgagtgtaaatcaattcttgttcctatgatttctggtctagaactatcaaaagcacttgatgagaagagcattgatggacaacaatatcggagaagtattggttgcctaaggtacttactacacacaaggccagatctctcttactccgttggtgtcttaagcaggtatatgcaagatcccagagaatctcacggagccgccttgaagcaagtcatgaggtaccttcagggaactacgggttacggtcttgtatttaagaaaagcgataagactggattagttggttacagtgacgctagccatagtgtagacgcggacgatggtaagagtaccggagggcatgtgttttacctaaatgagtgtcctattagttggtgctcacagaaacaacaagttgtagctctctcatcttgtgaagccgagtttatggcagctagaggcagccaagcaagccatttggcttcaagacctgctcgctgaagttattggaacaacatgtgagagagttacattacgagttgacaacaaatccgcgattgcactcacaaagaacccagttttccatggaagaagcaagcacattcatcgcaagtaccatttcataagagagtgtgtagagaatggccaagtctcagtagaacatgttcccggagtcaagcaaagagcggatatactaaccaaggcactcgcgaagatcaagttcaaggagatgagagatctcattggagttcaagacttgtcaagtgaagacttcaagcttaaaggagtgaatgttggagtaagcttgaagataaagacttaagttataagttatttaaatataggattagactaaatcttaaggagagatcttaggagttaagttaggagttatctaaccctaatcctattgttatttggttttaaatctctatatatatgagtcccaaagttgtggtgaaccatatgagttttagagagattaagactttgagattgtttaggtttgagttatttcctaaacttaataaaagagtaattcttatatatctttgagttcttaatcttctttgaaactagaaaatggatgtcacacatttccaactaaaacacaacgaagtttacacaagtttggagaaaaaataaacaaaacattgacacgagtcacacgacaaaccttttttttttttgtcaacaaacacgacaaagcttaaaccagattttaacttactagactaaaccatatggtatagaaaccttaattcagagccaaaatttagatttagagtaaaaaaacattctaaacttagttaaattttaaatctaaagtcagaccctaaaagtaattaaaatatagagtcaaaatctatattagggacttagtagattccactaagtaatgtcttaattttggaatatatctagaagaagacttagtggaatcctctacaaacacaagaaatgacaatgaaaaagttttcaccccttttattaccttcgttgatgatgtttgctctcatccttatgcctatcatatttatttgtttatgtatgcattgtcaaaaaaaattgaacttttcagatttaaacttctcgtgaaaaatgtgaattttattaccagatgtgaaatcacttcaagaaaagcattttcttgcaattaagatttaaaagataaaaaattatattctgttaaaatgtgttcagttatgaaccaaatatgagatcatggacttgaatggtatgaaactttttcaggttttcatgtttttaaaaatttcattccaaaaaattattttattgatcccacattcttttcgtataaggccctgtttgtttgatcatttggcatttacatccacatgatccatttacatgatccatttggatgatgcatttgaatgatgtttgtttgattatttagtattttatctaaatgatgcatttaaatgaatatttttttgtttgatcattttgtaattcatctacattctcattctaataaaaatgactaaaatacccatgttataattttaacaaatgacaaatatttaacatcattaccaaatataattttaatgaagaaatgattttacggttttggcggaaaaaatatgattttacggttttggcgaaaactatgattttgtggttttggcgagaaaatatgattttacgcttttggcgggaaaatatgataaatacggttttgacagaaaaatatgattttaacgttttggcgggaaaacatgattttgtggttttgacgggaaaatacaattttacggttttggcgggaaaatacgattttacggttttggcgggaaaatacgattttacggttttggtgggaaaatacgattttacggttttggtgggaaaatacgattttacggttttgacgggaaaatacgattgtatggttttggcggaaaaatacgattttgtgattttgacgggaaaatatgattttacggttttagcggaaaaatatgattttgcggttttgtgggaaaatatgattttaacgttttgacaggaaaatatgattttgcggttttggcggaaaaatatgattttgcgactttggaggaaaatatgattttacgattttggcgggaaaaacgaatttataattttgacgtaaaataatagtcagtgatttcacaatttttagagttttttggtataatatgtaatttaaaaaaaaaaaaaaaatctattaaaaattaacattattaaaagagggtatatttgtcatttgttttttggactaaatcatcttcatccaaatggttctaccaaatccatccaaatgagtttcacatattagtctaaatttacaaagtcattcagatgaaacatccaaatgatctgttaatttgtgaaaaacaaacatcatttttcatcttcatccagatgatccatttggatggagaaacaaacaggacctaactagattatacaaagtctcatttgtcaactaactcatagttttttttggttatttatttgttttataatcctgtttcaagtttattttgtttactaggtacctcgttttagtgattctactaattcacaatttatttatcatgttattttgttgtttagctttcatgcaatataagccctatatcaaaccatgtttggaggggtgtaagagccaatcataatacatcaaaaagtgcatgtctatggtgcatcccaaaggagattgtctaggagatcaatatggcacttcttgttgttgtataggcggtttgatgtctcaaaatgagtctccgatatctaatcttcctaattatcaatcaattccttatttatatgtaatctcaaataaaatatggataaaatatttactcgaatatatgtaagctgtcttattacatcttcgtactagttctctttagtcgcatcaaagtaaatgaacccaacaaaaaccacaagatagacgtttattcatgtaagcgatatagaacaaataactaatttattttatttaaaaaaatttattgtaaaaaatacactacacacattgataaataatttaaaaaaaggaaaaaaaaaattatcagcaagtaattgttcactaaaataataatggtttttattcagtttcagaaattgtatgacactatcactaggctatcataatatgttttgatataactcaaattatccttaagcttactccctcaaataagagatcgtcgctactacttaagggtctaattctattaattttttgatgttcacacaataaactaataatatataatattaagataaatgaaatattgtaaattaaagacaataaaacaataaattaagttgtagattctgaagattaacgcgtcagatttagagataatctcagaaaaatataaactgttgatctagctatgtttaggattgttaacacaccgttctagaactcaaatcactaatatagagcaactgatcgatgttagcccgcattactcactatacctaataattaaggattccgacgttagcccgcaaatccctaattctaaacatgcattactattaggtttgattagttcacctaagtatctagaccgacgttagtacacatcttaaatactaggctcatctataacagttctagcaataagcagccttttagaatttacctattacctaagatcaagttctaggtgatcaatctagaactagtagtaataataattaagatgaagaactcaaaaaataatcctaacaggttatcgatctactaatccatctaaatccctattgataccctaaacccaacaaggtgactactcagtcatgattaaaggagcacaaatcataatctgaataaattgcattgaattatgataaaagatagagataaaggagttcagttgcttctctcccaaagtataaatctctcacacagaacttgcttaggtctaaacaatgatcttaaatatatatatatatatatatatatatatatatatatatatatatatatatgttactaaaaacgtgcagagtctattttgcaaataaaaaaaaacttctgacacttatgtgattcttgaagacttgatgaaacgtgagaaattcttatgtcgataagggtgtcgatcgatactgatgtggtgttgatcgacaccaatgcgtgaataatgtattcgttggtcttctttgctagaaagcttccaaaattctttattatgcttcatatctctcaaaagtagatatgcacctgtaaagactcaaaaacatacaaaaataacttgaaagactctaaaatccattataatattacgttagaaatcagtaaaaaccatgatatatcatgttccatactagagatcgacacaatgtacaccgcaagacgatttgatctctaaaatttatgatttttcaaattttatggttatgtattatatagaaaagtttgaaacgtataaaaatttttaaaaaggaaaaagattatcagcaaataattgttcagtaaaataataatttttttattcagtttcgagaattgtatgacactaatatttccactaggctgtcataatatgttccatatactagaaatcgacccgccgtacaccgcatgacgatttattctctaaaatttatgatgtgtcgctccttcagctaatttggtttgtactttggcaaaagcgtatgctcagcaggttggtttccttatctttccgccttttcaagttctaggtttctttttttatgacttatctaggtagactctatataggttgtttcagccgttttcatttggtatatatagacgagtatagaatgtcaacaactgtagatggttcatagattctgcaaacaagatccggcttgttttattagtttcccttgtaaattattacatgttagagtaagtagtgctatgaacttttaaatctaactaaagtcattgtcaaattttaaaacagcgactatgcaaacagacagtaaaggtgctcaagatgatggagaatgaggggattgaaccaaacttgattatgtcgaatgttttggttaatgcatttggaactgctggaagcacatggaagctctctctatttatcatcatattaaagaaactgtatgtctatcttattcgtgcgattaaacttctagtaattgcttattgtcatcgttaaattatttgcttaactgcttgagtttgtcttctgaagggatacacccctgatgtggttacctatagtacacttatgaaagcattcactcgaccaaagaagtatgaaaaggtatgtagcttctatttggtgaccttgtaatcccatgttccttcacctcaaacgtttcattgactatatatgttatgtgtgatcttgataaattgggtgtttaaattgatggctgctgcatggttccagaaatattcagggaaatggaagcttttgggtgtacggtagatcagaaagcaagacagctattgcaaaatgcttttatggttcttgatcgaaaacatttagtatttgatggaacagccaaagatgattatcttaggtacaaacatccaacgaactacacatagggcaaaaccgaaagaataaacactcatcgagtaaaatttaaaaagttcatgaagaacacctctaaagcacatactatagaaaaaaaaaaaaaaaaaaaactcccctattttcgagaaaattcaatggatagtgaaagatgttgaaagtctctgatgaggagattgctctatattcattctaatataaaggcaatgtacttacaacgtattgagaggtttcctagatactcggaaaaacggcgaaaatcaacccaaactttctgcggttcttttttcctgcggtttttttcaacctgaatttttaaaccttgtatttctcaacctaaactacaacctatttcaaattccaaacatcaactacatagtcgttagccgatttcaacatgacctgtgacggggttatgaaaccgttaaactgtgttgagtcagcgacaccgtggcatcagagctatacaaagcgacatcgtttaacacggttttggttgtctgctagagagaaaacgacgtcgttttcatttgggaaacctctgctagagagaagagggttcccaaaatctttttctcaattaccatcaaccagggaatgacccaaaaaaggtaaatttgcctgactgatcatgaagaatgcctcttctaattaatgcgtttcttggttgacgactctttgaagactgcttggagaagcttagaattccactgcatgcctccaaagactcgttcatagccttttgacggtcgtttgaagcattgttgcatcaatgtggtccttttactactaggatcaacgttaaaacttaactaaacataaaaaaaattaatggaaccaaattcatcaattataggaggaatcgagtaaaccttacatggtctttaaatataacaattcttgggttattgctttccggctttaatttgccaaatatcttaatatacaaagttgagttttcaaaattgttaactcacctgatcatgacacgtgtcaaaattattaatgagttatccacacatatcaaatcaatttcgttatttttagggttatgtgcaaagaaaaaactctctaactcatctatttttgcatatttatcctccacctccaacaactgcatattatcctacgaagtctaaaataatacccattgcaacctttcttcgtcaatttttgctaccataaatgtttgtaaaatattgatatataatatgttaaattgaagccctcgcaacgaaaacttcaactctaccaacaaaattttaaaaatctaatgtatgtgattgtaaaaatatttactatatacatataagggtcatattacgtattcttttagtcttcataagattaatatgcatttgttagagatagaaggtaaaattgcaaaataggatgagttagatgggtgttttgcacaaaatcctatattttaaaacaaaaatagaaaaatttcataaccccatcggatatatacataagtaaaaaaaagttagttcatatattcaaattgtttatttaatatattaaactattgaacaaattctattaaatgtcgtttatatattcaaaacagaagtaaaagttccctattttgttttagaaaaatattaatacttgatttaatattttctaattttgtaacttaaatatgtctctccttttatttcttaattttatttcatttcattttttctcaattacggagttcaattcgtttaccacaaaattcagtgagaggctctgtttggtgcgtctttttaaagctgttgtatgttttccttgtcttatctttgtgttatgctttgaggattcccgtataatatataattagaaaatgcatggtatatagaatgtgtataattgaaatattcttttgaaaatacagattactatttagaatttttatatcatcacaacatttctcacacccgcctattagacgagtcttatctaataaaattataaaccattctcagattttgtgttatgacatatttcaaagatttatgaaaacaatttgaaattctgtaacattgtaacattatgggctcgatgtttcaaggtgttattcattagaattaaagaatgagtagacattgaacccaaatgcaaattctcaaatgttattactatataatctttttttattattattataacatgtactaaagctaaaattttaaaacataagttgaaaaagctatctatttttaaaataagttaaaactctattttggtatgggaggagttgcaccggcaactcttgaacattgttcctttagcatcggagggaataacggaatgaatggaattttcggtatgcaattaactttggcatccaaaaatgctttgcaacaagccggacctaaattaccgaactttccagtgaaaatggattgagaaatctctgcaatgcatccaggaatatccatcacggatgaccaacattttgttatatcaggtaatccagaaatcagttggaacggaaacggaaaaggaagttgagctggaaactgaggcaattgagcatttacagaaactatgatacatagaacatatagaagggaaaacacatttttgatagacataatgagaaattcagtacaaagtcttagtatagcaactatatgcttaatgctttgtttttttttgattgatgaataacaataaaatccttgcttatttatatgaatattgaaatgtgaaactatcatatagattttctttaacttaacatctttgaatactttaattaggtatttgattagccgttttataaatttaaatatagttgaaactccatgtgtgaaacaagtaacattaactaaaaaatattgactacaaagagaaaatcaaagttaaacggcttcacataattaatcattcatcggtatatatctccaaatttaaacaaataaatagatttataatattttcttcgtgaaaattatttaaatcaatctaaaggtttggtttgtaaaacttctatacaatggggttctccatgacttgttaacactaaacttagacgagaggagtttgtagaatgcggattatacggttggacagagcagttcggatcgggcatgaaaacattgtacataatccaatatatgtgccaaatatctatataaagttgggttttcaaaattgttaactcacatgatcatgacagtgtcaaatttattattgaaatatccacacatatctaatcaaattttataattttttgggttttgtacaaacaaaaaccctctaacttatctattttttgcatctttattctccacctccaacaaattcataattatcctataaagtctaaaataatacgcactgtaatcctttttcgtcattttttgctacgaaattattttgtaaaatattaatatttaatatgttaaatcaaagctttctcgacgataacttatcctctaccttaaaaagttttaaaatttaatctatgtgagtgtaaaaaagtttactatatacgtataatggtcatatagcgtattactggttcaaatataatttataatacggcggacccataaatcagctgacctccttttatcctctttgggtctgcctatgcggcgaacccataaatactttttactggatcaaaaataatttaatataattaataacttaaatagactaaaaatctaaaaatattcatttgcttattatatacatataccacaaattaggttgaatacttatgggcgaaataaacaaaaagactaaaaacatataagaaatggtgtcgaaacacaaagcagaaggaaaatatgataaaagttaaagggtttacatacaaaatctgtaattttaagggggtcaaaacagaaaaaatatatgtaatatcataaattttaaagggctatattgcaaatatagaattttaggagtgttagttgacctcctttaatcctctttggattcgcccatgcatattttttatcccaaaacttgaaatagaaatgtgttttttttttagtagtcatgataaacttagaaaccaagatatattcttatacattatttcttatacaacattaagatttttatttaggaattttaattttatttataatttaaaattcaaacaatatttagacgttacagccacaaaaatatttgtccatgagagcaaaccggtctagtgagcactttctcctctggttttagtgtaatattttcagctttagtcttcacaacagaagaatcccattctagatttgttgtaggacatgtatgcactccaaaaccacaaatgagtgctcgcatcttcaacttcgagtgaccatagttagctttttcaagaatgattggacgtcatacatttacaatctccttgaggtagtccaccctttctataagatcttcacctattgttaagatacaacttggttaagatgcgcgctctgataccaaatgaaattcatgataaactcaagatcagttccccaaactcaagattagtgtatttttagtctccttcacaccggaaaaacttctagttagggacatgtccaataaacaaatatatctctactttggagctttataaaatgcatggccttatcaaatctctgttttgccatcttgacgctgaagtgacttatcatacgaccgaacaatgtaccgaagaaaaacaatataaaatgacatatgtactaaacaaatttagagtagagaacaatggattagttaacgactacaaaatcaaatactgaaactatccaccatcttgatttttaggactactaaaagtctcaaaaatcaaaagatttcgctttttataaatgtttttgataaaacattatcttttacgtttgtcttcttatattttcttcttcaatccgcaatttatggcgcaatgacccatcattcaactcaaaaacacttatggcgcaatgacccatcatacaactcaaaaacacttatcacagtaacaaaatcaaacctataaatcaatataaacctatcatcatcctagctcccttgaaatcctagagattcaaagcaaaacctgaatttttttgattggatataaaaaaagatatcttgagaaggtgaaccatcttacgccataaaaacataaaatatggaaactttaccttctctagacgtaggtcctcctcagagattcttacgccatgcatttataggaacttgaataggattcttcctacaatccctgatatgtaacaacaaagataaattctaaaataaagacacaatttcaaaattaaaaccccttagatggaagaacaaaacgacataagagagctagcgattggattaaattaaaataaaaaaatatagttgtgtgaacaaagaatggattaaaatgtatacttggttagaattaactacgtattgtgttataatttgttatagtattattggtaatttgttatagtattattgttctttttctccacttggattgtcttttttatcatttgtgaataaatttaagggagattttgaaaactaccctattttgagtttttatttgaaaaatacatcttttctatttttaataaaaattataattcttaatatgttagatgagttttcttaataaattaaaacaaaattcaaaatttagaagtaaaaaaataaaaaataaatttgaattcttatttatgttttcaactattcttgagataaagatttatttattttagatattttaaaaattaacaaaataatatcaaaaaatattctaaaatatatcacttaataaaacttaattatttatttttttggacgaacttttgtttaaaactatttaagataagaattaaatttgactttttaattattttaaatattaaaatttaatgaaataatattttaaatattttttaaaagtctatcacttaataaagtttatcttttgctttttagacaaaattttgccctaaaaatatttaagataataaatatctttaaaattattagttacatcaaatttaatttgtgattttttctgtcttaagtttaaaaacttttttagttattcctaaattttaatgagactattttagtaattatatatatttaatataattattttaagaaaaaggatagagtatttttcaaataaaaattcaaaaatagggcatttttccaaatttactctaaatttaaaccacaaattttttaaaactcagtaggaaacccgtatgattctgctatagcgagttaatagattatctcgaattctcttttctgctttgcttttcgacatcctcctctttgatttgctcattcttttattttctatttctctgcctacctcttgatccctaaagcggttactacatgattagaatgttggcaatgacaaacaaaagctaataataacaaattttggtgaatgtggtggaaaacaatcgtaacaaataacgatagcggatggaattgataattgatcttgtcaatctatagttttcaacggataaactaatccgagaagtaaataaattttattataatagataaaccctaaccaaacttggtcagcaaggcaaataaattcaaaattgataaaaaattttggttcggtcacaaaatcaaagccttacacctttgagtggtgagataaaatggatttccttatttcactacaccattcctcttaggagagagagtgagagatacatgttttttttcatcgataacttcactatgtgtagatcacaagcttatatagcgctagttcgccactcatgaccaagccgatgaaccgtgcgtcaccgaacatctacgcaaaagcaaagcggtaactatgataataagtctaatatgcttttgtttttaaggaataaatgagccgctaagagcatctacaatggtaatctctcaccaaaatctctcacctacaaaaataataataaaagaataattaatgttttttaattaacagagtctctcaataaaggtgagagtcatgagagatgataggagccttttccaactgttttgagaaactgcccttattaaattatattacttcttattttattaatacttttatatatgagagattttggtgagagatcacctcctttgtagatgctctaagagattaatctctttagaatttgattaatctgagaacatatttgttaaagtctttaagtaaaacaatcaattcactaagataaaggttgctacggaatagactatgactcacaatgttcagtgatcaggtttatcaacctctgcatgttgagatcgacacaagccttagaaaaaaagagaatacttaagccttgaatggctgtagtttttggatttggattttgtaaaaaccaaataattatccattcataattctgcaaaaatagattttctcaaaaatagtaaaaccagattttagtagattttacctatttgttcatagaatctaaaaacaaaaatttgtggattttttaaaacaataaaaattaaaaactaaataaatttccattcacgattttgcaaaaactaaattctacaacaaaaatcaaaaactaaaaacaaaaatccaaaaaccaaaaacgaaaaccaataaaaagtacaaaacattcaggaccttactgtaccatcgtacgttaggaaaaatattagaaaatcaacaaacactaaacaaaccaaaaaccctacgatcatttctttcttctccttcaattttttttcctgagtagatgccacaacaaaacaatagattataaactaaactgagcaaaatcatcaaaacaaaatgcaacaaaaaaaaacatcaactattctctttgaacaaacgtgcaacatatatataatatatataaaatatttcacaaagaatgaaaacataaaatttatagaccaaaaagaaacataaagatatagaacattctcaatattaatttcgatttaacaatcctgatatcttcagctccaatcacctgaatgttgttcacatgtagcccacttaatcatctccaatatcaatattttatatttatagattttccgttgcttccttctacaacttataaacaaaatttaacccactttattataagtgcaaacattaaagaaatatgtgtaccttcgaagacactacaatttgactcatcaaagcttcgttctttatcttatttgccaaattggttcaagaaacagagaagttagtgttgattcgactcgtatgtaccaaacaggacctacttcaatcccaagcctatcgatatggagacaaagaaagaaaagagcaaagaaggtttaatcgctgccaaagagctcaagcgcctccaaaccaacttagtccgacttgatcgattcattgattctcatgtttgtcgtctccttaaattcgatctcctttttgttcttgctgaattttcagagacaaaaccaaattttcctttgtatgacggacataagttagaactataccaacatgaacactatttattatatttataataatgatacaaaaaggtactttaaacagcaaaattatatatacttttttgctcaaactaaaagagaaaactatttaatatatgttattattctttatatagaataacataaaataatatagaaattaatataaaattatagaacggttacaaaaatatctatctatatatcttattttattgatttagaaaaacagataaagattagataataccgaatacttgtaaaaataaagttatattataaattgttactgtgataataagtttttaaattattatatagttaaatttatcattctcagcagccgtcatgtttcaggtatatatcattctgagtaataatatactcaatattaattactttaaaattttcaatcttcaatttagcataataatcaaatataccaatgcagccgatgaagtacattctctgttaaacttacgttagtttctgggtgctcctctacaacatcactctaggcacatgcattaaaatattcactgttttattaaatatatatatatatttatttattttctgacaagataagttacaaatttttgtttccatactctttgaaagagatggagaaaaaatcgaattcaataattgttcttggtatttattccatttcatcatcatcattaattgttggggacatattacatgtaacatggttgtgacgcatcaatcctactcgagccaagtggggaccaacagttcactgagcttgattcagttgagaacttaggaatcaaaaagagggacctgattggctctatcaaaacctcactggagcatgagtgtcccaagcaagtctcatgctctgacgtcatcatcctctccgccagagacaccgtggctctcacgggaggcccactcatttccgtgctattaggacgaaaagactccctctccactccaagcaaacacgtggcagactctgagcctcctccctccactgctgatgttgacaccaccttaagcctattcgctagcaatggcatgaccattgaacagtctgtggccattatgggtatatatttataagaaattttcatcgtagccttctatctcagtttttctttcaggaacttgcaaagtggacagggccaatcaaattttagccatttagacttaagtggacgaatatactctcgaacgagaaatgaaacgaggcggttcagtttcattttctttgttttctggttaccaaaataatatttaaactttaaaattaaatcaaaaacacattaataattttaaactacaaaaaaatcaaaaactgtttcgtcgaagacgcagaacaattccgacgaaacataaactcagatcgaaagtgaaattttgattgaggctctatgcgagttcgagtcgttgcttaagtggaggaaattttgatcgagttcgtgttaaagggtaacaataagaggattttcgggtttctcgagttactgtttctagaaaaactcaaatggcggagatgaagaagagtagtcggcggtgaggagtttcggaagttaatgtatcatcgtcggcgacgacaattatgggtaagggtaagtttggtttaacttcgtttggggaatgagttgatacaaaatctaggtaaattttggagatttcaaatcagaaaatttcaattgacaatgggttttttgtgttttccgccaaaaaacagtagatttgagtataaaatttttggtgtacgtgtatatgaatatcaaggacatgtttagtttgtatttggatatagtgtacgtgttaagaacttcatcgtatttttcaactttcatgaagtacttctaaggatccgattgaattaccatagaggttgtttgcactcgaccactaccctaccaaggcgaagataaatgcgtactccaaagcggagtacattggtcagataacatttgcgcttaagggaacaccagaaatgacgtttcttctagagtctccatttggggacctctttaggatccctgctaacaaggcatctttttctggtaaacttgttcttggattaatatgtcgtcagttagttatgaagaaatgttatgagatgtggatggtattcgggggtcatcctattaggttaggattaagagaatgggcacgtttaactggtttggaatgtggaacatatcctaaaaatagtgctatagaagctgttatgcagcagaaggaaggtgaaaaaacagtttggaaaactctgtttggatctgctaatccaacagttgaagatttaatggatagattgattgctgaaagtgacatgcctccatggaagaaaatagctctcgccctcataattattgtggatggggtgctaatatgtgacatgtctcctcctctgagaccaaatgtgatgacagttgagttgacgaagaacctggatttcttctgcaaatatccctaggaaggacatcatttctacttactttggatcgttgcgcaagtttcaaagaaggagagactgatattgaaaaactcaagaatggttgcaagcaacaatcttatgcactccacggcttcccacttggactccaactctttgccttcgaaactatcccgtctattgctagtctcgtaccttctgaaaaagataccaacgtctttacggagaggtctattaaaaatcttgccaaactgcgtctaatcaagacatcaaccatattggcgtgcgatgctgaaaaggcttgtacagttgttgttgtacgtacattggtataaaaacgattaagtacatacactctgaaataaacaatgattatctatgtaggtggatgtcacatatattgtggatccagtagacagtgattgcccaaaatctttggtatggaggaaagaaaaacaggacccaagagttgataacattttaaggatgttgaatctggccacgagtgggatgagaaaatgtgggttggaggcgatgatgaacctaagaagcaagtccggccctcaataacaggagagagagataatcatttctctttatcgtataacttatatcagaattaggttcctccaagagtagtaatgcatgattaaaccattttatatagttattttgaagaggaaaagacgggtgccagatcctattgataaaaaaaggaaaattaccaactctgatgatggagaaggtggacacagtggtggtgatggttctagagacgaagagtttgataagtatgcggtcaaattccggcgtttcttcaagaggcaaaaagaacttttagataataaatttgaagatttataagaatttgtatgtgtagagatacgtgatgctctacattcccaggaccaaaacgaagaaggaacacgagcatcccagaaatctgattcaccatctgagaaggttgagatggtgaacaaaaaggttgagaaggggaacaaaaaggttcaccaggtatctgaacaggtacggaagaaatcgcttaaaaaaaccaccaaacaaattaattttgtaccaagaagatcttccaggctgaacaatactaataagaaggctgaaactattagtcttcctattgaggtacgtctactacaaacagtctttggctagtacgtagaataattatgcagtgtacgtatataatagactgattacgtgtttggttgttgtttgtttaaaggaattatcatccagcgatgacaatgtcgaagatccttccaaccaaaaaggaagtttttctgacgatgaaatgaaagacattgcaccaactcagccagtacctcgtgtaaataaaattaaaaaaaaggtttttattaagtgtacgtacaaataaatacttaggaatgccttctagtggtttctatttcatagaacgtaccaggcaatgatggggatggtgaagtttcagccaaaaaacaccatactgtctctgactatgtaatggaaaacatttatttgggtggagcatcaccacctcaccaggtaactcactcgtgtattatttatgttacagttttgcgtatttgtacgtacataaagaacaattactaaccaagtgtatggtttttatttcgaaggaggtaggagggaactcggagattcgtgaagattcttccaagatacaccaaaatgtctctgactctgtaatggaagaaaaatttgatagtgtaccatcaccacctcacctggtaacttgtgtgtttatgttatagtatttcataattgtgtacgtactgaagagtttctggtcttctttgtaacaacccgaacaaggcattcctgatagggatataaatgaagaaggccttgcgcaatcaaaaccaataatgtctgatgatgtacctacgtcgactcatcaagtacgtcgtgtactaataatgattgcgatttatttttgtgtgtacgtacatgttctttctaaagtgtatgatatgctatcttaaaggacgttgcgaaagatgttgttggtaatacggaagaatcagttgtcgctgctgagttaccaaaaatggaggagaacagtatggaacctccacactcaccgcaaaatgaacccagagttagggatgaaattgatgttgcgcatacagaagataacaagcgcaatgtacgtacaatgtttttcaaattcatatggcacctttgcttgggtagctttgagagatactaatagttggacatctatatccatatattgaggcaggatgaaccaacaagtggggatggggaggaagtattgaaggaggcacaatctccaagctttgtagttgaaggagttgaggtaatgttaaactattatgcatttgtaacgcgtctatgtgaataatggaaataaccaaatctttgcttactgtggatgaaggacactgcggatcaagtacctatagttgttcctgacaggactctagaggcttttgatgatgaagccaatctaagtgacccttcttaaccaacagttgttgttagcaaggtacgttattaatttgctattaataaaataatcgcttaagtaatcatatttatgaacgttaatttgtttttattaggtgcttactgaattgaaaacaaccgtgagacatgctacttctcttgtacctattaattctacaacattacgtacaaaaacaataatttgtgtataaatgcttgtattttcagctaatgtctactttttaatgtgtatagatcccaaaaaaagacaatgttgtcgaagaaaaagaatctccaatccctgagaaggataccgttcccgaacatgtaagtcattctaaactctataaagtatatagtatatagtaaattatcccgagtgccaatttctatttttactgtacgtacacatggtttacgcacttgtgtagctgtttatatgacatgtttaacgcgttattttatgcctatagccaggaaagaaagacgatgttgtgcatatgggtgtttctcaaactgaagaaaacgttgctcacgacgtggaaaaggagaagaagaatgtaagacggaaagttactttcgctgatgatctgaaaagtgatggaacaataagtgatcatacaaaaagtgatgatgtagaatttatggagacaagagaatccatcctaaacagtgacgttttggtgaaggctgaagatgtaccttacaaccctttggagaaggttgacgaagcaaaattcgagaagttatgcagtatcatgaagggagagaaaatgtatgcacttgtgcatttaaacaattttatgttccctttttcaatcatatgaaattctaactatttgcatacgtcttacaaaatatcaggtgccataatctttttgcatttcgcaaagttgacaacagttttttcacaactctaactgaactaaatgattggatcaattataccgaaagtgaccgttgcatacgtacacaattttcctgacgtacagaatatagattatgaggacgtatattccaagtgtacgtccataaaatcattttattcttgccaagtactaacataacatcatatgttggtgtaccttttgcagcacatggaaatgatcgcactcttgatgtagcacaagaacggggagaatatgaagagaaatcggtatgtcgtggtggaccccagactcccttgggagttgtcaaggcgtgccactgcattcaaaagctgtgttaacccggagactttcaaattggacaaacttttcttacaatttgctaccggggaaagccttaatcgtgaaccaaagctaaggtggatcaatgatgtggacgttatatttgttcccatgaactagaaagatgagaagcattgggttgggttgtctatatacctgccacgtcgcactattgaaaccatggatcatttggtttctctgacgcgggagtctgtggttaggtcacaaatccttccaattctggagatgctaccatacctcgtgagagcgacatgtaaggattatctcgagaagccctatctcataactccttttacttatataaggaatcaacgtctttcacagaacccaactaccggagattgcagtctgtacgcgatgaattttatagagttgtacatgcttcaaaatccttggaatgacctgattttgattgaagaggctaacatgtacaattaccgtaagggttacgctgtcgacctcaacgagcatggaattgggtccataacctaatattataatgctctgaaaaccaacttattttgtatgcctattggtacttgaatttggtatgggatagattcacttgttcgttttcacaacaatttatttctttttagatgataagcaacattttctttgggaattaacaacgtaaagtcatagtagtgtacgtacatactatgaatctacgtgtctaaactctataactttgatttgacaaccataaatgtatattttaattgatcattgaatgtaaccgtaattttcccaataatatctacagccgtggttattaatgggaggaataatttgacctctttggactatctcatttctaacatggtgaactcgactatttccgacgatttactcgcaaagatagctaaaaaaatggcagacaattgctggttggaccttaagccattattacgatcaggcactcgtggaagagacattgtctaccgtccggatgtcctgaaagacgctaatatctttagcttatgtggtgttcccgatgacttccaactaggaggtggccattatccatccggaccccaattagaaggcaatcgaccatttttcaaaaggtgccttctcgctaacaatccgacgaccgtgtataacgagtcactacgtgttctaatccataaaagtgacatcaatggagcaattaagctcatgcagcgccatgcacccgtacgagcagatgcaaccatcgcttgcgccatcatattcatatgttcgaggtatgattatatggctggattgtttcttcagctctacacacgcaaccatcatcctttggactctgatatcactcgagatttgtgtgaggggttcctcgaggagataaagaagtttaaccctccatacaataatacttacggttattctttctgttatccaagcagccatggaattaagatgccaccatgcgcctaccattgttacatggtttctggagcttttaagaacgtttgcaacaagtgttacctctggccgtgtgctaggcgagtaagccaaatgctctaggtctctcatttgtacgtgtgctagtagtgtacacagtcacgtgtttcaagttcgtttactgtttggtcctatgtatttgtttctgtttcaatgatatttcctatttcgaagtaatgtttcaagttctattatgtagtttgactctgtttcatataaatttcctacttgcaagttgtgtttctgtttctgtttcatgcggtttggttatctcgattaagaataatatatttgttatttctcaagataaacatttattgactaattacattagaactatatctttcaataaatgtaagtatatatgttagtacattgacgcaagagttccacagttgtgacagacgtacaaagggttaataaatacagtttactccgacgtgacatatatccaccagaatttaatatacgaattcagggttttcatagacatacacgtgttagattgacatacaccacacaaatatatcatataaattatcttcggtttgcatcggtaatagaagattaaaatatgtacgtacacttataatcgatacgtacgtattgagatttaaactatttaaaaaaattggggctatgtccttgattcttcccaattaacaccattcactggacgtacatcgtatagcagataggtgttcactcatacatctggacgtacaatttttcgaatggtgtgtgtgtgtgtcagctgaaaaacccaaactatgttccatcaaagtaaacactcatacattgaattgaatcccaacagtgacggacacgtaaatgacattgaatgcaaccataaattccccaacaatatctctataatggtcaacccaactatctccgacgatttactcgctaagatagctaagaaaatagcagacaaatgctggtgggaccttcagccactactacgatcaggcaatcgtggaagagacattttcagcttgtgcggcgatcccgatgacattcaagctagaggtgaccattatccatccggagtcgaggaagaaggccgtcatcgaccattttgcttaaggtgtcttgctgctgacaatcccacaatagtgtattacgaggttatgcgtgttctaacgcatcaacgtgacatccagggagccattaatcttttgcgtcgtcatgctccagcacaagcggatgcaacacttgcttccggtatactattcataattgacggaaattattatttgggcgttatgtttcttcagctattcgcacgccatcattatccattgggcacggaagagactcgggattcgtgtgagcagttcatggacgagataaaacaatatcgccctacttacaataatacatacggtgctacttatgcctatcctaacagccatggaattcaaactccaccatgtgctacctattgttacatggtctcttgccctttcaagaaaaattgcaactgttgttatctcaggtggtgtgctaagcgactgagcataatcctatagtaatatcattctactagttagttgacgtttttattaaatgttatctgctaagttatgtttaagttcttttaatgttgcgttgaagttatgttgcatgttcttgttattctctagttacgatgttttaagggtttttgttatgattctatgaagttatgtttctagttcttgttatcctctagttatgaagttgttcggtttaatgtggctatgcatattaaatgacaatatctagattttgaatatcctctagttatgaataatatacttatcaagtacttacattctaactttgaagtttctataaatgtaagtattaatgtcattgaattgactcaaaagaaagatttgtaatagacgtgacatgccctaataaatacactctcagtcggcgtaaaggtttataactttggttgcatcgtaaattgcaaatttagttatagacgtacatgtgtatctctatacgtacataaatctatttagtctaaaattgaacctaggtttataccggaaatattttatactttattcttatcaaataaacacagttaatggtctcttcttttaataccacctactatatgtaagtggaacgtctaacatttacttagttgtctcctcgccattagttctatatactgtaacatgtttactccacattacacattcctctaactacgacaaatataacctaaatacacaaacctccgttttatttggtaatggatgtctccacacccccaccagcagagatttatcttgccattcagttgccgaatccactcagcattcttttcaactacctacccgtttctttaactccaataaacacgctcagaggtcacgttaacacgctggagccgaccgctattaacatggatgagttcatgacgtggcttgattttgtgttgccgaaaacacctttccaaccatatttcaccctcttgcttgaacggggagcaagtccggcgctttaccttgaaggagtccgtttagcttgcaacttcgtcaccgtagcacatggtataaccatgttgggatctatctctgccaccgacgcatatgcatgcttccttcatggtctgtttctaaccgcaactggcaacggacgggagtttgaacccgtgaatgcgactttctgggatttagtgccatcatttgaagatgcaaacacagtgggggagttagttatgtatcacataagtcgattgtatgctcaaggacctcggatgtggaatctatcatggaggttcatgatttcaccagactgcttgggtcattgcagctacggagcttgctgccacaattatttgttctactggtatgctagggagttgtgcatattttattaaggaatggcgttcgttcagcatcttttttcccattctatgcatcggcatcggttatatgctttggctttagtatccttttgttgtatgctctactcggtttattgttatgctttgtatttccttgttttattgttataatttgtatttccttgttttattgttatgttttgtatttccttgttttcaaattatgttatgaatgaaattaagtttctttatattctatatagagtacaactatgctaataatgttgctagagtttgaacgtacaccgatttaaatatacgtccatgaaaagtcagcaataaaattttattacaagttagaggtattttataataagtaaaactttagcagtttgaacgtacacttatccaatatacgtccatgaaatataatgtcggaaataagtaaaactttagcataaatataggatatgtttaaattcggttacaaatttatagtttttaagaataacagaaacaacagaaaaactaatacacaacgactttggagatggggcaattgctcacaatcttcagtttataagtcccgctcagacgccaggaaacgagagcaataacattttaaggaccagttagcctttggaagaatctttgaaattccaaagcttgtagtttgtgtgattcacattgaagaacttccttgctacagagaatatatatattatacggaagattagaaacataaaggtgaaaacttttttaaaaattaacacagaagcacttactattgatccattatcttaaaagaaagcttcagcccacggtagtcttcggtcaagttgccaacctcaagtagcgcaacaatcacatctggtgtatgtaataaaagatataagtattacgtgtacgtacaaattccaagaatgaatagaaagtcaaatatactaaccaactaacactccggtggtaactgtcttctcgatgatgtagtcaaaaggagtaaaatcgtaatacagtattgcagccaatcccgaaggtttggtaacaatggtctgatccataaaacagatccggtagtcatgggacgttgtgtgtatcccctcgtcgtggtttcgaaccgagaaagtattgataactatccactcattttctcggatacggtcaaagtaaaatgaagcaatgcgacgattaatggtagcttctatgcggggacggcaaccctgcaccatatcatgatgattagttacatgtaaggtttgtgaaagtaaaaacgttataaacacatttgcgaaatagtactcgattatcggtcaagatgagtgcgaggtcgaactcatttactcccacgcatttcttaaacaccgtgaccacaaaagcgcgtatacttcattcagtgatcattggacaaagttcggaaatggaatgatatccatcatccatgatgccaacaaaagtaccagaataaccgactttctgtcttatttgtgtggtgggtttggactttcgtttgaatgagtgaagggtgttattaccaggttcttaaatagattttaaaacgacgcgatgattggtcccagatcaatgtaacggtttagttaaaaatataattgtcaactcttttataataagatgtacgaagcatacgtacaaatgaaaacatttatcaaagttacgtacagacaacaacgtctacttacaaaaagttgaatgataagtaaaaccgataatacgaggtccacaaacgttcgtacacacaataacgtacaaacaaaataatatttaaaataaaaattagactgataaaaagatttccaaaaaacgtacgtagaaaatcgtccaaaagcacagaaacgtaaactctaaccatcgcgagtaaaaaagtcatcgactaaatagggtttttgcatgtcttcttgttatgaccggttttccaacatcttgtacactgattaggaatgagtcttttctgcctctttttctgaaagttgtaaaaccttagtatcttagttaaaataaagtaaaaattgcatagcagttaggatgttcagtataacccatttgttcagtataaccaaggttatgtcccaaagctgctgtttaatggaggctaccaacagcagaatccaccaccagggttcactgaacaaccataacaagcctcagcagctcaagatcctgaaattaagcaactcattcaacaaatcattcaagaacaagctactagcgctatggcttttgacaagaagatagctgaattacacaacaagatcgattgttcttacaacgatctaaatgtcaagttcgaagctttgtattccaaaatcaagtatgtggagagtcaatttgcatcaacatctgctccgaagcatcctcagcaacttcctgggaaagcagtccagaatcctaaggattatgctactgcaaatgctatcacaatccaccaagaagatgagtctccaccaaatcatcagactcccaatactgaggacaacatgattcaagaagggggggattcaactcaaattgctgcacctgccacctagcaattcatctggattatagagcacacacctttgctgaatactcaccattctggaaaaaaattcaaaattgaaaaactcaagaaaggtcagaatcaagagatgattagcagtgccaccacccaagaaacttacaagaagaaagtcatccaagaaaagcttgatgatcccggttcattcactctgccatgctctctaggatcattgacattcaataagtgcctttgtgatttgggagcatttgttagccttatgcctctctctactgccaaaaggcaagggatcatggaatacaagttctacaacttagctttactcttagctgatggttctgttgcacatcctcatggtctaatagaaaatttgcctgtcaagattggaaatgttgatatacctacagattttgtggtattggacgtagatgaagaaggcaaggatcccctgatcctaggcaaaccattcttagcttctgctggagcagtcatagatgtcaggaatggaaaaattaatctgaaccttgaaaaaggcatcaagatgaagtttgacatcagaaaagcttcagggaaatcaacaacaggaggttagaattttgggattcaggacatggatgttgatgaagaaacagaagctggaacctcaccaagagttaactatacttctcaactcagcaagcggaagagaacttttgaccacaagaagagagcaatataagggttagctcaaactgaagatcctacaaaagatgactcgtatgagataagaaaaaaatttaactgccaaagtagagtcatagagaaattatcttcaagggtgatgaagctgaaagatcaacatggatgtttgaaaaaagagttaataagttttcaaatggtattgatccagagaagatggaaactgcactagctatcaaagagaacgaagatttcacaacagaagcgtttgcaccagaagattagaaaggagttcacttagaggaaagaagcctagaaagcaagttgttgactgaggaggaaacccctattccgacttattctccaggagtgcctaaacagcccaccaacccctctgctgaaaaagaacacttgattcatgattctgttcttcaagaactcctggagctcttgtaacaccccaaaatttggtagaattttgaaagtattactaaaaataatataataaaaatactaaaattcaatattgtataatgttttttaaaatcataaaaactccaaatatcgaaaacaaaataatttaaatcaagaaaaatctaccaagtctcgctttacgattgaacgaaaaactttaaacctcagttgctcgctccacctcctcaatgtcctctgcacggaatcaaaacttatatgagcaaaactttgcccagtgagactacaaatccgatgaacaagtaccaacacggtctgatcctgtacagaataatattcacgtgttggtactaatagacataaattttaatttaattaatttgaaataaagtaaacacatcagagcttatactatcaaaactatattatcaaatcagcataacagaataatatcaacaacacagaatattaacatcagaacagaacgaccagatatccagcaatatgtgtcggaatggtacaaccccagcaatggttgacccaaaccgtatactaacaaaatattttcataatatactcgatagggatgctggcccctatcaaggtgataaggaagtacggtccacgacattaaccgacctcaataccactaacagactaacaaaatacggaatacatctgttggcgatgccggccgtcacagattgctcaatagagctagctaaattagagtcgcatgctaatactggtcttaacagaatgacatatttcattatgagaaacatattcagaattatcaccctaaataactaaccagttttcaaaattcacatattccaataattcaaattttgtttctattttcttcccaaatattttgcaaatatacatcaaatcttatcagaataacatatcttaagaaggctgaaagcaacccaatactaaagagtcgacaactgaagtcacaaccaacctaaacagccacaaaatccggtcacaaaatatcaacaaatattcaaattggcattgaggcaaaaaggatctaagaaactcaccaaaagtctcaaattgattatggtttcggcttctagttcgctggggctttaaaacacatatatatacgatatattagggttaaggaacaaggatttgaattgccaaaaacttctcttcagtttcggaaaagataaactcgaatttctctcattttccacgtttttgcactttactcctctgatttttctctatttacatatttcgcccagacttttgaatatctcaaaaatcttcctgaaatcagactatttcaaaatgatcaatttaacccaaaatctgatcctatattttcttttaattttggatgttacaattccacctcccttaagcagaattcatcctcgaattcaaagatttacctgaaacagaaggggatatttctttttcatttcagactccaactcccatgtcgcttcctgggtgccatgattcgtccacagaatcttaacaagggtaatagattttctcctaagctctttcactctagtctccagtatctgaactggttcttcttcataactcaagtcttcttgaatttgtaacgattaaaagttcaccacatgagatgggtcatgatgatactttctcaacatcgatacgtggaaaacattatgcacttgccccaactctgaaggtaattctaagcggtaagctacactttccacacgttcgagaatcataaaaggaccaataaaacgcggctttaactttcctgactgtccaaatcgaaccttaccttttataggttgaaatttaataaatacttgatcgcctacctgaaatttcaaatctcgcctttgacggtctacataacttttttgacggtcttgtgcagctttcatcctatctctgatcagcctcaatttttcattggtttctaagattaactcaggaccaataccagaagtttctccagcttctgcctaacataaaagtgtacgacatggcctaccgtataaagcctcgtatggtgccataccgatactcgcatggaagctattattataagtaaactcaatcaatggcaacgacctctcccatgactggttactatctaaaacacatgatctcaacatatcctctagtgtttgtatagtcctttcagactgtccatctgtctgaggatgataaggcagtactaaaatgtagttttgtacccaatacctgatgtaagctactccaaaaatgtgaagtaaactttggatcacgatctgagacaatgatactcgggacaccatgcaacctcacaatttcttccacgtagatcttttctagtcgggctgaagagaatgtcttctttactggtagaaaatgggctgacttggtgagtcgatatactattacccaaatcgagtcatttcccttctgcgaccttggtattcctgtgacaaaatccatagaaactttctcccatttccactctgggataggtaatggttgtagtttaccactaggcttctgatgctcaatttctacctgctggcatacaaaatatcacccttcataccattccaatgataaaaaggtttaagtgtttgatacatcttaggcacacacaatctacctttaaaagataacactgcgtcgtctctaagattgatcctagctgacgaaaatcctcgggtttttcacaaacaggaccgaatttaccatcttgcctctgagcatcccgaatacgtgctagtaaattcgactcaatacccaatgttgcaagaaatccaaatttttcctctcggatagaaatgtgaaactgactcatctgctctattaagttccattgcgatctaagagatgccacagttacttgctttctactcaaagcatcagcaaccacattagcctttcctggatgatatagaatttcacagtcatagtcacttagcaattcaatccatcttctttgtctaagattcaactccttctgcgagaacaaatactttagactcttgtgatctgtgaatatttgcacattttcaccatatagatattgacgccacaacttaagtgcaaaaattattgcagccaactcaatgtcatgtgtaggatagttgacctcatgtttatgtacttgtctagatgcataagcgatcaccttattttcttgcatcaatacacagcccaaacctgacaaggaagcatcggtgtacatcacataccttacaccaggtctcgaaagagttaaaactggagcagaagttaaccttttctttaatgctctaaagctctgctcacaagactcactccaaacaaacgtaactcctttgcaaagtagttgtgtgaggggttttgcaatttgagaaaaattctcgatgaatcttcggtaatatcctgccaatcccagaaaactacggatctctgacacattacttggctccttccacttagttactgcctcgactttagcgggatctacagcaacaccttccctggataccaaatgcctcaaaaatcctacttcttgaagccagaattcgcacttgcttagtttagcatacaactgctcttctttcaacctccgaagtatcaatctcaagtgttcagcatgttcttctcgactctttgaatacaccaaaatatcatcgatgaacactataacaaattcgtccaagtgcggtctaaatactctgttcatcaaatccatgaatatagctggagcattagttagaccgaaaggcataaccacaaactcaaaatgtccatatctggtccgaaatgctgtcttagagatatcaccatcccggattcgcacttggtgatagcctgatcgtaaatcaatctttgaaaaccaatttgctccttgaagctgatcaagtagatcgtcgatcctaggtaggggatacttgttttttatcgtgacttgatttaattgccggtagtcaatgcacaacttcatactaccatccttcttcttcacaaaaagtacaggtgcaccccaaggagatgaactaggacgaataaaccctttctcaagtaactctataagttgcttctttaactctgcaatttctgatggaaccatcctgtatggtgccttggatattagtgaagtccccgggataagctcaattgtaaacttaacatcacgagatggtggtaaatctggtatatcctccggaaaacttcagtaaaattcgagactacaggaatatcttcaagtttgggtgactgcttctcctcaccaactagcactgctaagaaacccatacatccttcatttatcaatctttctgccttcaaacatgatataatgggtaaccgaggagttactttagatccacaaaactcaacaatcgaagaacctggaatttcaaaagtaatcttcctcccacgacaattaaggttcgcgaaatgacgaaataaccagtcaaaacccataataatatcatctccttttaaagggagtacaataaggtctgctggaagagatacatctcctaccaataccttaatatctctgattatcccaagagaatgtaatattcctcctcccgaagtacgaataggcaaacatagtgggactaactccactccagacaatttttcaaactaatcgacagacataaaggaacgggtggcaccagtatcaaaaagtacgaaagcagaattaccaaggatggataacataccctgaatagcatctgcctcttcactctcaccctaattgcctaatgcatagacgcgacttgcaccagtttgacgaccaggcgctagatcacaggtgacaaagaccttgattctgagaaacttgtgcaggtttagcaagaccattattaggacaatccgctatgaaatgtccagcatgaccacaacgaaaacatacattcttagctcggtgacacatctcactcgaatgatttgtccgaccacaatgagcacatcctttgttaactccttgtgctggccttggttgcattgttgatttgccatatggagttccacgaacatctggacgcttgtgtctgtccacccggttactgtttcctgaagagccactccccacatatgttggtgtctttttctcatttccctcgacaatgagagcacactccaacactccaacatatgttggtaatctctctggttccacctaatttcatacccaaaagttatgaaggtctgcaaaattaaataatacagataaataattaacttaagtggtttttactaaccacaactctgatggagtctcgaagtccatgctcaaatcgtttagctctagagtggtcatctggaataatatgtgcgccataacgagataaacgatcaaactcaacttggtactctcttactgtcttatctttttgcttgagctcctcaaatctcatcctcaagtttgatctaacagactcttggaagtacagatccataaatgcaccctgaaaatcatcccaagtcatctccacaccaagacgggaagtaacaatgcttctccaccaatgttgagcatctccagcaagttggtgagtaaccattcgtaacttaaaagccttaggaacccccaaataccccagcgcctctttaacaagatcaagccatttctcagcttccaaagggtcagaagaaccttcaaatttctgcaagccgactttcttttttaacctatcttgtaacacccaatagtcaagctgagggtttccatgttgagcctgaggaacaactgcctaaggtagttgctgcaacaaagtctgctggatagcagcattctgagcaaacatttgattcatagattggagcatttgtcgcatatcctccattggaacagcatttggtggaggaggtggtggaaattgaggaccattaggaacatgaggaggagttcctggaatagggacacctcgaccagcaggagcaacaggaacacatctcgcacgcccacgtctagccatctgaacgcaattgaatgagaagttaaactcttagtttagacaaatttggtcacaaaagctaacagttaaacctcacattcaaaatcctatcgcgagaccagtaagatatatattttttattttaaaaacaaaacctacgaaggcttttgaaaatcccaaggtttcgtaaaacctggctctgataccaaactgtaacaccccaaattcggtagaattttgaaagtattactaaaaataatataataaaaatactaaaattcaataatgtataatgtttgaaaattcataaaaacaccaaatgtcgaaaacaaaataatttcaatcaagaaaaatcaaccaagtctcgctttacgattgaactaaaaactttaaacctcagttgcacgctccacctcctcaatgtcctttgcacggaatcaaaacttatatgagcgaaaaattgcccagtgagactacaaacccgacgaacaagtaccaacacggtctgatcccgtacagaataatattcacgtgttggtactaatagacataaattttaatttaattaatttaaaataaagtaaacacatcagagcttatactaccaaaattatattatcaaatcagcataacagaataatatcaacagcacaaaatattaacatcagaacagaacgaccaaatatccagcaatacgtgtcggaatggtacaaccccaacattggttgaccaaaaccgtatactaacaaaatatttacataatatactcgatagggatgctggcccctatcaaggtgataaggaagtacggtccacggtattaaccgacctcaataccactaacagactaacataatacggaatacatctgttggcgatgccggccgccacagattgctcaatagagctagcaaaattagagtcgcatgctaatactggtcttaacagaatgacatatttcattatcagaatcatattcagaattatcaccctaaataattaatcaaattttagaattcacatattccaataattcaaattttgtttctattttcttcccaaatattttgcaaatatacatcaaatcttaacagaataacgtatcttagtattataattataaccaaattaattatgaaagcaaacaaatcaattttgagaatatacaaataattcctttattctttttatcacactcctaaaatattatacaaatgtataataactaataagggagttagaactcacctggaaaagctttaaaaaccgaacgagtgtttacatcaattctacccacgctccaaatcaccaattaatttgcctaaattcaaccgtagatcagaaaaataagtactatataccatctgaatgctaatttcaatttcaatcttaatcaagtatcagaaatgacagaacctgtttaaaacaagctgaaccggaccaaattactaaccgcttaaaatcagactcaaccaattcaaaattagatttcaaacgagtattgcccatagtcagaacattctagaaccggttttaaaagcttaagaaccggcgtaaataaatcccgatttgactatgaatcaacaaaaatcaaatatataccgatcaaatttcgatcaactccgacttccgattgatgatatgtcagtggcgttggattcttacaaacgagagttttctaacaagatatagatcaactcctaattctttctgcaaagagattcaccattaaagagcttaaagctcattttaaggaagcaaactgaaaaaggaagaagatgaagcttacctagaactctgaagaaggctgaaagcaacccaatactaaagagtcaacaactgaagtcacaactaacataaacagccacaaaatccggtcacaaaatatcaacaaatattcaaattggcattgaggcaaaaatgatctaagaaactcaccaaaagtctcaaattgattatggtttcggcttctagtttgctggggctataaaacacatatatatacgatatattagggttaaggaacaaggattcgaattgccaaaacttcccttcagtttcggaaaagataaactcgaatttctctccttttccacgttttttcactttagtcctctgatttttctctatttacagattttgcctagactttcgaatatctcagaaatcttcctgaaatcagacaatttcaaaattatcaatttaacccaaaatctgatcttatattttcttttaattttgggtggtacagctctggattggatataaagctcatgaggatacaattggaaagttaactcacacgatggaagagttaaatagcaccattctggaacttcaagaaaatggttaaaggctaccccagctttgaaattgaggattcgtcaaaggagcctggttgagaagaagaatggtgctatttaactcttccatcgtgtgagttaacttgaatgattcaggcactgaatgattcaagagaggatgcagagaggatgcagagaatgcagagaatgattcaggcactgaaaattcaaccactgaagatgaggacttctatgttcctctctttaactttttttttgactaagctctgtaagagtcaagcttaatgacttaaaacaagctcacttgggaggaaatcccatgtctatccatgtatataactttctatctttctagttatttttgatgttttcgtttaattgtttcaggtttatttcattaaccctgaggaagtcaacggtcgagtaaattcaaaccaagtcaagaaagatctcaactgttgatcgagtagaatgaggagaagtgttttgagccgttgatttgaatgaccaaatgagagaagcatcaccaccgtttgatcgagtgaattcttaaggtttatttttgtccgtttgatcgagtgatcaagaacaagaagctctccaccgtttaatcaagagctgcgcaattcaaaaagatgctcgatcctttactcgagctctcattatttggagaccaaagcataacttgcgtgaccccacttgttcccccaacactccgttactcaatggacaaagcaattacccatgcccctcaccatttccaatcaacttttctatctcttccaaaaacaaaccaaagaccaatctcctccacccagtgaattcgacaaaccctccttgaaactctctctttcatcatctcgttttcggaattctctcacaaagctttgaagtcttcattccaaacccttccccaaacgctccctatcactccttaagaatccattccccttcaccaatacttcaccaaagttgctcgatcactcccaagtctatcttcaagcattcaatcggtttcaagctcaaaatttcttcaccaaagaaaccgattcccttcccctttgatacctcttggaaagttgttcttgtttgacttgttgaagctcaccaccaatctctatggattcaagaagaaagagttcatctcgagctagaagatcctccgttgataaagaagaggttgaggcgtttgacatgagtggcacgactgaacgccaaattctcaaagctcgtcgtgctcaaatatcaagcttgattcaaggtggaagctcaagccgctcagccatgcaaagagaagaagtagctcggggaaagagggtcgttgaggctgaagaagaacaccatgaagaggcacccttcaaagaagcggcttctgaggaagaggttgagatcatcggggatgatacaccagcccctgttgggagagagaagaaaccggccaaggaggaagagagagccaaccccgagcgagtactatcaatacttgaaggagttgaagtttgagggaactagacaccctcataaggaaacgatgtaagagcttggtatttgtggtgatgtggaatacttgatggaattggacaatcttgcaacatttatgagctgccaatgtgggggatataaagaggagagctgccaactccttgcaaccctcaaggttcacttttgtgttgatgattcagagaaagaagagagaggaggtcttgattacataactttcaaggttagggatgtcgagtatactcttgatattcgccatcttgatacaatttttgggtttccaagtggagaaggaatccgccaagactatgatcaagatgagctaaaatctctttggaaaataatcgccggtccgaagccctactcgccagccaagagcaagagttcttcaattcgaaatcccgtgattagatacgtccaccaatgcatcgccaacaccctctttgcaaagaaagccaccggatttgttggtgaagaggagctatgcatgatagaccaatctttggtcttcattctaagagagacaacagatgggaggaagatggcaggtgatagagcagacacttcgctgagtgttgttcttttggatcacctattaagctacagagagtatgctgcaactatccatcgctcgggaattcgcggaagcctttgtgttggtggtctcttaacgccaatactgggagctgtggggatggaatttggaacctctgacatgttccccaagttcattgacctcgactatctcaaggggaaagattttcttgagaaaacaactttggcggatcgctatctcttcaagttcaaccatccgaagctttgaccttctcttttacccctaccatgcgagaaccggaatttggtgaagataaggcccaacatcaatttcatgccttgaacatcgacattggagtagctcaagaagatgaaccagaatatagtcaagctgactatgagcaacaagagtattttactcaagctgactatgagcagcaaatcgagtttgagcaacataacgatcaaccggaacaagggaccagcgaacaagagcaagctcattatgaagaaggtgttaaccaaggaggagatgagatagctgaagttcataagaagctcagtgtgattgaagagcttgggaaccttcacagcaaaacaatgaagggtttcaagaagaagatgagaacaatgaagaagtcgttgaagagtatggctgctcaaatcaaggacttccagagcaagcctaggccattctctcccacccccgaagtaagaagaagcggttccacgagctcagctacaagtagagctgaaaggatcgatcaaccccgagctttatcttttgagcctcgggaagtgacctccgagttgagagagccaagaagtaggcagagacgagcttccatacgctcgaccggacagaacgagcaaaatcctcccgcctcaacttcagcccctgcttatactcaagagagtatggacgattacgtttccatctacttcacctgaccggtgaggtaacactacctcaaccattgtatataacatcatctttttattttctttgtgtgttttgtgttttggtcttgaattctttctcagatttttattacacaaaggactgtataatttaagtttgggggaggattcaagacatgtttaacattgtgttctcttttcttatttcaaattttgcatcatcttaggcatagaaaaaaaccataaaaatttgaaaatttttcagaaaaatgatttcacaaaaacagagtgtcatgtagattgcatttcattttaggattgtatatagaaggttttcatttaggattgctcatttgcataggggagaatgatgatttcaaaccattaagcatgttttgattcaatgaagtaagttcaatacccagattgttagttctctattgcataaccgattgtttctctgaagtaagactgcaccctgctttgaatttacaacttgactatattgctttgattcgaaactcgcttatctgatgccattccctatctattagaacctgaactgaatttgtaatcatcatgtctatgcattgtctgtgaactcatggctaccatatacatacttggattatcttattcatttcaccaccctctgttaatccaagtagctgactctcatttttagagcagtttctcatagccttagcctagccttatttcaagccaaagatcatttgtgtgtgattatgaggtctttttcgattgagcttggtataacgtgttaggtatgagccgacaagagcagtctttcatgtagacctagcccacgctttttgggttatttaggactaggtggagacttgtatttaggattgagattgtgtatggattgaatgggaatgagaatgagaatgaaaagaaaagaaaaaaaaaagagagtaagagtttaaagttcttaagggggatacaaaaaatgttagtctagtaaagggtttggaattcaaagaagttacgcattgtgattcaaagaaaagggtaaaacgccctttgtgctaagattagaagaaaagccttaagtttgtcaaagtataaaaccaaacgcgctagactcttgaatcgttttaaagaagaaccccttagaacttgaaccaaaaagagaaagaatgagaaaaatggtagagttaggacatctatgggactgggatcatcttctgagctatcatactatatatcattgggtagatgggagtctgttcttgtatgtgtctattggcttttacctttaccattctactgaagctcaatcttttctctgagagtcccctgttactcgaccaaatcattagagggacaatttttgtctcttagcttaagcccgaaaccatgtgagttcataaccatagcattgcttgatccactgtaagtgcttaatgaatgttaaagggaattagttgatgagaatgcttgaatagattaaggcaggttgttaggttgcattgtgacgagtatggctaacgtttttaagtaaaggtctatcatcttgcaacctagaattagcaacctggacattgagcttactcgttctatatgcatgcttcggtttttgaatccccaccttcaaacctctccttcaacttaagattttttgtttgcttgtgggcaagcaagagataagtttggggcagttgataacactgtattttactcattttaggcatgtatttatcatcatttagcttagtgaaactaattgtttcatatcattttgcatcacatttagctattttgcacacttaggcatttaggatcatcttacatacatattgcatgttttggtgtgttttcaggtgcagaaggagcttacaaggattctactcgaccctctactctatccaaccaggaaggaagcagcagagcattctactcgaccagttcactcgatcaagacagccatagaggaggcatcaattcactcgacccacttactcgatcaaagcagcctcagaagaagcagtagattgatctactcgtccctcctactcgatcctctactcgacccatttactcgaccaagggcgacctactctacaagacttgttgatctatcaaagcgtcttcggatcctcctcattccccactcaaccagacatctgagcatacagataagagaggaagaagcatctactcgaccaattgatcactctgaggatagacacaaaggcgcagactttgcagcaccctctttactcgattcccaagatcgagcactcgcccaaaccgcctcaagtctcttgtcttctagtaatctagggttttcaacattttactataatagatcactttgggatttgtccaaaggatcttgcttttatcctttactttttctttgtgttcttgaatcttcaaaacttaattactcttaatctatttctttttgcatttagttctttgagtaaagttgtttagtttgtttagatttacattttggtatgatttcagtaatttctgggtttgtgttcatagttatgttgcttgagtagtgattagggttcttgaggatagattagattagggtaatctctaggttagtcaggtggttaagattaggttagatcccttctggattcgttggcccttatgaagttttcgcgggctaatgtggaaattcgaccatagacgtccagcgtccaaaagacgttcaaatgattgtctgatctacgaaatccagagatttatagactatagaccaagagattggctagtctgtttattagctttggtagattgttgcttaaaccctgctctgctatgtttcatcaacgagaattgagattaggaagtggtagagttatgggggtctctgtcatgagagtggattgaaccggttttgattctatcgtctagggtttctgcctttcacctgttagccacctgatgaaccctagagttgcccttatcaatgaatccatccttaggacttctattcttcttagatttatttgtattcaccccctgattgcacttttatttacctgttatttgtatcccctgttgattgtattttagttcttaatattgtcacatgttggttctactcgacccaatgatcgagtagggctcttaagttcacatttttacctgtttgaattctgacctatgattgttactagaaacccaccatctctataatctggcttgacttagttgcttatgtacacatcttgattgctagcaataacagtggactggattgacaccccctatagctgcatcgacatgttagtgtttaaggggaattgaacagaacctcacttcaccatataagtaggcctaaaaacctacttatcatgaattccgatatatcttgaggaataacaacgtcatttgggtccgctataggtaaaacggattcttggaaagaatcagaaaacacttgaaggctataccacaatccaaccacagccttcgggttgatgccaaaatgtattgcagcagctagagcatgctcgcatgggattcttaacatcgtgtacctaagacaagtacacatacactcgtctagtacaacgtgataatgctcaccactctttgaagtaacttgataactccatggcccaaacatcatgactgcgaactttcctgacttaggcaagtcttggaggaaacgttcatctaccttcgacgtcaccaaagagttacacttcgacacttttttccccctcgctgcaaacaatcgcataatgacctctcggatgaactgtatcatatagacaattggatacgcatttgccttccttaagacattgttcattgccttcgagttgttgctagtcatgatattgtaccgctcccctttgtagtatgtccttgtccaatgctcaaatccaacattctctaaatactttctgcatcccggactccgacctcctaactcttcaaagtatttttcaaaatctctaacccgatatgctttagcggcgctaaagaataaacaagacacaccgtacctagcgtaagacactgatatgtttcgctccaggttactatacatactccatgatgagctttcgaatacaccacactgacgcctttatatatggaagaatgcatgtccgagacaatcatcaaatcgtcagtatctggaacaatctttgataaattgtcaaagaaccaaatccatgaagcatcggtctcgccgtcgacaacaccaaaagctaatgaaaatttgaaagttctcgtcttgtgcacatgctatgaggaagcatcctttgtaacgaccgactagctgcgttccgtctacaataacaactttcttcatatatttccaaccttttatagacgtcgagagagaaacgaatccatacttgaagcgctggcgaccattagattcaggagtggagtggagatgacagattgtaccgggatttgctaaacgtagaagatacagatatataggtaaaaacctgtaactagccatatcatcaccccttacagagtttactacaacctctctagctctccatgctgtagaatatgagatccaaacattaagatcatttaagaccaattgaggtaaatctactgctcttagacccccttgcctagaactatatctattcttcattaccttgcctaaaagtttgtaagtagcatgtttacgataatcctttcgactcccgatcttgcaaacatggatagaatcataacctgtgattttgaaacattttgaattgggtatgacatgtgcagtcaactgccatggacaattacgatctacgcaaaccatctataatcttttagggcatgagcgagtttgtttgtagcggaagcaccttttgattgcaaaaagtcgcatagtctactgtatgacgtgcctgtttttgaaaacacttcccacatacaaaggatgacctgacgtactcaattcaacttctgtctcatcgactcgaacattggctaaatcatcgaatactggagcagcatcagtatcgagtaactcattctcaccattgtgcaatgtagaaaaccctttatacacttcgtaggcttcacctgttgttactagacggtggtcagattcaatatttaacccacttgcagaagcccctcttaggcattctataccctcatctccagttatgttctcagctatatcatccacatttgcagccatgtacttaactaattcaccttcgcatcttgtctcctctgcacagactctaatgtacgtacattggtacaaaccatgttgacacgtcggggatggagcagagattggtgtactgtcaaccaaaacagcagtgggttctacatgatgtacatgtttacctgtcgacgtacacaatgccaatagacgagtgaattcccctggggttccacggtttgttgagtgtcattcacgacgtcctcctcaacatgaccaattccatagtcttccacaatcagatcaccctatttattgtaatcgtaatcttcgccactaccttcactaccgtcgattgtagggtcgagggtacttccatatattcgccaaacatttgatctgcatccacatcctcctcttcattatcctcatcctcatcaccttcatctcttccatcctcatatacatttatatcttcgtcaaacttatgagctgcatcaacatttgcaacctctgtctctgtaaagcttcccttgccgatagagtagaaagacacaaacaagttaatagaaggatcgccattacgaatcaacataaatgtatccaggctgatttgattctcaatatatactggagggcgattacttcctatcatatcagacatatttccaagcatccaataatttattataggcttgcattcactaatcttcagcaccgttaaacaagttggatttgttttttgcccaaattttttatctcaattatgtaaatatcttataatataatctctattataataggtaatcactgaaaaggattcaactttatggataatataagcagaaacaacaaacctgcatgatgattcactaaagggtaaccctaaatgtaactaaaagttcaaatttttatcacaaacccagtttttaagaaagaagaaagagtgaacatacgaattctctgacatcctcgccatgcaaaccctaaagaatatcgagaaatcgatccagtaacagagcatcgtactcgataagcttgtcgtctttagaaaccttgccaggagcaagaagcctgagctgagcatcaatagaagccatcttctccaaatttcttgcagccatggtttggttgatgctttttgctctctctggtgaaaagctcttttggttaagtgagagagattctcaataattttatagattgatacaatcggagacaatcaaggaaatatatccgataaagctgaaactaaaaaaatgtgtaaatcaagaaagattagtgagatacctcggtttgattcgaagttcgtttgcaattctacaatccccaaaatttatgattgtacctcagaaacaaaaaagaggtgctaatcaaaatcaagaaaattctcacacatataaaaaccaaatagctacgaaaaccaaaacatgtaaccgaacaaactgtaaaccttgggtaaacaactcatcaccaattggcaaagatctatgagatcttactttccaagtgaccataacataaaaaggagtcggaaaaatcgatgaagatgcatcataaaaaggaccgagattgaaatacaaaaaaaaactataaactatattgctattgctatgcactaaaatcaagctacgatgtttgtgtttgagaggagggatcctatatttataggtattttcagcataaggttttagggttttacatatgacagcgtaaattatacgggcctaatatctttgtttgaaaagcataagcccgttagggttgttaggcgacttatgattgattaggtttgattaggattaataggcgatttaggtttgattaggggcgccagagaataggaaatttagggttgagagtgaattaaaccttttttttttctacacattaaaatataaaaacaaaataataagttatctcattagttagtaaaaatattaatttatccttaaaaaccttaagagagggagggcaaatccatcagttcattttctgagagcgaacatgaaagtttttgacatctgctttaatatataagattctccaccgcttatgtttgggccgctacgaattcaagatgttctgattcgaatgattgagtgattatgaaattttttacaaaaatgatcgataggtattgtgttgttatgggttttaagaaatatttaaatacttttttagagacggtatgcttgaccttttgtaatattatggtcgaattttcaaatctcataactatattctatcattgaaatttaaatttttttttaaatactctagttggtattaaataacattccttagttttgcctcgtttgagctctaattattaatcggatgacaaaaaaaatagttaatattaaatagtgaaatcttttataaaaagaaaagaaaacatttatttactagtggggataatgtttctaaagcccaataaaggcccaaacgttctctgaaataacaccctaattatagcttctgaggcccaaatctctctctctcccctccggaaatctcctcgattcctccgtcaccaccgtaccgtaaccgagactggtcgcaatgttgtcgctcaatctatctttgaaaccccaacatctcaagctcttatcttgttacacggattcgtctgctccttcaatcgcgaaaaaggtacctacacacttgcttctgtttcttagttcacttcatatcttgaattttaggtatctctctactttgtacagttgatcaaggaatcaaagctatctagggacttcagtcaaaagatacaaatcgtagactacgctccattagttcaaactttaagccagagaagattacctgatgtagctcatgagatttttctccaaacgaaatcagttaacttgttaccaaattacagaaccctttgtgctcttatgctttgttttgctgaaaatgggtttgttcttcgagcacgtacgatttgggatgagattataaacagttgttttgtacctgatgtctttgtagtctctaagcttatatctgcttatgagcaatttggttgttttgatgaagttgccaagatcaccaaggatgttgctgcaaggcactcgaagcttcttccggttgtgtcttcacttgctatatcctgttttggtaagaatggacagttggaactgatggagggtgttatagaggaaatggattcaaagggagtgttgttagaggctgagactgctaatgtgattgttagatactatagttttttcggtagtttagataagatggagaaggcttatggccgggttaagaagtttggtattgtgatagaggaagaagagataagagctgtggtgttagcgtacttgaaacaacggaagttttatcggttacgcgagtttttgtcagatgttggtctcggtagaagaaatcttggaaatatgttatggaattctgtattactgtcatatgcagctgattttaagatgaaaagcttgcagagagagtttattggaatgcttgatgcgggtttctctcctgaccttaccacctttaacattcgcgctcttgcgttttctagaatggctctcttctgggatctacatctcactcttgaacatatgagacgtttgaacattgttccggatcttgtgactttcggatgtgttgtcgatgcatatatggataagcgactagcgagaaatttggagtttgtatacaaccgaatgaatctggacgattctcctcttgtcttaactgatccacttgcatttgaagttctggggaaaggggatttccatcttagctcggaagctgttttggagttcagtccacggaaaaactggacgtatagaaagctaattggagtttatctcaagaaaaagttgcggagagaccagattttctggaattactagctacatgccacatctttgctgcaaagaccgtcactctttgctcactatcacaatccccctgataaacttttccgatgcttgaaatgaaacattgaggttagagagtcttcttgctactagatttacatataaatcatacatgcctgtatttacaatgttttattgttaaatagatatgtatattgaattacatacatattattaatgcacatttttatccggagttgtggaccatagaaagacatattgactcctcaaagtaaattctgcatgttacattgaaatcataggctaaatttgagatgcactatttttagaaagtgtagagaaaaggacaggaagaaataagcgaaagctttggtaagccaccaaacctgattactggaagaaaagaaaaaagttccgagaatagagttagatcgctggtgagggttttaaatggaacacaacaatggttgttttagagtgtgttattcttttgtatttataccttctcataggtttcttgtaatacacgcttcttcctctctctccctctctcttatggcctcgtcttgaaagcgtcttgcatgctaagagaaggctttagagcaaggagagaagggagaagttgatttatacgtccatcggatatatcttctttttatatctgtctctcttttaaggaagaaaaatggcgactgaattctcgtgggatgaaatcaagaaagaaaatgtggaccttgtaagatttttacagagtttaattcgttctcgagatcttgaactgttgaaaatctgtaataatttttgaatgatttatattataggagcggatccctgtggaagaagtgtttgagcagctgaaatgctcaaaagaaggtttgtccagcgatgaaggtgctaaaaggcttgaaatatttggggcaaacaagcttgaagagaaatcagagaacaagtttttgaaattcttggggttcatgtggaatcctctctcatgggttatggagtctgctgcaatcatggctattgttttagctaatggaggaggaaaggcgccggattggcaagattttatcggtattatggtgttgcttatcatcaactccaccataagtttcatcgaggagaacaatgctggcaatgccgctgctgctctcatggcaaatcttgcaccaaagactaaggtatgcaaatttctcaatacatatatataggtatgtattttctaaaaaggagagttatataacctatgtgtgaatgtaggtgttgagagatggtaaatggggggagcaagaggcttcaatcttggttccgggtgatttgataagcatcaaattgggtgacattgttcctgctgatgctcgtctcctcgaaggagatcctttaaaaattgaccaatctgctcttactggtgaatcccttccaaccaccaaacacccaggagatgaagtattctctggctcaacctgcaagcaaggtgagattgaggctgttgtcattgccacgggtgtccacaccttttttggcaaggctgctcatcttgttgacagtaccaacaatgttggccatttccaaaaggtattttagaaatgaacaacatctgagtactgtaactcttggtctacctagggtctcacggctgggtttttattttccaggttttgacatcaattggtaacttctgtatatgctcaattggattggggatgttgattgagatattgattatgtaccctatccaacaccgcacatacagagatggtattgataatctattggtgcttttgatcggaggaatcccaatcgccatgccaacagttttgtctgtaacaatggctattggatcacatagactctctcaacaaggtgccatcaccaagaggatgactgcaattgaagaaatggctggaatggatgttctctgcagtgataagactggaactctaacccttaacaagctctctgtcgacaagtccttaattgaagtgttcccaaagaacatggatagtgactcagttgtattgatggctgcaagagcttccaggattgaaaaccaagatgccattgatgcttccatcgtcggaatgttgggtgatcctaaagaggtacgtacttcatatttgtgaaacttggattcattttgtttactgtccttatgttgcaattgtttttgatgaaataaataggcaagagcaggaatcacagaggtgcatttcttgccctttaaccctgtagataaacgtacagcgatcacatacatcgatgaaagcggagactggcatcggagcagtaaaggagctcctgagcaggtaatgtaactaatatgcttggttttacttttaatttaacttactatctttatctgagtaactttattattactagatcattgaactctgcaatctccaaggagagactaaaagaaaagcacacgaagttatcgatggttttgctgaacgtgggcttcgttctcttggtgttgctcaacaggtatgtcatagttagactcatcacataatgacataaacatatttcgttatatggttttaagaaaattccttttctattcaaatgcagactgtgcctgagaagactaaggaaagtgatggtagtccatgggagttcgttggtctgttgccactctttgaccccccaagacatgacagtgcggaaactattagacgagcccttgagcttggtgtcaatgttaagatgattaccggtgaccaacttgccatcggtattgagactggtcgtaggcttggcatgggaaccaacatgtacccatccacttcactccttggcaattcaaaggatgaatcattagttggcatccctatcgatgagctcattgagaaagctgatggatttgctggagtcttccctggtaatatattcaaatagtcaaatgttaaaatattgttcagttacatcagtctcacttggtttgttcaattacattgttttcatttggtttacacagagcacaagtatgagatcgtaaagaagctacaagagaggaagcacatttgtgggatgactggagatggtgtaaacgatgctccagctttgaagaaagcggatattggaattgcagtggcagatgctactgatgcggcaagaagcgcctcagacattgttctaacagaaccaggactaagcgtgataataagtgccgtattgacaagtcgcgctatcttccagaggatgaagaactacacaatctacgctgtttccatcactatccgtattgttttgggattcatgcttgttgctttaatctggagatttgatttcgcacctttcatggtcttgattatcgcaatcctaaatgatggaaccatcatgactatctctaaggacagggttaaaccttccccggtgccagattcttggaagctcaatgagattttcgccactggcgttgttctaggaacctacatggctcttaccactgtactctttttctggctagctcatgacacagacttcttcagcgtaagtagtgtacaatatcacatcaacaacattcggttactatacttattttcaatattaaattgcagaaaacatttggagttaggtccatacaagggaacgaagaagaacttatggcagctttgtatcttcaagtgagcatcataagtcaagcacttatctttgtaaccagatcaaggagctggtcatttgttgaacgacctgggtttttgctcctaatagcctttgttatagcacaattggttagtagactctctttgtaccataatactatccattttcattcattaccgtctgatacatgtgtcgtttttatgcaacaaacaaggtggctacattgatcgctgtgtatgcaaactggggattcgcaagaatcgtcggttgtggatggggatgggctggaggtatatgggtatacagtatcattacctacattcctcttgatattctcaagttcatcatccgttacgctctcactggcaaggcttgggataacatgatcaaccagaaagtgagcatatttcggaaacaaaactttaccttaaatccatgttagttgtgagcttcatagctctttaatcttttgcagactgcgttcacaactaagaaagattatggaaaaggagagagggaggctcagtgggcactagctcaacgtacactccatggtctaccacctccagaagcaatgttcaacgacaataagaacgagctctctgaaatagcagagcaggccaaaaggcgtgccgaagttgcgaggtaataaagttaatcctctttgtcatattctttaagaaaaaacattggataatcaaaccaaactaaacaaggtattgtttcttatttgtaggctgagagagcttcacactctaaagggtcacgttgaatctgtagtgaagctcaaggggcttgacattgataccattcaacaacactacactgtttaaccatttatggggttactatgatgaaagagccctaatgagtaacgaaataagctatgtattctccttatattggttttaaactatttgtaacaaaaagagagcaaaaacaagatgtaaaatatatcttttccgttggatgaaatataataacacttgcaaaaaatcttctctcggtcctggtttagattattagggttgaaaacatattaaacttgtcgtctttattttcaaaacctacttcgacattaaatataaattaatactctaaaatatatagtaaaaaatatatattagaattaataaaaaaaaaaaaaaaatagtatttttgcattactatatattgtgtatagttacttaaatgaatactaaacccaaaaaaatattaaaaatcgataaaaacaaactcacgcataacgagagttaataacctagtcatattgaaaaatttagtaacttaaacttaagttatccaaaaaaaaaaaaaaaaactctaaatgtatttgaattttatgatatttaaataaaagccttaaaaaaatggacttgattagcttagtctacaatttggaaaaccctatgataatatatcaattcaaaaaagtgaaaaaaaacacactatcataacaaaacataaagcacactttataaccgtagatctcttaaccacgtatcatttaataacagtgatgataaacgtactaattatgtacactacaagcttaaaaaggaataagattcaattgttttggtaatgttttgaggctcaaataatgtttcctaaaactaaattcaaacagaaataactgaacgaaaacaaataactaaaactgttcataattttgtttttcttctaaaaaaactatttttatggcttttgtgataaaaataaaagtaaagtaaatgttgaattttgatttagaaggtaataaatcgttaaaaggatgtgtgatctcactttctgaactaacaagttttttatgtttcagttgctccttgtttttgcttatgttttgcttatgttttgcttatattttatttatttgtttttgtttttttttgcttattttaatttattcaattggtaatcacccattccaatgcatggattaaattaatcagagcaaacaattggaagtatacaagcaccagaaaacaaacgattacaattgtttaatacaagaagcatataacaaacaattacaatttgtttatacaagaaacggctagcaattgcaacaactacgcatactcgatcatagaacacataaaactattcaatttttactaaggaatagacggatctgaaccttggcaaacctagaagatacacaatggtgcagcgggacttgatagaaaacctaagctcgttgattcgatgtgaatggtcaaacaaaggggtgtctgcagttcgttgattcttgtgaataccgaacaaagacgaacttgaaagtcgttaattccttagaatagccgagattcaagagagaagggaagcttaaagctctgttttaaattcaataataagttaagttctgcaactacaagagagtctttatatagaggcgacaagaagaaagaaaaccctaacatgtttgggaaaaggaaccgactaagacgtagcttaaagcccaagtaagtaaaagaagagaaataaaagaaagcccaagtagaagattaaaaacagagtataggtataaggatgcgctgcatcagttctccccgggtaagagaagatttgcctctgaatctggaacgtcattctcgacatggtacttagataaatacttgacattgaagacgttggaggtgcgaatgtgctccggaaagagaagacgatacgcatttgggttgatacgctcaagaacctcaactggtccaatcttccttgaacgtagcttgttgtactcatgagccggcatgcgatctctggtcaacaccacccacacgagatctccgggatcgtacagtacctctctccgcttggtatcaactttacctttgtattttgtagcagaaagctccaacagtttcttggcctgttcatgtgtatctcgtaaagaattaacaaagtccaccgcctgaccatgcattcgtcgtgtgtcatgtaaagcagttaaatcgagaggaccacgaggcaagatactatacaagatctaaaacggactgaaactcgagctcggatttgatgcatgattatgagcaaactcggcttgacataagcgcgtctcccatgaacgaatattatccctaaccaaacaccgtaacatattacccaatgctcgatttgtcacctctgtttgaccatccgtttgagggtggtaggcggtgctcatatccaaacttgtatgcaacatcttccatagtgaacgccaaaaatgacttagaaatcgtgtgtcgcaatccgagacgatggaggtcggtaaaccatgaagacgatatatctcttggaagaacaattgagcgactcgcaccgcatccgttgcgcgcttacgcggaacaaagtgtgccattttagagaagcgatcatctacaacaaaaatagaattattacctttttgaatcctaggaagacccaaaataaaatccatactcaagtcagtccatggttgcgttgaattggaagaggaagatataacccagcgttggttgcttgaccctttgctaattgacaagcacgacaatgttccacaaacctctcaacatcccgtcgaagcattggccaaaaatatgtagctgaaacaaattgaagagtgcgatcccgacccacatgtccttcggagtggagctcttgaatgacccttaatcgcgaactgcaattcggtatacacaattggatcccacggaacagaaaaccgtccgtaagtgagtaatctgttcttccactagctgcaacatctgccaaaatgggactaaaaaaggggtctgccttatataattcagaaaaagaagcaaaccctggtaccgccacatgcatcgttgttaacaacgaatgacgtcggcttaacgcattagccactcgattcaatttacccgctttatgtcgtatagataacttgaattgttgtaagaaagcaatctatgatgcatgatcagatgacaccttatcttgactatcaagatgttttaatgcatcatgatccgtgaatatgataaaatcacggtgaaccaagtagtgacgccaacgcttaatagctttcactatcgcataaaattcgatatcatacgcactatagcgatggcgagctcctgccgacttctcactaaaatatgccaccggattagattgttgactcaaaacagctcctatcctcaatttagaagcattacaatgaagctcaaatggtaattcaaagtttggtaacgccaaaattggagctgaagtaagcgtccgtttaatctcctcaaatgcccctcgagtttcattcgtccataccagcttagtgtctttcatacaatcggttagaggggccatgattgcactaaaatgaggtacaaaccgtccatagaatgacgccaatccatggaagctacgcacatccgacgttgttctcggttcgggccacgatcttactgcctagactatagtcaaatccatagacaagccttttgatgagactacatatccgagaaaaagaacacgatccactcacacttttgttgtgccacaaaaaaacttcacggtgtaacaccactaaaatttgacgaagatgatcttgatgctcctccaaagacgaactaaaaatcagaatatcatcaaaatacataaccacaaaatttcaaataaatggtcgcaaggcttgattcatcactctcatgaaagtactaggtacatttgagagaccaaaaggcatcaccaaccattcaaataatccttccctagttttaaaagccgttttgcattcatcaccgggatgaacacgaatttgatgatagccactcttcaaatccaattttgaaaaaattgttgccttcccaatctggtcaagtaaatcatctaaacgaggataggaaagcgataccgaactgtaatcttgttaacggcgcgactgtctacacacattctccatgaaccgtctttcttagggattaaaagagcgggaactgcacatggactcaaactctcacgcagccacaagatcttccaattggtggcgtaactcctcatgctcttgtggactcattcggtaatgagggcgattaggaagtgctgctcctggaactaaatcgatttggtgttgtatatcccatggtggaggtaatccctgaggtagctcgtgtggaaacacatccgcaaattcatttaaaagatctattatccacagtgctaaatctgtaggcggagagggagtcttattggcagccataagaagtaccaaaaaaccagtatcctgaaattcactcacaaaattcgttagagaacataacaacacactacttaactccttattcgctgtttcctgaatagtctgctcgaggtggccaggtcgcaaggaaaaacctgaggggtttgggatgagaataatcttgcgattagcaaacacaaaactgtatacattggtctttccattgtgagaaacatcatggtcgtattgccaagggcgccccaaaagaaggtgactgacatccataggaacaacatcgcaaaagattttatatttgtaatattgaccaatagaaaaaggaaccaagccacgttgactaatgcgtatctctgtcctttctttcaaccaagtcaatgtgcaaggtgctggatggttttcccgtgatagtcccaatttgcgacaagcttcctccgacacaacattacggcggcttcccgcatcgatcacataacgacagacttttcattttattgtacatgtagattgaaagatgttagtacgtaaccaaggatcttcactagccatgggagccaaacacatccgcgctactaacaaattcccggtatccccttcattacgatcttcttgaagctctgcactttcctcaaactcgtcgacaccatcaccactgtcatgccattttacttcttcaattaataaaccacgtgtgttcttttgcgggcatgccgtcattagatgatcatgttctccgtaggtgaaacaccgcaaggcattgggtcgattcgatcttcgaagttattgtgtttccaccgcaaccttgggatcgctagacgcacttgcaacttcacgtgataacgtgggttgcttactagctttgacattagctactcctgtgggacgattccagttagttacattccaagaagaagttgtcttgaattgttattacaatcgtagttggatcaaattgtaataacgctgtctgaatttggagtcttaaccccctatgaaatgagaaaccaatggaacctaactgtcaaaaatctcattccttgttatcaagagataaaactcatctgcatattcatctacagaacgagttccttgacgcaaattctacaatctcgtatacatggtacgatcataattatgtgggagaaacatatgcttcaagtgcttctacaataattcccaagaatctatttttgcctttccagtgcatgcccgtgttgctttcagctgcaaccaccaagaggcggcacgaccacgagatttagtagccagcaacgctacctttctcgcatcgggtacctgcttaaactccataagctcttccctgcaacaagccaatccaatagctcctcgccacatacactaccatggaactcgggtatgtcaagcttataacccgactcccaacgcctatcatcttcctcctttacgcgaatctcacgcactccacgatcacgtctctctctacctcctctctcacgatccaaacgacccccataatcatgaccctcacgctcctctgcaaacgggttgtcatggctctcctccgaactctcatactctgaattttgtcgtgggaattgattgttcaggactgtctcagctagggcatgaatcgattgggtaatcgttgcttgaaaattctcctgcatcgtcacgaggggatgacgaagctcagtccattcattgaagcgttccccgtcatcaacgttcttggtgtttctggcaggcatcgttgcacaacgtaaagacaaagaaaaaaagtaccaaaagcaagttggactcgtctttggctctgataccaaaactggcgcagcgggacttgatagaaaacctaagctcgttgattcgatgtgaatggccaaacaaagggctgtctgcagttcgttgactcttgtgaataccgaacaaagacgaacttgaaagtcgttgattccttggaatagccgagattcaagagagaagggaagcttaaagctctgtttttaaatttaataataagttaagttctgcaactacaagagagcttttatatagaggtgacaagaagaaataaaccataacatgtttgggaaaaggaaccgactaagacgtagcttaaagctcaagtaagtaaaagaagagaaataaaagaaagccaaagaagaagattaaaaacgcagtataagtataaggattcgctgcatcacacaaaccgacaaaactaaaagggattttgaggtagcagttgttgcgacacattttctgaattcactcgacgagtggaatgaccggtagcttgcttgagctacaaatctctatcatgaacccgacggggtcgtgaaaaaacacatgagttacttgaattcccccatccgctatgctcgttttgaaataagaaacatccatattctctccatttgtatcatattattgcactacattttacacatggtttgttaaattatcgaaacaaaaataattattgtttcggttatataattcattacctggaacaagatatgcttatccttggggtcaatcctagttttttcgggcattcatcttctgaagaacacaataggtgtatcctaatgccatacctggataacctgaagggagaaacacatctataagtttctataataccgttaaactcgaaaatatcagatttataatacttgagttatgattatcaagagaatttaccaaactcctttggaagtcaatgagcttggtcgatatacgggaatgaatttgagaaccttctcgtagaaatttttggattcttcaaccgaatgacaattgagagatacatgatttagtgatacaatgtttaaaggagttggcctcttcttcttagcttcaacaaatcgtcgactacctcctagaatgacattttcatgtgtccccatgatgcgagaatgtttgttgtcactttggaggttctttaaaaagtgatgattatatatgaatagattttacttagtttttatatcggcatccaaaacagagtagtgtaaaaataaatcacaaaactatttcagtttaatgttttactacttaattactgtagcgctacattcttatttaacttgatacaataaaattggattgagttttttttttttttttaattcctatggtgattgttgggggttggatttggcccaatacgtaatgagcctaaaaccaagcccattaaacattagtaaacctaggagcgatctattcagcttacctgacaacaacttttttaacacccattgacacatatagttgttttctcaaactgagtaaaagagatctactaacacatatgtacgttcatttagagttataacaagttgatgagtttttaatttcaaagctctatttttaatttactggtacattctgtttatacattctcacactgtcacacatatgtacattcattgcatgtatatataaaaaattgcataataaagaaaattaagatatcgaaaaggatagtcatacgctgatatagtgacttgaacaaatactggtcagaggctgatatagtgatttaattaaataattgtgtctctgagtagattgtgtaaccctaccatgtgtcagtgccatacacctttagtactgtaaaagcttaaaatttcgattgtgtcttatttaccatgttgttattattcccacagcttttaactcgtttggacaatagaaagttgaaaacgcagttgaaaaaaactattgtttacataagaaaaatgttcacatttataggccttgaatgaaatggcttttaattgatggttcgtacgcttaacggggttgaacgcaaaattattttcattcatgaaagtttgtcaaacacaagcgtttcttgattttatagtaataaaataataaaaagaagaaagtagaacacatgcgggtcaaatgaaggaagacaattgagatccattataaactgtaaaaacacccctattacttataaaaccgatggatctcctacttttcttcttcttccttttctttttttctattttttttggataaataattttgtaaaaatacagaaattaattacttaaattcagtcaactatctgcattttctttcttatatttatttctcgtattttgtcaagtatatttggtattcataatttatataattatattgtatttagggagatttgcaaaactaccttttatttactacccttttgtaacaatacccttttatgttgtccattttttaaaatacctcttccctttaacaaaataaccaaattaccctcatctaataggaacatgtaattggaaactagaattttcccgccaattttttggcgccaaaatttatttttcccgccgattttttggcgccaaaatttatttttcccgccaaaaaaatatttccaccaaacttttttcccaccaaaataaaaattcccggcaaattttttttcgtaacaaattttttctcagccaaaaaaatgcttttaaaaatccttgtaaattttttttggctggaaatagatttacaagggattttaaaagggttttaaaagatttacaagagattttaaaagggttttaaaaaatttacaagagattttaaaagggttttaaaagatttccaatgaattttaaagggttttcttgtaaattctttaaaaaacttttaaaaacccttgtacatcttttaaaacacatttaaagcctttaaaaatatcttgtaaatcttttaaaatctcttgtaaatcttccaaaacacttttaaaccctttaaaaaacttttgtaaatcttttaaagccctttaaaatcccttgtaaatattttaaaacccttttaaaatctcttgtaaatcttttaaaacatttttaaaatcccttgtaaatattttaaaatccttttaaaacaattttaaaccctttaaaatctcttgtaaatcttttaaaacccttttaaaatcccttataaatctgttaaaaaccttttaaaatctcttgcaaatcttttaaaatccttttaagatcccttgtaaatattttaaaatcttttgtaaatcttttaaaaccctttttaaatcccttgtaaatcttttaaaacccttttaaaatcccttgtaaatcttttaaacccttgtcaatcttttaaaacacttttaaaatcccttgtaaatctatttcccgccaacaaaaaaaaatttgcgggaaaaatcttttttaaaaaaaaattttggcgggaaacttttttttcgaaaaagttttgcgggaaaattttgcggtaaaagtttggcgggaattttattttggaatattttagacgaaaaattattaatatttcattttgttaacctaaaataattttcaaataggggtaaaatggtcattaaaaatttaaagagattagaaatgaaaatggataaaacaaaagggaaaaaatccccaaaaaaaactaaaattaatttttatttggaagtttaatacccaatatttttgaattggaataaaaatacctcatttaataaattattgccaaataaaatacaatcttttaattattggttgaatcggacatatgagttaacagccgttaacagacataacagaatcatttgacggagttaaacttgaattctactatttgaatttatatattaaattgtttaactttatcatacgaatatattattctagtctagtggttattctcttggttggctgaacctattaccccgggtttcaacttgtagttgatgagcttcacacaaaccttgaagaagaaacgatggcttcttctccttttgtctgcaaatcctcctccaaggttcaatgtttgaatttcaattctcctctataccctctcgatttcacatttagaatccgcgaatttgactgaagcaccaccattcgatactgtaaatctatgtactgagattacaagtgatccgaagaatatgaaatcgttcacgtatagatctaacttgagagggaaagacaaaatatgaactttagatctcagatttgtaatatgctcgagaaattacagatgaggaggaggaagaagaaggaacatgagaaaaaaaaaaaaaacgtttctgggaggaatcggttctataaaggagcatagtgtaaaaattctataactcacctttaatagagaaacataatagacgatggttggtatactcaaaagctttagataaagctttttgtttttgttgcaagttgtttagacatgaaagaagtggtggtaacttggcaagcacatagtacaatgattggagaaatttttctagaagactaaaagaacatcaaatttcttaagatcatgttactacaaaaaaacaggtcttttgcgagggaagatcccgtagctaatccctcgcaaatcgatattaccgagggaattgcgacaaatgtcaattcaccgcaaaacgctcgtcgcaaatgagaaacggtagtaattccctcgcaaattttgcaacggaacaaatgtctcgctattcactcgtaatttgcgagagaaaataaacgtagcaaattcattgcaaattagttgtgtcactaattcctcgcaacctttgcgagggatttgcaagtaatttatctgtagcaaacttgcgagagagttgcgaattcttgcgtttgtagtagcaagtccctaacaactattgtgatggatttgctaggtttgttcgatgctcttagttattttgtaaacgtagttactgttgtgtttagcttaattaatgatcttcttaattgttttcttaatttaatctaatcttaactttatattggaaactgaattggaaacttatttgaaagcttaaactcataatataaaccgtgaaagtagtttggcattcaaataaaattctgaagctaacaaaataattatacaaactttaaattgtctagggtttgtgatgagtgaaataaaaacagagtgtagcaagtgccttagaaaatgtgagatggagagtatccagtgtttgccccaactgcttcagctgcaacagtttcagcttcgacagccacatgtgcgatctcagcagatgtaccagttgtggcatttggcacctcaggtctcaggttggagctgagaggttcagtcctagaggatcccgctcgaaagaggccagcgaagtctggatctttatcggcaaggtagtcgaagtacacatcaaagttactgagcttctccgcttggtttgcaataagagcttcagcggtaggcagcttttgaaagtgttcaaccggatcttctcgaggaacagaaggaccaatgtgagctgatgaggcttctagctgcaatgaacatgccccatatatcctccctttcttctttggagccacctaagagaaattcaaaaccaaaaacaaatgtcaagtcactattacataatgcaaccaaaacacacaaaaacaaatcaagacaatgccgggaaactattacataatgcaaccatgataacctaagtcacaatgccaagacaaatgcaaccacaacacacaaaaaccaagtcatgacaaaacactgaacacaatgccaagttacaatgccacaatgccaagtcactaatagtaaatgcgttgacaacatacaaaaacattttcagacaaaaactaacaacacaaagccaagtcactactacttaatgcgttgacaacatagaaaaacaaagtcagacaaaaactcacaacacaaagccaagtcacaatgccacaatgcctagtaactattacttaatggaaccacaacacacacattccaaatcaagacaaaacacttaacacaatcccaagtcacaatcggaaactatatagaagaggagagagagagagtaatttaccgcaacataaatcttgttcttggcctgaacagataaacccgctgaagctgtgctctccgtcgtgttgtcggaacacagctgagatgcttcctcttgaattctagatgacagttcattgtagatctcctctgattttccatcaatgaaactaccatcaggttttctatgtgtctcatctaagagtacaagaaaatctggagtagtttctccggtcatctcacactacaacagaaacaaatcaggttagtttttttaatgtaacaaagttgactaagtaagcgtgtaaaataacttacacgtttttgggcacgggctttgtaagaggattggccagaccggtgtttatgaatcccgaggccatccggatcatgtaatcttgcattcctactgttgatactcttcaaatctgacttagggtctcacaaaaaactaacaagaccggcccacacttcaagatcaaaccagcgaggcatcgccgcatctcccttttctctccactttcccttccaccgagaaacttgatcagacatcctctccttcagctttgcttcaaactcagtcctaactctcttgtttattgctttatcccaattatacatttgctacaaaacagacacaagtgacatcaaaaattagttggactaacagcaactaaaaagctttacataacaaaacataatttagtggacttacagcaaaggtttcaaaccaacgatcaaccattgattggggtggcattgaccagttagcatgaggctccttgaaatctctttcaaagatgctccggacagtatatgcaactgaagtgtcatcgtcaaacctacaaacacaaggctccatcaggcagacaacagtgaactgagactaggactacatattgtaaggaaaaaaaacacaagttgcttacgagagagttttcggaggacggttagggtctaatctcggtaacccagctcgactgagactttcaagtaactcatcttgagtcatgttgttgagctgagaagctagaggattagcatgattgacagaaccgttgggggactgatttgcatcatgcggagaggcaccgcctgcttgagggttgacattgataggcgtctaaggtctcgcggtttgaccattaccctgaaccgtagaagaggtcccttcattgacaagcgtgtttccacgctgctgagcccggaaccttgaatagtcgtttccagagaacgacatcttgcaatgaagaaatcattgtgttagtcacattcgatcaattaaaccgaatgaagattaattaaaccgaaaccctaatagatcaacaacgaaaacctattcatatcaagaaaccctaaacagatctacattttaaacgatagagaaataagtttgattgaaaccctaaatagatctacttttttaaacgatagagaaacatgtttgattgaaaccctaaacgtttgattgaaaccctaaaccaagaaacacgtttgattgaaaccctacgtagatcaattaaaccgaatgaagaactgaaaggttagagacattaccttgttcggttagaagacacggcggggatcgggaacacgccggagaagaagaatagacacggctgggaagaagacacggcggggaagaagattagacacgactgggaagaagacacgacggggatcgggaagaagccagacgcagaaaaaagtggcggcaaggtagaacggtgacgaaaagaagaacggcgccggagacgaagatgaaattgagggagaattttttttattagggtttgtttgtttatgcggctgagtttgagctttgctccaaccgggttcgcggtgtatatataaatttaaaacgcctcacaactccctcgcaaatgtgttagggacttgcgaggaaccgacaaaccaaccaatgaaatcgcttcaacattgcgagggacttgcgacgaatcactcgcaaatcccttgcaatgtttaaggttacacgcgcactcaattagggttttcagcttcatttgcgtggaaattgcgtgacgtagttgtaaatccctcgcaagttgctaaggatttgcaaaggaactggtttgaaaaaaaaatagaaaaattatgaaaataattacctaaaaatgcaaaattataattataaactttcaaattagaaaattataacttttaaatttttaatcccatttgagtcatgttgttaaataggttaatagaattttttacgacgttaatgttccgtttatctgctctgttagaacaaaacaatgtcgtttattacagagacaaacgacgtcgttttatctgttgaaacaaattttaaaccctaaatccccaaatcgatttcattatctcaaatcctatagaggccgaatcgatttgaatcccatctggtgaggagacaaacaatgttcctcagcccaaatcaaatcgaaaaaaaaaaagaaaaaacggaagaaggaagttgaagtagatgacatcgttttgttttaatagagaaaataaacgagacattaacgccgtaaaatatttttgataacctatttaacgacatgactgaaatggcaagtcaacaataactttgtcatttatttcgaaagtcaacaaaaactttacgatttatgtgtctttcgtgatgttcaagattaaatcgtcccaaatttgaaatttagtgatttttttgacatttttcccgtattttaaccatccagcaaaatcacgatctttgtaagtttcatattctttttcttctaattcaggacatacttcacggagttgtgaatcaaataacctacaaattaaaacatagatgcttagcttccttcattagtatcacagtaattattatatataaaaaacttttgaataaaactgaatggctttatagctctcaaattattgaatgtaatcaatatttcgaagtatgtaattgtgagctgctcgagaaagcgcatggtcgtcccaccaaatttctttcaatttccctgcaagtctacctatttgggaaaaggtatctggaacagcaggaacgttatatgtaggtgcaacacctcgatcttcatatcgtcgaggatgagtcattttggttctaacgcttggactaaagtaatacgacgtgaagtgaaacgtttcctcggttaaacttcctgcgactatcgatccctcaactctagcaaggttttttgcctttctttaagagatttcatgaatcgctcaaaaggatacatccatcggaattgtactggcccatcaagagcagcttcatttggaaaatgaattggcaaatgtttcatcacgtcaaaaaaggcaggggaaataatttctccatgttacaaagcaacattgggatattcttgtctaattgttcgatggtatctattgtcaatgttcttgtacataggtccctgaaaaatactccgatgcctatcatgtatttatttaatgtaagttaatagtcgtcaagtaataattgagtaaaagaatatatatagtatgtatataaatatatatatcttacctacaattgcttcatgaatatttgctcgtatcaactctactaacacaaatggcagtaatcgttgcatgaatacatgacaattatgacttttcataccataagacttttgcccttgctttacgcatcttgaaaagtttgacacatatctatctgggaacttcacttcagcaacaaaccactcgaacaacgccttttttgcttcaggagacaagcggaattttgaaaccggtaattttccatctcgtgtaaaatgcaactcaggtctgctgcatatttccgctaagtccaaccttgatttcaaactatattttgttttgcccctgcacattcaaaactgtattcatgaaattatcaaaaacgtttttcttgatgtgcatcacgtcaaggttatgccgaaagaggagatccttccagtatgggagttgccaaaagatattttgtttatgccaattgtgagtgattccatattcatcaggcatattcgctgtactgtaccagttacccccacgtttacatgtttccttagcaccataataatcgatctgctcaaacaaatcatttccagaaacataagatggcgaaggaatacaaactattttattcttcctaaacaatttcttgttcctctgatacggatgttgcaggggaagaaaccaatgatgacaatcaaaccaacataattttcatcctttctttagctgaaacgtatcggtacgacccatacagtagggacaagataatcttccatgcgttgtctatcctgataacattccatatgctgggaagtcactaatcgtccacattagcactacccgcatattgaaattttgtttgctcgagtaatcaaacgtgtgaacattttcataccgcaactttttgagttcatgaatcagcggttgcaagaagacatcaagcactcgtttcagatgttttggcccaggcactagaatacttaagaacagaaattcgctttgcatacacatatctggaggaagattgtatggcgtcaagataataggccaaaatattgtcgcccaaacaaaccaaagggactaaatccatctgttcataatccaagatacacattcctgcactcattagcaaagtcagaatataccgtttgaaagtgttaccatgcctttgtatctgatgggtgcgttatttctccgtctgcagtggtatgttgagcatgccatctgattttcgcatcaattctttccgattgatataagtgtttcaatctatcaattgttggcaagtatcacatccgtttatatggcactcgcgtccttccgccagtagtctgatatctcggcttctcgcaaaattaacattcatgcagattttcatcatctccccagaaaattatgcaatagtcaatgcatacatcaatcgtttctgatggtaatccaagactcgaaacaaacttttgtatttcataataactctcagccgatatattatccgatgacaaatattccttaattaattatgcccatgaattcatgcaattttcacttaagttattatcagctttaatagtcatcatcctagatgccaaagataacttataatgcccttctctacatctctcgtacattggttgatttgcagcaactaatatatcgtaaaagtgttgtgcatctacgttgggttcttcactaatattttcaggaaatgcagcaatagtttcatgaaatgcatctgtaaccatatcatgaaatctattttcctggttatgcttataaccaaattgattaggtacttgttgaccataattcgcatcattattaaaattactaggttgcgacaccataattcgtattactagttcctgcgctatctctacaaccctctccatgacgtaaccatacatagtagtttggcataaatcctctattataaagatggttcttcactacattaaattccaaatatttctcaataacacttacgacatggacagaatattgtaccgttctcacgagcaaatggttcgtttgtcgcttgatacatgaaaccgcgcattccctcataatactctctcgtcacctcaccggtcgcttgatctttatggttgtacatccaacttcgtaatgtgtaaatctcatgctctccaccccaagacattattattttcgtaagaagttttatttttagaaaagattttttttgtttgtaaataaatgttgtgatttgagttatgattttttacatgttacgttggttatttatagatgtcaaaaaacaactagggagggaatgtcaaggcgaattgcgagggatttgctaggaacttagctttattgctaggactttgcgagggaagtccacctaccaaccaaatcgataagattatttaaaacatgctcacctaactcgccaagacttgcacgtcgcaaatattgctacagaataactacgcgtcgcaatttgcgaggttctaatgattcccgcaaccccctcgcaaatttgcgatgcttttccgtgaaatccggctttccacgcaatttcggtgtaaaattctcgcaaatttgtgagggagttgtcctcttccctcgcaaacctctcgcaagtctgtagcaatttgcgagggatatttgccatcgcaaatttccctcgcaaatcgactgttttcttgtagtttgtgtttgactcattgaatagagcttgaggtaaggttacaaaaaaaatgagaccattgataagcatgctcaagaagcactaagaagagagagaccagtggagagaggtattattgaggatatttgcagtgatgaaaatactagctcagagaaatttggcatttcgtggggataatgataagcttggtgatgcaaataatggaaatttgaaatgattgcagaatttgatgtacttgattaacttggtgagcatgtaagaagaattgagaaaaaggaaatctattcgcattaccttagtaacaagattcagaatgagttaattggaatgcttgctatggagatcaaagttatgatcatcaagaagattcatgagtcaaaatatttttctattattttagattatacttcgtatattagtcacaaagagcaaatgactttagttatccgatgtgtggatgtctgtacaatgtcaaccaagattgaaatgtcaaccaagattgaagaattatttttgacatttttgattgtgaaagataatctggagaatgattattctcgtctctacaagacgcattggttgaactagagttaggcattgatgatgtgagagggcaaggatatgataatggtgctaatattaaaggaaacaaggagttcaaaagaggttgttagaagttaatccaagagccttcttcacgccatgtggttgtcacagtctcaatcttgtgttatgtgatatagcatattcttctccaaaagttgtgtctttctttggcattgttcaaagaatatatttcttgtttacctaacaaataagtgggtttgaaaagcacgactacgtgagtttgatgaatgatttcgcaaacaaaactacaagtagagccaaattttgcaaatcaaaatgtaatgtttaactctttttggcgggttttgcaactgaatttgtaaacatcatgtaaggattacttttggttatgatttttggtactacataaaaaggacatgtttttaagttttgcgtaagatactcctaaatgccggaccgccactgataatactgagggtttggcaaaccataaagcacatatgaaaggaaagatagttaaactatgcatacctttttgatattcatcagcggtttagatcttttgctataatgttgaatcaaaatgaaagagtgtattttggggagaagcaaatgagcgcctatttatagagtctgaatatgatggttggttttgtttttgacgacaaaaaaaagaaagaatagggtggttggtttagggttgacaaaatctcaaaaaaaacttgtataacaagcatttgtataaatttgcaatcttctagtaaagaaaggaagataatatgctagattaatggtagtccaaaaaaggaaaaaatgtaataaataagagataattaaattccaagaagataactgatttttgtttataaaatcttgtatatcaaccatttgttaagatttgaaatcttccaataagaaaacaaagacaatatgttaggttaatgcatgaacaaataaggaaaaagataatagtaatgagatcatttccaagaggatgatttaaaatgattatgtaattatgattaggaaacaaatgattaatggataataatatttagcctttgcataggtaatcgttagaattgtgaaatcaatttgttataactacctatatattctcgtagttgtgattactaacatatggcagacggacctgcccgcgaccgaacggactgaccgcaaattgcccgcttctcttctgatccgcaacggaccagtccgccaacgaccgcggactacagaactcagtcctagcctcccctcaaagcccagcggatagcggaccggcctgcggtctttagaagcagaaattgtgtgtggttgattgacgaagctgtatcttgtttctttgtagttcctcaagtggatattaactaaagagacaaacaaaactatcttgctgggtcgtcgttgtctcttttgttacttgttagaaaagatactgaaaaatagtcatcagattgttgattaactaaatgatctgtcccatttgttttattgaaacaaaaactcaaatagtgaaactgaaatctaaaacataaacacaatctgaactgaaactaaaacataaactcaactgaaactaaaacgtaacacttgaactgaaactaaatcataaactcaactgaaactgaaacgtaatacttgaactgaaacaaaacaagacatttaactttaagtatcaaaccaattttttcaaaagtacttaaactgaaacatccaagtacttaaactaaaagtacttgaactaaacaaagacatttaagctaagtctaaagtacttaaactgaaagtctaaaacattacaaaacagtgataagaaacatatttaccgtagcagcacatatctcagtcttgtttcttgatttcaaaagtgattgcttccaactcacaaacaaaaaaatatatccgtttttctttgccagactgcttggtgactttccctgtgagacaccaacaatataaatatatgatgtcaagactaaatcgatgtgggtaattcattaagaaggaatgaagatatatccttttttatatgaaagccatgacttctacaaactctgcatcaatctgaagcaaaggaccaaaaaaacactgaatttattttacaatgtcaatattttacaatgctgactataacgaaccccaaattctcatctctctgcctattacttctcaatttcacaacctcaacagctggcttaggagtgatcacagattcaatcttagcctttccgatttcgattgaacaaacatgaattcactacaaaaaaatcattgtttatttcagtaaatcaaggaacctccaaagaattgaagcaacacaaaaaaaaattacttatgattcattacaaatttatttcagtaaatcaaagattcaaaaagaactgaagcaggactgaacgaagatttttttttttttttttttttttttaatcatcccaaaatgggctttaggcaaggccttacaacaaccaaacgggtacaaaataagaaggtaacgactgacaaatccggtgacccgagatcggacccggaggttgatcggaaaacaaggaaacacgtccaatagtaccagcgattacaagaagcactgcttcgcggctacgacggcaaggacaaactcaatgacagaagtaatcagttcccaacgccaagtcgatcccgacgacaaacctgaacctacaacacttcttccggtatgaaccgaaacctagaaaatccggaacccaatccctctaatccttaacctagcaaaaagagagaacctaaaaatctaacacccagactccagatctgtcaagcaaacaaaaccttgtacgagcaaagccaacctcaaatccggttagacgaaaactaaaacttggaagctgagaggtttagtggctcaaaccaagcctccacggccaagatccaagattagccgaaacagatctacaagaaaagtcgttaatcgtctcaacaaacagcctaaacccaccaatccgccttcatgacttccgccgcaacccacagcacccaccgcaaacatatgagccgcaagaaaactccaccaccatgcctccgacgtccataaccagaagatttagccggggagatttctcaaaaatgtcgagatagaagccacagatgcatcacgaaccagattaaccatacgcagctgtcggagaagaaagctcgctcacccccactttattgaataaaaaccaaacctgcaatgaagatctaaaacaagaaaagaaaccggaaagtagatctgttttttttttctcttgaggagagagaagagagaacgattggaacgattgtccccttaaatcatcttttcctgctacaatattctattgtatcaacaattacagttttaaatctgctgtgtcacttttctctttgaaaggaatgatcgtcattttcttttgcttaaattatctttaaagtttttttccttccttaacgaagattcttcataaaagatgcaaaggttttttttttctctaacttttttccgggtcgcccgcaaaaccgcggtctttaatgggcatccatgaattaatccgcaatccaaacggaccattcccgcgagacccgctattttttttctccattatataggcgggccaggcctgcggaccagaggcccgattaacatccctaaacataataaatgacatctgaattaaatgtaggtacatattgtgtaggcattgttgcaagtgaaaagaattcagcatacgatttcaaataaagaatgatccaaggtcctcatttccaagttataattaaagctttccgggtcattaagtatattaattctgacccgattagcttttcttaaaatatacttcaaaaatgttaatttagatattggatacccaattagttaatcatgtcggaccgagtcagatcagattttcgaacataaatctttatctctccgaattgaaccaaatattaaaccaaaccaatttgtaaaaagaaaaatcggtttggtttggatcaatagaatcgggtcgcatcaaaactccatgcatgcctagttctgtccatgctggaaagaaaacccacctacactcgaaagttttctttaaagaaaagcgcgagagaagtttaggttttgtaaatttccaacttttaaccacattttttaaagacaaaaaatagtgaaaatggtaaataatatcccgcgtgtcccactctgaaactggcgccaaaatcgaggttaatactaaaaatgcccaaatcaatcagatagaactaaaaccctagaaccacccaaaacaatcaacatctccgatgaaatcacgatctctaaagctccgggaagcccataaagtcggcggaagcgccgccttctgctctatcctctgggaccacaaagccgaacatttcgtcacttcatcttcttcggatccctcaatctccgtccacgatggactctcaacctccacattacccccgacgattctccgtcatcaccaagacggcgtcacctccttggctcttagcaacgactctactctcctcgcctctggatctatcgatcattgcgtcaagctctacaagttcccaagtatattattcaaatcacttcttctcattctcaatctcaattacatttcaattcgtgttgataagtttttgattttgccttaggtggggaatttcagacgaacattactagatttacacttccgattcgcgtgcttgcgtttaacggctcagggagtctattagcagctgcaggagatgatgaaggaatcaaacttatcaatacatttgatggttcgattgttagagttttgaaagggcacaaaggaccagtgaccggcttagatttccatcctaatggtgagcttttagcttcgattgacacaactggtactgtgttatgctgggaacttcaaaacggagtcgtttcgtttacccttaagggtgttgcgccagataccggtttcaacacttccattgtgaatattcctagatggagccctgatggaagaactctcgctgtgcctggtttgagaaacgatgttgtgatgtatgatagattcactggggagaagctttttgccttgagaggtgatcatctcgaggctatatgttatttaacgtgggctcctaatggcaagtatatagctacatctggtcttgataaacaagtgcttctttgggatgttgataagaaacaagacatagataggcataaatttgaggagaggatatgttgtatgtcgtggaaaccgaatggtaatgcattgtcggttatcgatgccaagggaagatatggagtttgggaatctttggttccatcatctatgctatctcctacagttggtgttccagatatagtaccaaagaagaggaatgagattcttgattttgatgatgaagttgaggaagaaatttatcgtgcatctgaaagtttagatgatgctatgggagatagtgatgatggagaatctcatcatactagtaggaaaagattgaggaagaaaactttgattgatgaagatgttgatgatgcatatgaggaacttaatgatgggagtagcttaccttcggcatctgagtacaggaaaaagtcacatagaggacatagagagaagcagggtgcaagaagtggggcttttaaaggcatttcagcctcaaccaagtacaaaatgcaaagttcctttcaacctggtgcaacaccaccggaaccaggaaaacggacattcttgtgttacaatatgctgggatgtataactactattgaacatgaggggaactcacgtattgaggtacttgaggcttacatttgttatgcttctaacttgatgttttccttttattggtttttcagaaagaaagggccacacttgttcttttgtgtgattttgttttttcttttcttttgcttgcattctaaatgcagacagattttcatgatactggaagaggtccacgagtttcatcgatgatagacatttacggcttcactatggcatcaataaatgaaactgggtgtgtctttgcaaatccctgtaagggagaaaagaacatgagtgttctgatgtatcgaccatttagaagctgggccagtaatagtgaggtaagaggatcattacttacacaacattcatcagaaattacggtccaggataggaaaatgaatgacttggttactttttgattgatacatccagtggacaatgagatttgaaggtgaagaggtgaaagttgttgctaacggttctggttgggttgctgcagttacaagcctcaatttgcttcgtgtatttagcgagggcggtttacaggtttcttctttgaactttattctttattatttgtcataattcgagcaagctgataggctacaaaggcaactgatcatagtttaccatttagttttgtaatggttttctgcttaacttgctgttgtgtattgtgcctctgtttgtctctttttggattattctcagatgaaaagaatgcatatttagatatagtcagtgtattttgacataatacagattttgactaacttcaaatactagtgtgtaatatgtaccgtagtattgaaatacttggtttatttgatctgataagttatggtcatttctttcagaaacatattctttctcttgatgggcccgtagtcactgcagtaggatgcaaggatcatctagctgtggtaactcatgtttcagactgtcttccttcaaatgaacaggtatgtatcatttctcatcgggttctctgcttagatcaaccttggagtcacttggcatccccttcatagtaaatagtgtgaaaggacattgtcaatctttgttgataacaatatgaagcttctttaactctatcttattgctccaacaaggaaaagtgattcataacattgatggaattctcggctcattcttgtttcaaaaatatgcaggtgatggaatttagagtctttaacatatccaaaatgactcaggagttgaaaggccgtgttgccttaacccctggctcacgtttaacatggataggattcagtgaagaaggttctttgagctcatatgattctgaggtgtgctttcttgcatttacgatcactcattttgctattacactggtgctctttgcatacaacacgcattacaacagaaaggtttcctgcagggtgtgttgagggtttttacaagtcaatatggtggctcatggatcccagttttcaggtatcttgccgtagctattgacactttccgagaactttctttacgcatgtttcttcaaggtgtttttactcactgaattcattgtaattttcagtaccagtaaagagaagaaacaagaagaaaactactgggtggttggcttgaatacaagcagtttgtactgtatagcttgcaaatacgcggagatgttcccacaggtatatattatcactcttgatattaaggtgtttacttatctggaaaatattggctcaccactattcttcctgccatttcaggtgacaccaaaaccaatccttaccatactagacctttctctcccgcttgcatcctcagatttaggagcagcatctctagaaaatgagttaatactaaagcagctgcgtttatacgaggtttttctctctccttattacaccattttaatttgctgttatttctccttttctggtcaagttttgttaagcagtatattgtgtctccaaagttcttaactaccaaaatatatgtgaaatagtcttaagtttgttttgggtaagcaacagagatgaatatataccaggagatttcgtgttcttgctataagtaacaaaatctgctgaaactagtatcaatatcgatatatgagaccatttccaatatattatttcctcctaatctcagactcaacgaaaagtggacgatatggctttggtcggggtagacacaacagcacttgaagatgaagcttttgacctggaagtttctcaagataaatgcatactaaggctcatcagctcgtgttgtagtagtaagttaaatatatatctgcttgtgttgtgtgtgaactcatattctaagaccattactgtccagatttttacaacaagattctttacatctttcaggtgatagttttgcaagggccagtgaacttatggagcttttaactctagaaaaatcaatgagagctgcaataacactggttaccaaactcaagcttccttttttggcagagaaattcagcagcatactcgaggtactctacaagtactttcatttcttatattttgcacaaaagagaagaaaaattagatacagacgtaatgctaattttttggttcttcactaacaggaaaggttgcttgaagaagctagcgaggcggcggtaacaaatcctgcgctgaatccaaacggagaagtagttacaagagttgaatccaaggtccagaatcctccagcttcgattcagactagtgaaaacacagaagcagttatgaaatcttctgcaactaagctatctgctcctacacttctaaagaaatcgaaagtttcagaaggtctaaagctgggaaaagaacaaacaaagaaagacaaaagtgacgatgcgaagataaaagagataaagaaattgaatttgaagaatccggtgaacaatgttaacaaggaagacaagggacaggaaaaggaagtgaatcaaggagaagctcgacgttcttcaaacccgttcctcaaatcaactgtttaatgatcttatttggaggttttgttttatttaacaagattatgatgaatacatctgtttcactttattaaatattatgatgctatagctgaatgattacacaaacttatgatacaggattagtttatattacaatacaacaagctgttaaagaatcatcatcaaaggcatggtgaaacagaaacttgaactggaaaaattcagcaatcagccacctgttgaagctttctcgttcttcatgatcatatggaaggatttgactttgtcttcctccacgatttctctaagaacatcgtcctcaatcttctcagcttgccattgagatgggtcctccacaaattcttcactgaaaatcatactggagacccattctttccaggtcgtcctcctgtatttgtcttcttcaagtgttcctctcgacaagagctggtaaacgtacaccactttctgctgtcccggtctgaatgcacgtgcgattgcttgctttgtcttagaaggattccactctgaatcaagcatgatcacccgtgaagcagcggttagactgatgccttctgcacaggctgtaatcgaagccagcagaacacgggactggcctcctggctcttcaaatttgtctattactctgcctctttcaaacagctcgagatcccctgtcaaggtcaggagctctcggcctctcttccacctgaatacattctcgaacagctcaagaaacaggcggatcggcgcaatgttgtgacaaaatatgaggattttctccctcttgaccacccggaacacaagattaagcacaaacatgacttttgatcctttctttgcatcgtgcttgagcttctcaatctctaaaagctcctgagggttgaagaatttggcgcaacaggttgtggttttgaccaaccaaggatggatagcagctaacgttatgagtaactcgagctcgagtggatatccatggtaagttgacattatgttctgaagtttggtaagactcttgtgctgtacatcagtggaattcatcaacaatgtgtaaatctgcaaacctgggagaacatcaccacttccgcttccactcccttcatagttatcgatgaaaccactcgtcatattcctcaacatgttgagaccctgcaagcgctcatcgcccacttttgtgtcaatcttcttggctataatgtcaaggaagaacttccgagctctattttcaagcaagtgaggcgccttttgctcggcttggttggtctggaacttcttgtccaactccactagaacctcatgaacaaacttgggtctagccaagcacaaagtgttgaagtactcacagaagttgttctgaaacaatgtaccagaaagcagaatcctcaagtcagtatcaactttcatcaaggcctttcgtaatctcgacttggtactcctcgggttatgtccctcgtctagaaccagtaatccaggagactctctcagtactttagccatgtactttctatgagcaaactttgaatcttccctcatcaaagttagaaacgatgtgtaacccattacaagaacactcggctgtgcatgccatttctggattttgtctaaacagtcaagaacatgcataacatcttggcttggttttggaattccctcgaactgaatggtcttctctttggacatacagtaggttctacgaccatggagcaagtgaacagggaccggaatctcccatttgatgaactccttgtaccaagtgtacaaagttgtttttggagcaagaaccaaaggtcttttacccggaaatatcttcaagtagctcgcgagaaaagctatgattagaaatgtttttcctgctccgggagtatgagaaactacacacccacctatcttatctgaactcggatccatcatcgcgggaaccactgacccggctaggttcttccagagaaactcaaaagcttttttctggtgcaaatgcagttttctcttaagctgaggtattaaagaccagacattgtcactttcttcagccgatggcatatctgaggaagcaactggtatagtgaaagtatggctctcaactccatcttggttaactatagtagtattaatgtcatcttcgttgatttgcttagtctccgtcgtccatttcttgtgccgcgcctatcgaaaaccataccaccaaaatatattacaagtaactcatcgaaagtaggtgacaaaatgttgtctggtatagagtttccacttacaaaaggtgcagaaacatgttttatctcagttcctacatgaccacacaatctgcaacacattccgatttcttcattcaattcatagtcatgttcacaatcacaggttgctttatggaacgcctcgttatccactctcacctgaaacttcaaatcaaactattaaacatataaaaatgtaagctcatggtcatcaagaatgttttcaggaaaatataaaaagatttccaaaaggtatatatatatataacctcatggtcatcaagaatgtaagaagaagccaagcatagttccatttccctccatagaatctcattctctgaagtctcgccatcatcctcctcctcctcactcaacctttcttcggcttcgatcgaaaagcttgcggggttctttaacccttgccactgctcaacaacattggttgctttgtccttggctgcaattgtagaatcaattctactcatgtacgagtctatcaacttgttatacgcacctgcgctcaacgttctcttcttataaatctgcggttcctcagaaactccggtttccctagaaacggaccttattcgagaatgcggtccatttcttttatgaaccacattcccaataggtccattccaacctagatcagattccatctcttccatttcaatcttcttcttcttcttcttcccgtatttcgctgctttactacgatacttatcgatctcatccatcaaatttccagagacaccaccacacaaactatttgcattgagaccaaactgttccaacggtataggttcaaagacaggagtgaaaggaataaccgaaagctcacaacttcgactaaatccctctgttttctttctcttcttcctctcagttttgtctaccaaaactatctctctctgcttatccttactaaatccctttttgcttcctttctttctaagtaaatgcgataacggtaagtataaatcatcatcagtatctttatcatcctcgcaatcttcttcttcatcatcatcatcacttgaaacattccatatgttgtacctatatggcatcatccttacccatccatccttcgaatccggctgaatctcagagtctccgtatctctcaggccgcccgcttcttctcttggaccgacgcagctccattacctcctcttcaatctcctcctttacatcactatcttgacaagtatcctcagctggattgaacaaaacaaccttagacatgacaacaccgtcttcaaccgtaatgttcattgcactcaaagagctactagagccttcgcaatcttcatccgtcacaatctgataaaccatcttctcgtgaacggttctaatctgaaacacaatgtttttcaaaactgatgtaacaagcaaccatgtaagatcaggcaagaacttccctaagtttagtcttgttttcaccaacgaagaacagtcctcagagtatctccatctatagtaacggtccaagctttgttccttgcaaaacttttgaaggatggcgatttcgttgagtcccacgagtaccggaactttattcattctatgcttctccaaaccaatgcagccttggtctatataaacactgacatggaacgtacacaagcattcagattcatgaggcttcctctctatagataaaacccttgcatccacccaaacctacaccaccacacacacacacacacacaaaacgtttcaaaacagcaaaaatgcgcatagatttaaagactttcatattgaagaaagtgaatgtactggttctggagtctcttcatctctctgataaagaacgcaaacatcgataccgggtcttaaaaaagaagtacagtcgatcaaagtcgcctttcttgatctaattcgaagcctctgaaatggttttatatcatccaaaacttgtccattttctaagagacgcattgtcatcgttccattctcgatccttaagtactccacggccttccatgtcccccagcagaacacctcgaaagctaccacaacagacaaaacagagcattttaggtaaagaaacagcagtcattcaaatctcaatgcatgacattttaggtaagaaaataaaacatcagatcttgtaaaacacttacgacatggattaaatggatggttaaactcaaagtaatgctttctcttcatttttttctttcccttcaagatcacttgtggatccacatatgatctcctgtaaccaatacatgtatagcttcattaggattcattcaccacttgacaaataaaaaaaagattcaaactttatctgcaactagagacaacccagaacatatatgatatatgaactttaaaacttgatcatattggttaatgtgcgaaagcaacattattgtactaaaaaggtgtaaaacagagtaacagtgtcgtatcaaaatgaaaaacgaaacatgatcgtcatcaacaacaaacaaaacccagattgaaaaaaccacaactttatgatcagaacacaaaatcaatatatcacctttgagggaaaaagagagttgattctagtccatgattgacactaagaggaaaataagagaaggaacaaaatatgataaatagaaaagggacggcgaagaattcaataccacactcacgcagaatcttggggacagtgtagaactttttattttccctttttgcatgaatttgcgcagaatcgataaaaagtgatagagagaaataaagagagactgaaaaataaagtgagagaagaggagggtttaaggagtgagggtattattgtcatttccatgtacgtacttctttatatgggaaataaacggctgcgatttggtctgtctttactatctttagattttactgacacaaagagtaaaagccaagttgtgtgcatggtggcctattgggtccacattgagataggtttatagggaaaatatcttacacaaattcatgaacttaacatttagtttgcacaaaacaaaaacatttacttagtttgttttttaattattatactaaaattagtaaaagatgagtttttaatatggttttgatatcaaaaaagaaacttttatttttatttcaagattctaaaagaaaatatcatttaatattttaaaaagtagttaagggtaacggtgaattgctgtattttctttactccatttctaattttttttctctttagttttttatttttctgtttaatatgttggaagatcaaatatctagttttctttagtagatttctctatttttgtttatattatttttctattttatttctgactctttttttaattgttgtatcccttacaaagttaatgcaaaactgtttttttttccattaaatcaaacaaacactaaaatatataacatttggaaatgtaaatgatagagttattgtaaatcgttggatatgtaatgcttttgaacaaggtctatgtgagctttatcttatgcataaaatatgagttgttaccagaatctgccttagtcacaagctagggaagcatgtgtttacggtataagatatagttattaattaaccgtcatctattttccaaatatctcttataactatactggttaatcgttgggtgatagaacaataggtagtaggttcaactcttacacttacaaaaatgttttttttttgatatgattaggccttttttgctggtggcactcaaaatgttttgggtggctatgaatgttccatgatttgatatggatagtaaaatatataatgtttaatagaaaactttacttaaatatctttttctctttttagctttagcaacagctctcactagaatcgaaaagaaaattataaaatttagagaatatatagaaactaacctaagactcgaaaagaatcaacgaaataacctttgactaaatggacactatttgctatatgtttttttaagggtttttggttcatcttatccttttattatcttcttctttttttttcttgtttggctgcaacattatagtcattctctctctagatatctttttcttttactgaatctcatcaccaccacattccttttttcctatcttcctctcgttggatatgtgattccatcaattctctctttctttcttcctagaagctatctttcttatccctcgtatattttgtgtttctcctctcaccggattttctccatcactcgtcagtgtgacatataagattatatatgattttataaacgcatgtatttcaaggacaaaacatgctattatcattgatttataaattttgtcatgctatccaacaatctctctctctctctctctctctctctctctctctctctctctctctctctctctctctctctctcatctcaccaacattcctcactaccatcgaattctacgatcaagtctctagatcaagaaaacaactaattttttttgttggtaggacaaaaaaacagctaattggcgacaacataagaagtcactaatcagtcgcaaaacccctacttgcgacttatttgcgactaaaacacgtatttcctaaacaacgagtgttaaaataatcactcgcataacaaactaatgtgcaaccgatttaagtggtcactatttagtcgcaatgtcgtcgctaagtatagcgactgttatgcgacatctttgccacaacatcacaattgttttgtgaacgttttggtgattgaattgctactactttgtgattgattagaggtttaattcttgatttagccttcaattaattcttgataaattgattataattctaatttattatcaacagacttgttaacacataagaaatgtgtatttaaaacagatccaacaaaccacacattcttgttcaattcaaaaccaaacaacctatatgttcaaaacaaaacaaaaattcttattcaaaccaacacacgttttcaaattcagagaaggatggaaaaggtacctatgtttggacatcagcagtagcgggatcaatagattgagactcgaggaaggcgagaatgtttgggtcggttgcgctcaagtacttcacgatcatcaagtgctcagctgcaatttgcaaagcctcttcttcacgctctgcttgtaaagtttcttgttccttcattttgcagttagcttccttaagctgtgtttgcaggcttgtgaaagaagaagagcttttcgggtacttccgcttctcgttggtgtaatttcctactcttctaactttagaatattctcctatgtcgtttgtgacagtagagtgcataaacaaaacaaagaatattagttcttaacagtttttcaaaacaataatataagaaaaagcaaacataaagaagcacactacttgaaaaagattttgtcatcctcttcttaagatagctctgatcgacgcgaagtaccatcggaagactcgtcattctcaaggaaaaccaacttagctgcctttttctttttatttaatgaacttcttgtaatatgacccatgaaactttttgtaaaaacctttgtaatcatccggtaagctttaacttgttcttatcatacctacaaacacaaaataaaaaaatgcatgcaattagaaacatacaataaaagaacaatgaatgtaatcttggtaaccactacaagctaaatggaaaattagacaataaaagagcattttcaaagattgaaaaaatcacaattttaagactacaaaggttcaatcaaactacaaacgatcttgaaacataaattttaatcgtacacatattcaaactttaaccacaatctataagattcaatcaaaacataattaatgagatttaatcgaaccacattttaagttaagacaaagattcctacacaatctatcttcttaattcctatacagagatttcttgataatctatataacctatcttcctagttcctacacagacattcctagcatctatacaatttataagatggtaagagaagatacttaacaagtggttccagactccgatctgggagagatgacggtggtatattgcccacgggctgactgaacatatctcttataaaggagcgagcacatcttccgagagagttgagtcccttagattcagcttcctcatctttttccacatgtgatttttgcgcttgagaaatgtgatgcgatatagaggctcgaagttgaggagatggtcgtggttgattcgagcttggaggttgaatcgacgttggaggttgaagattcaattctggaggctgattcgatctaaacgctcaacgtagaatagatccagattctcaaacttgattcgatctagaggctcattgagacaatctatatcctcgaggttgagtaaatagagaactgattaagatcttcagctgtaggagagctcctcgccgactataacagaatcgtcggaggtggatagtatttgtaagtaggacctgttggaggctagtcgattgggacatgattttaataagactcaagatatgaggcttgagagggttccccgacgtgaatgtgtacttgctaggaagactggtaagtctttgattcaacgtcagttaatcacctgaagcaatgggtcaatttgaggcgttttccataacccttcttcctcctcctcctctcttccttcttccacgaaaaacaatatgaagactgagatctattatggttcaactcgatgaagattagagtttgtttgcatgaaaattgagagagataaaagagatagaaatggaagtgagaggattagggttgtcaggagaggattataatttgtcgcgaaagagtcagtgcttttatagttgggctgttaagctatagcaaatggttcgagtctacaaaatcccaattaaaaggcccaaatcaaataacattgtctctaaacaatagctaattagtcacctaatttggtgtctacatgtttagtagctaattagtcgcctaatttggcgactaaaccacaaatatttaaaatcaatctcaaactaccgacatattagcgactttatactgttttagtcaccattcaaccactaaaaggtcgcaatccagtcacaacatttatcaattgcttttatcagttgcatcatgcagtcactaattccctcttttcttatatatctcctccattagtgaccttcatggacgcaagtacgatgaattcattcaaatatggtttgtatcaagaagtaattaaacattattttcctctaatccttttcaaaaactcaaatggatgcatcacgtgatgtataagtagttgttttggggattttggatactttttcattcaattaaaaaaaatagttaattatgagcaaaagaaacagaaacttgtttctcatttattatatatgacaatttttttaaaaatgaataaggttaacgtaaatgacacaaataaaataaaaaagagataaacaatatttagtactgtgtattacatagacataagttattaagcaaaattaaggtaggcacaattacatttagtgaagtcacatgaataattactatttatagcataacaaaaaattggtataaaatgctctttaaagtacttcaatctttgaaaaagaggtgttgggttaaatcttagcaccatttccaacagtcttggatagttttcattttcatgtcttgatcgtctgtgcagacaaaatgatttccttatggtttgcatggtggttttcttgtcttttctcctgacattggatttgtcaataacttgtcggctttgaataaattgcctatatataagaagtaaataaagagttttaaaataccatggaaaatattggtaactaatgattattaattatgagaaaggcgtaaattatatgacagacattcatgaagattagcgagtgaaatgaggatgatacagaataccgctattttggatgacgacattgtatattttttcttgggaaaaacgttttattgttatatggtagaaaaccttacatgcaaagcaaatcctttatcttataaagcacaaatcacatgaccaatagaattctgccacatagatttctatttcattctttaatttaatttccataaaaacaggtttaaaatatatttgagatcgtgtaaataaaaggaaaaaaaaaaaaaaactgactatgaacaaaaccgacattcctaattttaaggcccatataaattagagtttgtttgcaaactaatacgtttgtgaaaagtaattcgaaaactaatacagttactatttgcatttggaaaagtagtacagttcgttactgtatcattttccatgaaaccatatttgccattcagaatcacaaataattacgggtagtgccactgaaacattgcaatcgaggtttttttggagactgttcaaatttctctaaactctgagaaactgttttccagtttatttatgagttattcccaaaatctctgagacaatgacgaagaagaaatcagtgaaatcaaagaatccaatcggtccagtccaaatcaaacaagaaaataaacgatgaaatgcaaaaagagaatcaaaccgaggtaatcccgaaaaacgattcttttcctcaaactcgaaaaatgattcctttcctcaaactcaatccaatcgtaattgcttagggttcctgactttttctttgattccgtcgaagatttagagaatttggggttacaatctgactactgttacttttgtatcagttgaatcgaatgttgcatgttctccggcgaagtctccgagcaaaacgatttccaaaaatatgaataaaggtaaacgaggcaccagaaacgactctagcaaaggtattagtttccgaattacttttcacaaacgtattagtttgcaaacaaactcaaacgtttatgctttagtcaatttttatctgataactgtccaaatattgtttggattttgagggaatctgttgtgaataataggagatgaccgagcctccggagtgtccccggatgaaaccgaaggcggagaaaacgaggctccaaaccctagcctcccttgccgtctgatgcatcctgacgacttccctgataaggttcgcctcaacatatactcgaagccagaatatatgggaacgctggtggaactgttggagggctccgaggcctgggatgtgttgctaggttcccagttcaagaaattatttgaactgcctgttgccaggtgttctcattctgcaaaattgagtcatggaatgcttgctagacagcttttgacacaacgaaagcatgaattgtggactgtgtatggggggtatccactccgattctctctcaaagaattccaaatcacaactggcttgaactgtgataagcttccaactgattctgaggtagaagatcaccaagaccctgcctatctatctgtttggaatcgcttatttggggagaagtgtgtagttacagtcatggatgttgttgagatgctgagaggagatgtcaatgctgagcctaggaagtgattctcaacatggaagaagttgagtctcgcattgatagtcctgcttgatggggttgtagtttgcagcaacaggaaacaacatcgggtaagtagttcatatgttgagatgcttcatgatttggaattctttatgagctacccatggggtcgagttgcttttgaatcaacaatggaacggtttggcccttccactggggaaaatgatcctattgctgaactcaagagccgtctatcacaaaaaagcagttgttgctacgggtttccacttgcgctccaactgcaagtcctcaactccattcctgccctctgtagtaggattaaagagcctgcggattttaggattttcattcaaaggcctgctgttgacctaggtcgcacaattcttctccgggagtcagatgttattgacgctgaatgcgctggtaatgtaagtaataatcactaaactggttatatgattgacatagagttaagttttagagtaatgcctaaaatcttcaattttggattaatatgtttattgattatacagttgacagtggaatacacactataccagtcagaaacagttaatggagacctctgttggccaaatgaagatgaagattcaggggtggagctgataatcactctgatcaagcaaaaacaccgcttcaactcacatacttggcctgtacacggcctcccatgctctcccaatgagcctcctagtgtcacagttcctgaaccagaagaagctcaatcagcaggcaaggacggagtagagtttgttgaagaaagagaaccaaaagaagctccattaggagaggatgatgacgtggagtttttggggtccagagaaccaaatcaaagtcaaacatatgatgcagggtgtgttggtgataaatctgaagaccccaagtcaaggctgagggctgagaagaaccctatccgtcgcaagccatttacgaggtcagccgggcgtaaagccactattgtcgatcccccgcccactgggaagaagaagcccatttctaagacaaaacaccctcaacccaaaacctctgctgctgctggagtcgtgaaacacacaactgatggcggagaggcatcgcagactaaggcaggaaactctacttctcagtttgtgacacatgctgagtttaccgacttgaagtcttggtttgctaagcagctggtagagctccgttgcaacataagtgctgatatcatgaagaatttagaggataagtcccaaaaaaatatgcgagggaatacagaggaagataaacctgaatgcagggagaaggagaagactgagatgccagagtcgcggaaaagaaaaagagaagattatgcttctttatcttctggaatctcatcctcgagtatgaagaatggtttgtctgaccgtcccaatcgtaaagattgtgtatcaactgtgaatttaggaacctctgatggtacatgggaactttatgggtcagcaaagactatttctgaggtattgccttcttgaccatatcagtcaatatttatcgttaacaagactgataatcttatggatttgttgctcaaatgtagaaaatagcgacagaggttcctccctcaccaatgccaactgaagctgcaaaagaacctatgagcatagctgttgaggatgatatattagctggtgagggtgtgactgcaatggatattccagaggtattaattaagtagacacaaagaacttcttatcacgaacgaccctcttatgcttattgtaattcttattattaactggtggtactcttttgcaactatagaaaatagcagagattcctgcttcttctattccaaccgacactgcaaaggaagctgagaaggacgcaattgaggatgatacctttggtgaggtaataattcaacaaaggcacatgcagcattcccataccaataaaatatgtttcattattgaagctcttccaacatggttggattatacaggaaaaccaaacacaaaaccctgcctctccaattccaaaccttcccaaaaccaaggaaggagaggccgaggaagaaatggttgaggaaacaataattgagggttcccctaagcaaaggcctgattcaccggtaacacctatagctcaggttaatattctgaattgcactgagccaatagccatgttctacaaaagtgtaactctttttttccgtagatcatacccgacaggcatggagattctcctcttaatggcgtgaaataccggaatatgtcttcgattgttgcagcatcacctgcttactttgttcaagagcggaccaatgtgcgtcagccacttctgggtaagcgtgttcctatacgctctcgcttcctcgatacagctgagtacagcgttgatcccaggataaatgctctgtttaagagcagagccaaggaacctgcttacacacctctgccacagttggatgatggacagtttcagacatttagagagttgcttgaagatgatccaaccaggtatgttccttgactcaatcacaaccttggttgacaacagaaaagctggatttgaaaatctgtattccttaatgcagagaatacacaatttgcacgggtcacaaactgactaatggccacttcttggacattgctacgaagcagacatgggtcacaacagaggtaacatttggaaaaaaatatatatttcgtggctgcattgacttggataataatttggttttacatgacttatttcactatatgatacagcatatgcagctgataacaagcatgttggtaaggcgtcgtgggaaagcgtataaggagggttgccatcattgatacatggtttgcaatgcttctgtcaacccacaatgatgatttcatgaaatgcgagaacaaggcaaactacgactgggggtcatgtgtgaaggcgtatgtaacaggaaaatctactgggattcatatgaagtcagaatttctgaaacatgtcgatgttgtctacgtcccaatgaactggggatgttctcactgggtagggttggtaatcaacttgaggctgcgacacatagacatcctagactccttcatgtccccaactccagatgaagctgtggaatttctaatgacaccaatagttcataacatcccttgggtcctgaagaggtattgctgcactactctgacaaaggacctaacgacagagcctttcacttgttcacgaataacaggtttgtacgacaacaaaggagacggagactgtgggcctgtttcatgcaagttccttgaaatgcatactcatggtatggattacgcagacatgtcagcgctaacagatgaggtagtgtctcgcattaggaaggtttatgcgatggatacttatgctgcttttgttgaatgtgaggacgagtactagttttattctaagagacgtttatataatttgtgtaatattgaaattgtaggatgttaagtgtattttgaacctaatttgtgtaatttgagtttttagaacctaatgatgtttgcaatttctgctttaatttgagtacagaattattgcaattcggtgaaactgtccagcattattgcaaatcgaaaagacaatatctgtacacttctttgaaaaagtaatgttttctggaatgtaattgtaaatatattgcctatttctttagtaataatacaaatagaccaaatacttaagacctaagcacaaaacatgatattgcaaaacaaacagttcaacaaggtgaagattgttaataaagtcagcaataaaccgtacagtaatgctgatattcaggaagattgtatctgtacacctttttgggaatttagacctatttatgaaaggacttcttcggtgaatggtacaatgctgaaaccgtacagtggtgtagcaattcaagtattcagaatctgtacacttagtttggtattctgattctgtttatgtgaaggactacttaagtgattggtacaatgctgaaaccgtacggtaatgtaccaattcaggatttcagcatctgtacacttagtttggtattcagattctgtttatgtcaaggaatacttcggtgattagtacaatgctgacaccgtacggcaaaactagcaattcaggatttcagcatatgtacacatagtttggtattcagattctgtttatgaaaggactacttcggtgattggtacaatgctgaaactgtacagttatgtagcaattcgggatccagcatctgtacactgagtatggtattcagtttctgtttatgaaaggactactttggtgattggtacaatgctgaaaccgtacagtactgttgtattttaggggaactacatctgtatactatatttacaatccatctgaaggaatgacatcagtactcaaaagtctcccacattgtttatgcaattcaagtattcagaatatgtacacttagtttggtattctgattctgtttatgtcaaggactacttaagtgattggtacaatgctgaaaccgtacggtaatgtaccaattcaggatttcagcatctgtacacttagtttggtattcaggttctgcttatgtaaaggaatacttcggtgattagtacaatgctgacaccgtacgacaaaactagcaattcaggatttcagcatatgtacacttagtttggtattcagattctgtttatgaaaggactacttcggtgattggtacaatgctgaaactgtacagttatgtagcaattcgggatccagcatctgtacactgagtatggtattcaggtcttgtttatgaaaggactacttcggtgattggtacaatgctgaaaccgtacaatactgttgtattttaggggaactacatctgtatactatatttacaatccatctgaaggaatgacatcagtactcaaaagtctcccacattgtttatgagttcaaattgatatcatattatgtggttctatttaaatttttgtccttttttatttaaaaagagttggttggtattcagtacagctaggtgggtgtacggaactataatctgtacgttatgctgactccaaagccaccgaggtttaagccatgttctatatattgtttagtttacttatgatgagctcggttaggttagggttgtgatgatcgtactgattatttagtttcctataaataggaacaaaaacagtccataactaaaaaaaaaaatctgcaactaaccaatctcattgttatctatttctcttcctccctaagaaatctttctctaccttttaaaaaagagactatgtctctggcagatctaccggacgatatattccaaatcatagtaaagaaatttggagatgaagacgcctattacctagctccagtaatactcaccaacaaacaaggaagggacattgggctgtctaaggaggttgtacagtcagcgaacttaacagctctgtgtcttgagccccaaaagatatttccatgtggggttgctagaaccttctttacacattgtttggacgttgagaatcatcaagctgtttattatgaagctttacgtttaataacccgagagagagatatctcgggttctcttgctttgttaaatcaacttgtgcctactcatgagtcagcaaatgtggcatatgcgatgttccaaatgtgtgctggtagaggtgatttagctggagctaccttcgacatgatattcgatgagttgggagatcgtctttggttcaataattactcgccagatttggaaatggaatgtgaaggcttgattgaaacactcttctcatatgaacctcctaatgaagatacctttgatccgatttgggagttcgcttattctgagaggatatgtgtccgtgattgtgcttattggtatgaagaagagttttattgcgaaggatgctacatcttcaatgcagcattacgtatatgcgaaattctctaaatcttctagtattaatgtaaaattataatattctacttaagttaaaaatataattatgtggcatttggtatgattatgtaagcttatgtaatcttttgtaagatcattccaactttggaaaaatgttggaatgatttgcttgtataattataatgtataattataatattgtatttcagttaaggtttgaatttcgtaagtaataatgtattattattcataacaaagtccctaattctcgatgaatagttaaggtcatgcaacggcacattgaagattcttttgcatgaaaagcagtaattgtgagtatgagtgggagggagaaagtgatatcactttctgtattttaaaaaaataaaagagccatttcgatagtggggagttcgaactactgtcaaatcggcttgtatgcgtaagaagaccatccaaagtttgtaatggaaataattcaaataatatgtttggtttaatattttattctaaacactaataattactgtcaggagggagtaagactcagcacaactaatatagatacttttgaaacacatgtcaaatcatttatctatccaacgataggcaagtgcatggtcaagtcaggaatttaaatcatatcatcaactcatcggtacatttggcttctcaccttatcacaacataaccgaaagatatcccaaatcttgttcatttgaaggagggaatcatttctgcctaagaaacacaaaggaggacaaatctgtatatatataaaaagaacaaaacggataatgacacaaacacttaagtatagaaaaatcgtttattgttatgacgagttagataatgaaggaattgttaggacgagttaaaaaataatgttcgaattgttataacgagtaaataagatggagaacattaatcccatacatgccgaaatgttacggaaatcatagaaaaaatatattacataaacaaatatgatacatccaaaagtgccgaaactaatacaataattatacaaaaaaactaaagacaatagagagagatcaataattatacaagggattaatagtagcaactaacaaccacataatcgcaagatattttagaacattgatcaacaaaggaaagtaaacgagagtttgggactcagatcatttgacaaaccttcctagacaaccaccatagataacaatcattgcaaaagttctcataaccagctgaagcaacagcgcagtccttggcgcaatccggcgacaggattcctttgcacatagggtagataaaagacttccggtaagcagtgtgggttatcctccgatatggtcgtaactccctgaccaactcttctccccaaaccctgactctctcggtccctaaaggagcatggaaaatcccgaactgctcaaggaaatgaaccgccatttcttcgtttccaacacacatagagaatataccacaagctatggttgcagcgccatcttctggaaccaactaagctagaagttctataccccccttgaggtcacaaccttcagccaccacccttaaaccctcataatatatgacgattttgtttccagccttgagacatctttcgaaaaatggacggtacctcccttgcatcacgattccggtctcccggttccggaaagtgaacaaatcacttggatcagaacagagggagtatatgcacgcatccttcaacacgtcatctctgtacaccaagtctctaccccttcggccagccttcaatataggaccaagtagccaccaccgatcatcagcaacaagcttaacaattttcgccaagatatcatcagggatgtcaggcatttcgatacccatattgttctttttaaatgagaataaacgaagatagtttgttaggttaggggttgttatatataaattttactctcttgtataatctctatatataatccgaaataatatagtagctcgggaagttacagttgagaaataaattaattctcataccaaacatatttatgtcatcttataatttaaaaaatataaatgtttaaattaaccactccaacaaaaaacaagatttgcgtacggcgttataaaagtaagcattttgatttacatatctgtacatcgcatctgtacagcgaaaagaaaagcatgacccgttgttatctgtacaacgatatgaagtactgtacggaaatatctgcgatactgcaaaaaactagttaaatgagtctggcaatataaaataattgctagccaatcatggatattagagttctcttgttattaacctgtttgccacacaaacgctggatacgcaaagcgccatctgtacagttaaacggcagttatttgtacatcaccatctgtatagtgatgtaccgttatgtaagtcaatctattttaattcatccgtacagcaaagtcgagaatggtctggcaaaaagcgttcagtaatataaataagctactttggggggggggggaaataaaaacaaaaagtttaaatgcaatacatcagcattgaaggttgggtcatacattgaaaatagatgcatacatagattaaaagatatatacattgaaagagatatacattaccgcttctaaagaaaatagacattcttctgaaaaatagctccaaccatatttcatatgaatgaccaccaattaacaaaaccaaaaaggaaccggaccaaaaaactccatatgttaccaaaaacttcccaattgattgtaaaaagccatagcgtcaaccgaggggattcttgcatgtaacgcgattgtgacctacacctccacatctcccacacttattaggcgttttagactttttattcccctacagcagacataaattatagttaccttgggctaatatagaaatctgtcgatgtataaaacaatattttacctcgtattccccaaccgagtgaatccgcaacttcggaggtctaccgggaggtctttttgttatcgggggcattaaacagagaacccttatttcctcagggacatcaacctcagacgggtcgcgcacagggaggattggttgttggaccgttggtgaccacattcctagcctatgcatctctccaaccaaagttctgaattccaaacccctattatgagctgcagccattgcatgcgtacacggtattcggattttctgaaattctaaacaagagcaagtctgtttttccaaagagacgtggaactgtactccatcctttgcgactacttcaaaatcccaggccccaacggctaaaactgacattcccaaaccacctttgaaccgtttcataaattcccttttaaccgaaatcggaatgtcaccaactaatctagatattttaagccttcgtgattcaaaccacctagcaagcattttccttataaattccaacaatgccacaacaggacttcccctagcaggtagtagagcattgttcaaagactcagcaatgttactggacatcaaattatatctctcccctgtaaaatgaaccctactccaattcgcaagtcccatctcttctatgtatttccaacagcccatgttccttttctttatcctttcacatatatcatcaaaatctttgatacgaaaggagttacctgcttgccacactaacgctggaaggccactcttctttccatattgataacacccaaaatgggctatcaaataagtaacagaaaagagatgagaaaatataagaaatagaggttgaagtgaagaatcagagatgagaagagaagaagaaaggagaagaagacattgattgtttttttattgatcttttgataatgtttacagagaccatatgcaatgataaatagaagacaaactaaagaaaacaggcttaaacaataagtcctgtacgaagcccactaggcccaatcgtgatcctatcaatactctcccctcgaagagccaacttgtcctcaagttgcaggctcatcgctaatccgcactctacacgcttctctctctctttctcactatttccattgtgcatcagcaatttaatcagataccataacaaagaaactccttcacgtacctctggtggccttagcaagtggaacacaccattggtgagaaattctgccaaatgatttgcaaaaagatatgttctgggctccttcatcgtcactatcctgttcactagcatgcttttaagaaccttgaatctttttcccagcccgtgaatgaaactctgaaattttttcttgatagcatcaccttcattgattcttagcttcatattctgagttcttttttccttttctactctagtgccatttatcttgatatactgaggtctttgttgcctctcatgccacattgaagaaaacgtttcgaccatccaatcggttccatgaaacttctcgattggcttcaatactctacctatctcatacacccaatcagctcctcctggatcaaaaggtcgtgtgtcaccagtaattataccaatcgtccatccgtttcccagtgatagcatttgagcatctcttttcacttcattgtgcttaagacaacattcctctaaatatgtgattcttaaacttataatcaaaacaacttctgagaaactccttagcttcttctttaatgtatcattacccagttctttaaccatacctttactccccccagacaaactcaccttgtcctcaaggtgaataaaagcaatggttaatacaaagagcttctgtatcataactagtagcttcttttgtggaatgtgcagtcttaacttcaacactcgatgaacttgtataatctccaatcccttattagcaaacatcattaacagcttctcatctcctaatttattacacaaaacctgtctcacgtttaaaccaccacgctcccatacacggctagctattctagaatcaactggtcgtttcatgtcggtacaaattcgaaacgctagacactcgacatcatcaacggttctatcacaaccgtgaaataccactaaccagcccagcagaacttgcttggttaacttttctccaggtttccacactcggttaacgagggaaacatcagagaattccttgagccttaatctttccttaacttggaaattaaggtagtagtgaagaaaagttccaaaatcgtcttgtagctctcttctcatctttactttggtagtactttgcttaaggtcttcatccttaaccccaaaaatgatccaatcctttctgtcttgcttccgcattaacttcacatatgggtcagaattgtaacacttatcaaaccattccccatgaactcggttaactagtaagaggaaccccccaggctcccatactcgacttgccagaaactcagaaaacagttcccctaaaagcttagagactgaggtttggtttccagcagaacaacaatttgggaaaaagtcatgacttgtctgcatcttctggcctacaaccagccactccacaacataagccttgcatctgacaatttcaacagaaaggacttccagcagagaaccttttgcataaagctccttaaaccatgataactccttaatctctagaccgtgatatgcaatcagcaacttctgattccaacccaccaataacttcatgactcttgaaaatttttgcatcattaagctt

SEQ ID NO: 1339 - DNA, 108227 bp, Arabidopsis thaliana
gaattccaaatcacaactggcttgaactgtgataagcttccaactgattctgaggtagaagatcaccaagaccctgcctatctatctgtttggaatcgcttatttggggagaagtgtgtagttacagtcatggatgttgttgagatgctgagaggagatgtcaatgctgagcctaggaagtgattctcaacatggaagaagttgagtctcgcattgatagtcctgcttgatggggttgtagtttgcagcaacaggaaacaacatcgggtaagtagttcatatgttgagatgcttcatgatttggaattctttatgagctacccatggggtcgagttgcttttgaatcaacaatggaacggtttggcccttccactggggaaaatgatcctattgctgaactcaagagccgtctatcacaaaaaagcagttgttgctacgggtttccacttgcgctccaactgcaagtcctcaactccattcctgccctctgtagtaggattaaagagcctgcggattttaggattttcattcaaaggcctgctgttgacctaggtcgcacaattcttctccgggagtcagatgttattgacgctgaatgcgctggtaatgtaagtaataatcactaaactggttatatgattgacatagagttaagttttagagtaatgcctaaaatcttcaattttggattaatatgtttattgattatacagttgacagtggaatacacactataccagtcagaaacagttaatggagacctctgttggccaaatgaagatgaagattcaggggtggagctgataatcactctgatcaagcaaaaacaccgcttcaactcacatacttggcctgtacacggcctcccatgctctcccaatgagcctcctagtgtcacagttcctgaaccagaagaagctcaatcagcaggcaaggacggagtagagtttgttgaagaaagagaaccaaaagaagctccattaggagaggatgatgacgtggagtttttggggtccagagaaccaaatcaaagtcaaacatatgatgcagggtgtgttggtgataaatctgaagaccccaagtcaaggctgagggctgagaagaaccctatccgtcgcaagccatttacgaggtcagccgggcgtaaagccactattgtcgatcccccgcccactgggaagaagaagcccatttctaagacaaaacaccctcaacccaaaacctctgctgctgctggagtcgtgaaacacacaactgatggcggagaggcatcgcagactaaggcaggaaactctacttctcagtttgtgacacatgctgagtttaccgacttgaagtcttggtttgctaagcagctggtagagctccgttgcaacataagtgctgatatcatgaagaatttagaggataagtcccaaaaaaatatgcgagggaatacagaggaagataaacctgaatgcagggagaaggagaagactgagatgccagagtcgcggaaaagaaaaagagaagattatgcttctttatcttctggaatctcatcctcgagtatgaagaatggtttgtctgaccgtcccaatcgtaaagattgtgtatcaactgtgaatttaggaacctctgatggtacatgggaactttatgggtcagcaaagactatttctgaggtattgccttcttgaccatatcagtcaatatttatcgttaacaagactgataatcttatggatttgttgctcaaatgtagaaaatagcgacagaggttcctccctcaccaatgccaactgaagctgcaaaagaacctatgagcatagctgttgaggatgatatattagctggtgagggtgtgactgcaatggatattccagaggtattaattaagtagacacaaagaacttcttatcacgaacgaccctcttatgcttattgtaattcttattattaactggtggtactcttttgcaactatagaaaatagcagagattcctgcttcttctattccaaccgacactgcaaaggaagctgagaaggacgcaattgaggatgatacctttggtgaggtaataattcaacaaaggcacatgcagcattcccataccaataaaatatgtttcattattgaagctcttccaacatggttggattatacaggaaaaccaaacacaaaaccctgcctctccaattccaaaccttcccaaaaccaaggaaggagaggccgaggaagaaatggttgaggaaacaataattgagggttcccctaagcaaaggcctgattcaccggtaacacctatagctcaggttaatattctgaattgcactgagccaatagccatgttctacaaaagtgtaactctttttttccgtagatcatacccgacaggcatggagattctcctcttaatggcgtgaaataccggaatatgtcttcgattgttgcagcatcacctgcttactttgttcaagagcggaccaatgtgcgtcagccacttctgggtaagcgtgttcctatacgctctcgcttcctcgatacagctgagtacagcgttgatcccaggataaatgctctgtttaagagcagagccaaggaacctgcttacacacctctgccacagttggatgatggacagtttcagacatttagagagttgcttgaagatgatccaaccaggtatgttccttgactcaatcacaaccttggttgacaacagaaaagctggatttgaaaatctgtattccttaatgcagagaatacacaatttgcacgggtcacaaactgactaatggccacttcttggacattgctacgaagcagacatgggtcacaacagaggtaacatttggaaaaaaatatatatttcgtggctgcattgacttggataataatttggttttacatgacttatttcactatatgatacagcatatgcagctgataacaagcatgttggtaaggcgtcgtgggaaagcgtataaggagggttgccatcattgatacatggtttgcaatgcttctgtcaacccacaatgatgatttcatgaaatgcgagaacaaggcaaactacgactgggggtcatgtgtgaaggcgtatgtaacaggaaaatctactgggattcatatgaagtcagaatttctgaaacatgtcgatgttgtctacgtcccaatgaactggggatgttctcactgggtagggttggtaatcaacttgaggctgcgacacatagacatcctagactccttcatgtccccaactccagatgaagctgtggaatttctaatgacaccaatagttcataacatcccttgggtcctgaagaggtattgctgcactactctgacaaaggacctaacgacagagcctttcacttgttcacgaataacaggtttgtacgacaacaaaggagacggagactgtgggcctgtttcatgcaagttccttgaaatgcatactcatggtatggattacgcagacatgtcagcgctaacagatgaggtagtgtctcgcattaggaaggtttatgcgatggatacttatgctgcttttgttgaatgtgaggacgagtactagttttattctaagagacgtttatataatttgtgtaatattgaaattgtaggatgttaagtgtattttgaacctaatttgtgtaatttgagtttttagaacctaatgatgtttgcaatttctgctttaatttgagtacagaattattgcaattcggtgaaactgtccagcattattgcaaatcgaaaagacaatatctgtacacttctttgaaaaagtaatgttttctggaatgtaattgtaaatatattgcctatttctttagtaataatacaaatagaccaaatacttaagacctaagcacaaaacatgatattgcaaaacaaacagttcaacaaggtgaagattgttaataaagtcagcaataaaccgtacagtaatgctgatattcaggaagattgtatctgtacacctttttgggaatttagacctatttatgaaaggacttcttcggtgaatggtacaatgctgaaaccgtacagtggtgtagcaattcaagtattcagaatctgtacacttagtttggtattctgattctgtttatgtgaaggactacttaagtgattggtacaatgctgaaaccgtacggtaatgtaccaattcaggatttcagcatctgtacacttagtttggtattcagattctgtttatgtcaaggaatacttcggtgattagtacaatgctgacaccgtacggcaaaactagcaattcaggatttcagcatatgtacacatagtttggtattcagattctgtttatgaaaggactacttcggtgattggtacaatgctgaaactgtacagttatgtagcaattcgggatccagcatctgtacactgagtatggtattcagtttctgtttatgaaaggactactttggtgattggtacaatgctgaaaccgtacagtactgttgtattttaggggaactacatctgtatactatatttacaatccatctgaaggaatgacatcagtactcaaaagtctcccacattgtttatgcaattcaagtattcagaatatgtacacttagtttggtattctgattctgtttatgtcaaggactacttaagtgattggtacaatgctgaaaccgtacggtaatgtaccaattcaggatttcagcatctgtacacttagtttggtattcaggttctgcttatgtaaaggaatacttcggtgattagtacaatgctgacaccgtacgacaaaactagcaattcaggatttcagcatatgtacacttagtttggtattcagattctgtttatgaaaggactacttcggtgattggtacaatgctgaaactgtacagttatgtagcaattcgggatccagcatctgtacactgagtatggtattcaggtcttgtttatgaaaggactacttcggtgattggtacaatgctgaaaccgtacaatactgttgtattttaggggaactacatctgtatactatatttacaatccatctgaaggaatgacatcagtactcaaaagtctcccacattgtttatgagttcaaattgatatcatattatgtggttctatttaaatttttgtccttttttatttaaaaagagttggttggtattcagtacagctaggtgggtgtacggaactataatctgtacgttatgctgactccaaagccaccgaggtttaagccatgttctatatattgtttagtttacttatgatgagctcggttaggttagggttgtgatgatcgtactgattatttagtttcctataaataggaacaaaaacagtccataactaaaaaaaaaaatctgcaactaaccaatctcattgttatctatttctcttcctccctaagaaatctttctctaccttttaaaaaagagactatgtctctggcagatctaccggacgatatattccaaatcatagtaaagaaatttggagatgaagacgcctattacctagctccagtaatactcaccaacaaacaaggaagggacattgggctgtctaaggaggttgtacagtcagcgaacttaacagctctgtgtcttgagccccaaaagatatttccatgtggggttgctagaaccttctttacacattgtttggacgttgagaatcatcaagctgtttattatgaagctttacgtttaataacccgagagagagatatctcgggttctcttgctttgttaaatcaacttgtgcctactcatgagtcagcaaatgtggcatatgcgatgttccaaatgtgtgctggtagaggtgatttagctggagctaccttcgacatgatattcgatgagttgggagatcgtctttggttcaataattactcgccagatttggaaatggaatgtgaaggcttgattgaaacactcttctcatatgaacctcctaatgaagatacctttgatccgatttgggagttcgcttattctgagaggatatgtgtccgtgattgtgcttattggtatgaagaagagttttattgcgaaggatgctacatcttcaatgcagcattacgtatatgcgaaattctctaaatcttctagtattaatgtaaaattataatattctacttaagttaaaaatataattatgtggcatttggtatgattatgtaagcttatgtaatcttttgtaagatcattccaactttggaaaaatgttggaatgatttgcttgtataattataatgtataattataatattgtatttcagttaaggtttgaatttcgtaagtaataatgtattattattcataacaaagtccctaattctcgatgaatagttaaggtcatgcaacggcacattgaagattcttttgcatgaaaagcagtaattgtgagtatgagtgggagggagaaagtgatatcactttctgtattttaaaaaaataaaagagccatttcgatagtggggagttcgaactactgtcaaatcggcttgtatgcgtaagaagaccatccaaagtttgtaatggaaataattcaaataatatgtttggtttaatattttattctaaacactaataattactgtcaggagggagtaagactcagcacaactaatatagatacttttgaaacacatgtcaaatcatttatctatccaacgataggcaagtgcatggtcaagtcaggaatttaaatcatatcatcaactcatcggtacatttggcttctcaccttatcacaacataaccgaaagatatcccaaatcttgttcatttgaaggagggaatcatttctgcctaagaaacacaaaggaggacaaatctgtatatatataaaaagaacaaaacggataatgacacaaacacttaagtatagaaaaatcgtttattgttatgacgagttagataatgaaggaattgttaggacgagttaaaaaataatgttcgaattgttataacgagtaaataagatggagaacattaatcccatacatgccgaaatgttacggaaatcatagaaaaaatatattacataaacaaatatgatacatccaaaagtgccgaaactaatacaataattatacaaaaaaactaaagacaatagagagagatcaataattatacaagggattaatagtagcaactaacaaccacataatcgcaagatattttagaacattgatcaacaaaggaaagtaaacgagagtttgggactcagatcatttgacaaaccttcctagacaaccaccatagataacaatcattgcaaaagttctcataaccagctgaagcaacagcgcagtccttggcgcaatccggcgacaggattcctttgcacatagggtagataaaagacttccggtaagcagtgtgggttatcctccgatatggtcgtaactccctgaccaactcttctccccaaaccctgactctctcggtccctaaaggagcatggaaaatcccgaactgctcaaggaaatgaaccgccatttcttcgtttccaacacacatagagaatataccacaagctatggttgcagcgccatcttctggaaccaactaagctagaagttctataccccccttgaggtcacaaccttcagccaccacccttaaaccctcataatatatgacgattttgtttccagccttgagacatctttcgaaaaatggacggtacctcccttgcatcacgattccggtctcccggttccggaaagtgaacaaatcacttggatcagaacagagggagtatatgcacgcatccttcaacacgtcatctctgtacaccaagtctctaccccttcggccagccttcaatataggaccaagtagccaccaccgatcatcagcaacaagcttaacaattttcgccaagatatcatcagggatgtcaggcatttcgatacccatattgttctttttaaatgagaataaacgaagatagtttgttaggttaggggttgttatatataaattttactctcttgtataatctctatatataatccgaaataatatagtagctcgggaagttacagttgagaaataaattaattctcataccaaacatatttatgtcatcttataatttaaaaaatataaatgtttaaattaaccactccaacaaaaaacaagatttgcgtacggcgttataaaagtaagcattttgatttacatatctgtacatcgcatctgtacagcgaaaagaaaagcatgacccgttgttatctgtacaacgatatgaagtactgtacggaaatatctgcgatactgcaaaaaactagttaaatgagtctggcaatataaaataattgctagccaatcatggatattagagttctcttgttattaacctgtttgccacacaaacgctggatacgcaaagcgccatctgtacagttaaacggcagttatttgtacatcaccatctgtatagtgatgtaccgttatgtaagtcaatctattttaattcatccgtacagcaaagtcgagaatggtctggcaaaaagcgttcagtaatataaataagctactttggggggggggggaaataaaaacaaaaagtttaaatgcaatacatcagcattgaaggttgggtcatacattgaaaatagatgcatacatagattaaaagatatatacattgaaagagatatacattaccgcttctaaagaaaatagacattcttctgaaaaatagctccaaccatatttcatatgaatgaccaccaattaacaaaaccaaaaaggaaccggaccaaaaaactccatatgttaccaaaaacttcccaattgattgtaaaaagccatagcgtcaaccgaggggattcttgcatgtaacgcgattgtgacctacacctccacatctcccacacttattaggcgttttagactttttattcccctacagcagacataaattatagttaccttgggctaatatagaaatctgtcgatgtataaaacaatattttacctcgtattccccaaccgagtgaatccgcaacttcggaggtctaccgggaggtctttttgttatcgggggcattaaacagagaacccttatttcctcagggacatcaacctcagacgggtcgcgcacagggaggattggttgttggaccgttggtgaccacattcctagcctatgcatctctccaaccaaagttctgaattccaaacccctattatgagctgcagccattgcatgcgtacacggtattcggattttctgaaattctaaacaagagcaagtctgtttttccaaagagacgtggaactgtactccatcctttgcgactacttcaaaatcccaggccccaacggctaaaactgacattcccaaaccacctttgaaccgtttcataaattcccttttaaccgaaatcggaatgtcaccaactaatctagatattttaagccttcgtgattcaaaccacctagcaagcattttccttataaattccaacaatgccacaacaggacttcccctagcaggtagtagagcattgttcaaagactcagcaatgttactggacatcaaattatatctctcccctgtaaaatgaaccctactccaattcgcaagtcccatctcttctatgtatttccaacagcccatgttccttttctttatcctttcacatatatcatcaaaatctttgatacgaaaggagttacctgcttgccacactaacgctggaaggccactcttctttccatattgataacacccaaaatgggctatcaaataagtaacagaaaagagatgagaaaatataagaaatagaggttgaagtgaagaatcagagatgagaagagaagaagaaaggagaagaagacattgattgtttttttattgatcttttgataatgtttacagagaccatatgcaatgataaatagaagacaaactaaagaaaacaggcttaaacaataagtcctgtacgaagcccactaggcccaatcgtgatcctatcaatactctcccctcgaagagccaacttgtcctcaagttgcaggctcatcgctaatccgcactctacacgcttctctctctctttctcactatttccattgtgcatcagcaatttaatcagataccataacaaagaaactccttcacgtacctctggtggccttagcaagtggaacacaccattggtgagaaattctgccaaatgatttgcaaaaagatatgttctgggctccttcatcgtcactatcctgttcactagcatgcttttaagaaccttgaatctttttcccagcccgtgaatgaaactctgaaattttttcttgatagcatcaccttcattgattcttagcttcatattctgagttcttttttccttttctactctagtgccatttatcttgatatactgaggtctttgttgcctctcatgccacattgaagaaaacgtttcgaccatccaatcggttccatgaaacttctcgattggcttcaatactctacctatctcatacacccaatcagctcctcctggatcaaaaggtcgtgtgtcaccagtaattataccaatcgtccatccgtttcccagtgatagcatttgagcatctcttttcacttcattgtgcttaagacaacattcctctaaatatgtgattcttaaacttataatcaaaacaacttctgagaaactccttagcttcttctttaatgtatcattacccagttctttaaccatacctttactccccccagacaaactcaccttgtcctcaaggtgaataaaagcaatggttaatacaaagagcttctgtatcataactagtagcttcttttgtggaatgtgcagtcttaacttcaacactcgatgaacttgtataatctccaatcccttattagcaaacatcattaacagcttctcatctcctaatttattacacaaaacctgtctcacgtttaaaccaccacgctcccatacacggctagctattctagaatcaactggtcgtttcatgtcggtacaaattcgaaacgctagacactcgacatcatcaacggttctatcacaaccgtgaaataccactaaccagcccagcagaacttgcttggttaacttttctccaggtttccacactcggttaacgagggaaacatcagagaattccttgagccttaatctttccttaacttggaaattaaggtagtagtgaagaaaagttccaaaatcgtcttgtagctctcttctcatctttactttggtagtactttgcttaaggtcttcatccttaaccccaaaaatgatccaatcctttctgtcttgcttccgcattaacttcacatatgggtcagaattgtaacacttatcaaaccattccccatgaactcggttaactagtaagaggaaccccccaggctcccatactcgacttgccagaaactcagaaaacagttcccctaaaagcttagagactgaggtttggtttccagcagaacaacaatttgggaaaaagtcatgacttgtctgcatcttctggcctacaaccagccactccacaacataagccttgcatctgacaatttcaacagaaaggacttccagcagagaaccttttgcataaagctccttaaaccatgataactccttaatctctagaccgtgatatgcaatcagcaacttctgattccaacccaccaataacttcatgactcttgaaaatttttgcatcattaagcttctgttaacaagcagcataatcaacttttgtttatcataaccagctctctctgttccaatccatgcttcttgatcaaaaccagagacttccttgaacctaattcttcccttaatttggtaaagcttctctaacaatatccacttctctagctcagtagttactcccccaggttcccaaacgtgattatcaagcccagagaggaagtgcagagttccatcttggattgctagagcctgaactttttcaccatgacacatatgcttcaggggtaaatctcccactaccttagctataacaatgatctctggatttactatttcataattcttttgcagcagctcctctttcttattctcattcatgaacactctactactcatacacaaaccagcgatttgtttctctaccgttccatgaatcttactcgcattcactatcaccttacttatttccttcgccgacgtagcacacgttcctgcacctttttgtatactcatttccttggccaaagaacactcaaaggattgttcatcactagtgaagtttgtatcagcgtgagacaacacatcaccaacactcaccgacgattgattcagaggaggaaacgagaacgtgtgagggctgtttttctccaccttctttgcaaccacccatttgttattctttgatctgaatgaggcaatcacaactcgatatctatccctctctcttcgtttctgaaattggtgaaattgttgcttgaaacgatctcttcgactccctgtgtgttgcttttccttcgccagatttacagccatcgaattgaatctatcctctccaagatacaatttatttctcggagaacgaactcgaaaggctagatgtaaagattgagaacgatggtctttcttcatttttctttttcgaaccttgtggtaacttcccttgacaagaatcattttgtttctgagaattttagctgtaatgggaaccttagaggtccaaaattcgccagaagcatcgtgagattgaacacccaccatatgttcgacgaaattactcacagaaaaagttgagtttaagacatcatggaggaggtgtcgaagttgaatgttgaggatgttgatggaatcttgcaaccacagcatctccttatcacggcgtgcttctcgttcttcggttgtctcttgcgtttgtggtgtaccagtcaccacccgtgactcgagttcaaatgtatttggtgtactagacatactctcaatgaaagcaccaattgataacacccaaaatgggctatcaaataagtaacagaaaagagatgagaaaatagaagaaatagaggttgaggtgaagaatcagagatgagaagagaagaagaaaggagaagaagacattgattgtttttttattgatcttttgataatgtttatagagaccatatgcaatgataaatagaagacaaactaaagaaaacaggcttaaacaataagtcctgtacgaagcccactaggcccaatcgtgatcctatcacatatctgcctttgacgttccttcttatatggaccaaacaagctccatggtgtgcttgattgaacacaaggctcacaactttgaatattgattgattccgatctgagacaaacgtcaagtcagggccatcttttattatttctgaaagcttgttcataaaccatgaccatgattcgtttgtctcgctgtccactacagcaaaagctatagggagaatctgaaagtttgcatcctgacaactagcggtaagaagacagccaaggaacttaccaaacaagtgtgtcccatctactacaacaaccctccgcagaaattttaacccttttacactagccccaaatgctaggaaaacatatttaaaacgctcatcaccaacgtcatcaatctctgttttcaaatgataaattgtgccaggattggctagttgtaagacgtgaagatataccggcaacaaggagaaagagctctcatccgtgccctgagcagtctcaacagcaagttcttttgctctccaacatttccagtacgttgtccgcacattgtgctccctcaacagagactcgagtaagtctctcgctcttggcccacaaaacgccttcgcatatttagcccttaagagtgcagctacaaccttcgaagtggcatgttttccaaagcggctcctagtctcaaccttacacatatgatccagctttgcctttctcacctcatattcttcactgtcccccacttggtgtgctctgactctccaatcacaacattttttatcgtaacattcagcaaccaggtaatgtttctcatacctagtaaatctgaagcggaaaacacggtttatggcataaatagacaaagcgatcctaaagtcttccctcgatgcaaaagtccttccaacaaacatattgtcatcctctttgctcaagtcaacatgtcccgctttagcatccatatcatcatctccaaacattggctcaatgtcgtcgaacccatagatttggtcaatggttatacctttctgaaatgtagcttctaactctgtcattgtaccaacatgagtatctttttgcataacttttttcctagggggctgctcaacaaaatcatcatccccactgtcttcatatacaacaatttctttttccacatgaagcagacctacagtgtgatcatcgtcatctaacccatcatcctcagattcactcccggaactgagagaaaaggaatcataagagactgctgaaaactctggggcaacacctgaagcaagaaattccggcggtaatactgtattaacgcctgtggtagcgaccaaaactccactagctgacttctccactgcttcgagggcttctaacagaagttcatcacttatgccccagtcaccggatgtttcactaatatctaaactctgtacaataggaagctgggggttggaaggatagactgtgctattcacttgaacagaagatagcaacccagcaaagtaccctctttccactatcgtaacgggtttggcgacaggctgtagaatacctggagatgatgattctccagcttccaaacacttagcaacggttgtgccagtgattatagctttaggagtagggccgactataacagaatcgccttctctaaaacacgcaaacaaattgacagatttatcagcaagacttaaggatttaaagcacctaaagtgccaatcagacccaatcatcgtcggatccggctgaacaccagctaaaagagctatttggtcctcgaatatgtagctaagctcgagagatatggacgaattctccattccaaaaagatgtcgcacttgaagttccaaatcccttaaattttttaaccccatcaacctcatcgccctcccgtgacgacaagaatccatcttgaactcccattcacctgtgctatacaaaatccatcgaccggcttgaacaacaacaaaatcatccactgcaaatgaaattccattatagtcagtctctacggaagaaaactttaaaacattagtaagaactaaatttaaaaatttcttgttctgaatttcaccttccatagtaaattatctgagttgaaggtccttagcaataaagatacaatacccaaactgacaatcatcctcttatttgtttgctataaaacacttaaccatggaaaaaaaatctaaaaattccctccaaaaaaattagctaatctcgagaaaacctaaagagaatctgagtattatatgattttattcaccaacctgttaactaatttcgttgattagatacgctcataaatgccatagtttctctcagctccaactccggcgttgattttgacgacgaagaagtcaatttagattgcaaacaacgataataaatgtgaatatttgtcttaaggcccattaacgatttcatttagcccatacctttctgcgaattatcaactttgactctgacttccgtagacaaaaaccagaactcggctagagggtttgatttgttctacaaaacaaagaaaggcccttaccgtaatttccacaaaagctaatatggcccattttttttgtatctcaagacttctgtatctcacagaacggtgggcccggtgcaatctctaattatgaataggaaccgtactagttccttaattatgttcaaaaaacgtatcatttctcaacatatctctataaattaaacgagttttggtaaatgatagaaaccacgtaaaaatatttttgaaaataaaattcccttaattttctcgcataccacaccacgatcgcacgatctttggaagtttggtaccagatcaaaaaaaatttaaaacccttcatcttcctctaaaaaccaattcacgttggagttaaattcatatctcgctctcacacttcgacaatccgatttctatttttttcttatatatctatgatccatgatattcctgtttacgtacttctctttgtctcagattcattgtctctgtttccaaaatgatcacgtttcaccaccagctctacatattcgaactcaagcacaacgtgagtttcattcacatctcttatatatatataaactaaccctcaaagtctctgtaacaggtgaagcaattaaagatcaactgcagtgagaatgagaaacggaacattaaggtgacccacatatctctacttccacataatgtatgtttctctaccttattttgagttctgcaatgttcagagagtccttgaaaatattccttaaaattcatccgatcaaggttcaagatcaagagatcatttctcagcatttctttctaattcaagaacacaatgagagcttcttcgtacaagtccacgtcactatccatttccatgtatgtttaatatattctcatatatgtctctattggctctaatataattttgttgatgggaattctacatttctggttagattttctataaatatttttatgccacaaagatgaaggaacgcaacctagaagcaaactggcaaagaccttgtggagttatgataatgctaatgagctatcggaatagattataagatgcatcaaaaatccggcatatacactcatgaatcttctgatggataaaaagagttcagacgttttggcaatagagagcacatttaatttgtttgtttgttttccatacgtattctttttttccgtcattttccttctgtattatttcatttgtatatatgcacattatttataagtgtcatatccaacggaatcatttgttttcttttcgtattctttcatcgtaaaactcatcattgtgttcacatattaattcaccaaatttgatttacacaagtaataattaattactaattttcaacatttttaaagagatcagatttatagttcggtcatattaacatcagtaaagcaaatataacattttacttttacaaaaaatacctttaataacctaaaattactatacccgtcctattattgtatatgtctccaactatttttgtagggagatcctagataagcagttttttaaattcgtttggctatctttatttcctttatattctgaaaaattgatggttaagcattaattactcatttgcacacaaaaaagagagttaattacttgtttttgaggatttccaaatgatcaatatttgaaaacttatacgaacaattaaatatttttagttattggttaagaattttttttttatataggaatgtgaatggcatataaaataaaagtttgaggttttacaaaaagagtttaacctaaaattgaatccatgccaaaaaaacaaaaaaaaacattggttacaaagattttttgagggtcaatcaacttgttagcagatcaatataattatctcacaaattaaacatgtaagtaaggaacatttaaaatgatatataaacatcttctcaagaatcgattcaccattagttgaaacaaacctttgaaacagcataattgttcttgctctggtacgtttccaagcttcgattcactgcatatggagagagtggaatgctcattcccatggagacatgcccacatcgagacctaattaatcgaactccttgacaaacaagttcgcaaccgtatactacaaaaaaacaactaatttatttttttggtaggacaaaaaatgagataactggtgactacataagaagtcactattcagtagcaaaaccctttacttgcgacttctttgcgactaaaacatgtatttgataaacaacttgtgttaaaaaattcactcgcataacatactaactaggatttaactcgcggtttaccacgggcaatcagtttatttggttcttatatatactaaatatttgaataaatttgatatcctaaacttataaatataaatatttgaattaaacataactaaataataattgagattttttttgaattaaatcaaataataatttagattgaagggaattaatttattaaatggtttagattgaatcggatcatataaagtttaggagattgttaagaccaaattacccttaatgattttgaatagcaaagaacaaaatccaaaattgaaattaaaattgaggccaaattagacaaaatttcaatttgtacttcccttttaataataaggggatgagcgaccgatttaagtgctcactatttagtcgcaatgtcgtcgctaagtatagtgattgttatgcgatatctttgccacaacatgacaattgttttgtgaacgttttggtgaatgagttgctactactttgtgactgattagaggtttaattcttgatttagcctctaatttatcatcaacagacttgttttttttttttttttactaaatgcaaaattagttaaaaaaaaaaccttgtttacaatatatgcaaccttaatatgaaaagtttctgaaaaagaaaataagaagaactagaccatcgcgttgctaacagaatccctcatgatgtttgttagagccgaggtgggttatggtgcttaacagattgtgtactgttcgatcaatgagcttgatgaggtggtccaaagtgtgtggtaggtcgccatgccttctaccgttgcgttcaccccagatagagtaagttgtagcctgaaacacataacagatgaggaagcgtgtagatgggacatgagaagccgattagttagtttctcccacacccgattggagaagggacatgagaagaaaaggtggtcgcgagtttcgcacggactttggggttgagttcttgaaccagatacctttaaaccaaagctgcagaggacttggagacctttgttgagcccaagtttctttagcggagaatttgggtcgaaacttgtctcctaagccacgccaaagagcaacatcgttctcggagcagagaactctgtttctaaagcgatctagtttgagctcaaccttgtttaggttttcagcgtgatggagtctacgctggtgaaagcgaagagcatcgattacagtggatgtagattgaagtccaaacggtgccccaagagactgtgcaatggtcctagtgaacaccacttatcaaaccagaaagaggtctgcagaccacttcttacttccataaaacagaattgtgttgtttgttgtcgatattggagaagttttctccacatccaagagccagattgtgcgttatgctttatagaccaaaaagagccattccagagaagttcacgtttaatccaatccacccaaagagaagaagctgaagtgatgcgccagacgagtttaaaacaacaaactctattagcctcaacaaaagatttcagccccagccctcctctttctttggacgacatacatctttccatgcaactttagctttctttttgttcaagtctggcccagaccaaagaaaagctgattatatcgtttcgatttcttttatgcatgcacttggaagacgaaaacctgaaatttattaggctagacattaccgagctgagtagttgcaacctccttgcataggaaagaaaccgattcttccaataactgatatgtgccctgattttttctagcaagggcaggcaatctgccagtgacatatgcttagtcaagagaggtaatcccaagtaccagacacgttaggtaccagtttcaaaagaaaattgctaaaacataagaaatttgtatttaaaacaagaacaataaacaacacattcttgttcaattcaaaaccaaacgacgtatatgttcatcactcactaccatcgaactctccgatcaagtgtctcgctctaaccccttaaggatctccttcttctccggtcaagtcttcggctccacagacgttgggtattgaatctcttctccaatcaagtctctgatagaccgttaatagtatacttaagaaagaagagaagagagacacgtgcgagcgggaaggtaggtgaggagcccgtgagttacagttcaagatacgtgggaatactaaagtgtacataaacaatagtttagcttttttagaaagcttatgcattttgttgttgttgtgaatgtcgtatgtgacatttgagagagagtgatgatctagagtatgttttagagctcttctccagtgacaatttgtatacaattcttagataatacagagtttcgggtttcaatcttacaattggtgctctcgtgagcagtgatcgaatctaacgcaggtaatttaggattttttgtcgaagaggaaaagaagaaatcgaagatggtaatggagtcagaattatctccgatccgtgaggtttctcaagcggaggaatttgctgcgtttggcagatgtttacgataagatcagtgtattgggtatgcaggtgagaagttccgatacacctttagcaaccctagattccaagatcgggactttgggggacaatattggttctcaagatcgcaaattggaggcggttgaaaggcaattggtttgattatcggttctttgcccaaaattgagtcggtgaaagaattcggaggcacaagtcagtcgcaacaaccaatatcacaagattgtcgaactcagatatgtgcttctgtcccggaaccttgcgatagatctattaggcctgagattcgtgaaaaccttctgaagaatgtggagatgccattatttgaaggatcgggtatatatgggtggatcactagagttgaaagattctttcgctatggtcaatgcaacaatgaattagcaacgacaccaaattgataactaggtttttacacctagctatgtgatgttcaatttccccttaaacacaaacatgtcgatgcagctatagggggtgtcaatccaatctactattattgctagcaatcaagatgtatacataaacaactaagttaagccatatataaagatggtgggtttctagtaacaatcctaattcaagtttcaaacaataaaaacgagaacgaaagtgccctactcgatcacatggtcgtgtagaaccatataggcaacaaatttaagtacggatatgcaataaaaggtaactcaacaagatgacacaaataacaggtaaataaaaatgcaatcaagggtgaatacagataaatctaagaagaatagaagtcctaaggatagattcattgataagggcaactctagggttcatcaggtggctaacaagcgaaaggcaaataccctagacgatagattcaaaaccagatcaatccactctcgtatcattgatcctcataactttatcacttcctaatctcaactctcgttgaagaaacatagcaaagcaggctttaatcaacaatctatcaaagtcaataagtagtctaaacatcaaatctcttggactagagtctacaaatctctggaattcgtagatcaagcattcatttgaacgtctttaggacgctggaataccttgggtcgaattccaaacttaaatgagcgaaataagcattagggccaacgattccaaaagggatctaacctaatcttacccacctgaataacctagagattaccctaatctaatccatcctcaagaaccctaatcactactcaagcaatataatcaagattataaacccaaaaattactctaaacatatcaaaatgtagatctaaacaagataaaaaactttactcaaagaactaaatgcaaaaacgaaatagattaagagtaattaaggtttcaagattctaaaacacaaagaaaaactacagaataaaagcttggtcttttggacaaaccccaagagacctatttatagtaaaacctcaaaaaccctagattcactagaagacaagagacttgaggcggtttagatggatgctcgatctaggggatcgagtaaagagggtgctgcaaagtctgcgcctttgcctccatgcttcgagtgatcaattggtcgagtagttgcttcttcctctctgcttcttatgctcagctatctggttgagtggggaaatgaggaggatccgaaggcgctttgaacgatcaacaagtcttgtagaatccgttgcccgtgatcgagtacttggtcgagtagaggatcgagtagtgtttgctgcttcctctatagctgcctggatcgagtgaatggtagaataaattgccctgctgcttctgtaacacccccgaaccgttctagaactaagaacgaatccggaagcgttaattaagacgtatgtagacgatccaaccgagttcccggaacttatccagtactaaggtcagttcatctgcgaacttcgttcctctcgaacatggcctaaggcttttcaacctgttctgcattcgcgagttgtgttagtacagagaagactaatatcagaaatcacaaggctttttaacaaaactcattttattaatcttaaaatacctcaaaatacatttgtattcggctctccaaggcctaatacccaaatcgagtcatacaatatatattcaaaaatatatctttacaaggcaacgaactctacatcggcttccttacgtccgtgctcccctctaaggtttctcactatggttacctgcgaaatagagtgagggatgagcgctcagtgagtccaggctcccctaaacatgcaatattcccccacacaaaaccttagaataacaatcaaatgcatgcaatcaacaaacaatcatgcatcaaataatcaatgcaacattcaagtatactcgattgagtatactcgacaggaaatcaaccaattacacttggaaaagtgtaatgaacacaatcaaaagcatgcatgcataactatactatccgagcttatgcagcggaactactcagactactctaaaggcctttgtctcaacagcgatcctgatttcccacaaggcaatgtctccgatccttagccacaaaggctggaaggatcacattcctttcctcttaccgtctacaagggaccaactcccttacccttacggtataatttgtactaccccgtcgggcagccttgggttgatagcgagccaatccgagccgttgggacaatcacgacatcgcttcaaaactagtcataaaaatgactaatcacgtttacttactacgagcctattgaatctctataacactcgtaacaagatctacctcacaacctaacctctcaattactacctagcatgcaaagctaattacaaacaagttaaccaagcaaatgcgagattaacaaacaactatcaaacaatcaaacaacaatcaatcaatgataactaacaagcaatcaatcaatactactctatcatgtcaataactaaccacttattgactacccgactaactaacaagcaatcaatcgttgcgaggtcatctagagcataacgttgcgaggtcatctagagcataacgttaacactaacgtctagccaacctcacatctaacgcctagaaatgaaacgattataactttccggcatcccctggataaccttgcaatcataacctttaccaaaatagtttagcatttgctccacacggacaaaatgcaacctcctaggcgtctctcacaacattgtataactacttaatcaagtagttaaaactaaaagcaatccttcatagatctattcctatattctacacttagctaatagaaccaatctaaatgctaaactatgcaacctaatcaatcaacaattctagatctatgaacggaaagtaaacaaacaacaatcaatctggttcacacgagttctatgaactacatataacacatgcaacacacataacctagactcaccttggcttggatgaacaggaaaattctacccttgaccgcctatatctcgatccgacttaagctttttccaatgcgtactaacgatggatctaagccgcagaccgaaaataaaacttagaaaaatattctaaaaagaataaaagagtaagggcggaactacttacctattacccgagtaactcgactctcgactacctgaccaatgctcccgacgaccacgacttctccgagaagcttcacgacctaactagtctaaatgtgattttttcgtggtttagagagcaaatggcgagatgggctatttatacgggtgggaaaacatggggagcaagcaacggaagcacgaggtggtggattaacattattcaaaaccttatccttatctgatttcaagcttatccttctctaaactcatctctatccactcgtgatcctatccttatccgaagcgtgtgccaacacacgcacaacacacgccaagcttgtgacagagctacttccaccacaagcacctccatgacatggccgcaaaatcccgcaaacacctatacagccaaatcggaaccatacaagtttatgattaattttacgaccaaaattcaagtaaggtgacatgtcctcggccacttactctattgaaccgctcctataaaccttgataatttttcatacgactccgcttaatcaccactagcttttttcggttcaaaaatattttctcggcaaaatctagttttctccgataaaaaacttgtcttcagcacttcctttatttttcttcggcagccttgatcttttcctcgaccaaattcctaaaataaattttcttattaaaatcttgatttctatcgttaatggtttgatcgggtcctttgatcaaacgagcgataacttcctcgatagcatttcgaccaaattgccatcatttcttaataattgttcgatcatgtcctctggatagaactaccaatgtcctttatagcctaactgcccaatgccggtaatacccgatccttaactttttgactcttagcgagagccgataaatctcaactcactcgcgattgctcttgaactcattcgataagcctcctttgatctatgatcactttgggtaatgctagtttacccattactccatcaaattgtttctttacaatttttttttgaaagtcacggtcgaacttctatgttcgcgaccttctgtccgatagctagtcatcgtcaggggtattacagcttccctcctggtttgatagagtagagggtcgattaatttccttgtatcctccttctgcacctgaaaacacaccaaaacatgcaatatgatcctaaatgcctaagtgtgcaaaataagctaaatgtggtgcaaaatgatatgaaacaatgagtgaacactaagctaaatgatgataaatacatgagtaaaatgagtaaaatacagtgttatcatttatcttcctagaccaatattttctcatggtcaactatatgttgccttatcaagagtcacttctaaaagaggtttgaaagttcttattgtggacaaaaaaggaaaacctcagagtcaaacaatgaatgtggttttcaaagagatctttcagaacctaaggagttaggatcgttttagcttcattccttctgttgttgttaagatgattctagtgttgtttaaaacaacaatgttctctattttcattttacaataatttgtttcttacatattttaatattctttcaataatagttcagaatgcaatataatagttgaattagttaggtttctagttaggtttcttatcatattcattgtaatactttagaatccaacagctaaagtcaattagtgtaagtaagcaaattttatttctagacaaatccttaaccattaacgacagaaagaagaacgcttagttccattacaactaagatatagagaaacaacaactttaaattgtgtctacaatggaacttagatatgtgaaactaaccttattgatatagtaaatcatttgtgtgtcgtccattagcgaaatgtaactctactgggttcaatcattatctcttctcttcagatctcttgtaccagattcagaacagaaaccaattcatcaactcaattgttttatacaactcatatatgaaatcataaaaaaacaatttctcacaaaattgactttaggagattatgtgtaataattacagatgctaaatcaaaacttattgaatcagttcattggtttaactctgtcctagaagagtagaaacaaataagaaacataccaagaatgaatcttctaaaacaacaaaatcaagatattggtccagagtttcaaggtcgtcaggtgcaaaatctcgctaaagcgattgaagataaccagtctacatcaaacaagtaaattgaataggactaaaccaaagagatttagagaaaaaaactcatagaaatgccaatttggttttaacccaataacgttggcaaatttgtcagaaattaggtctctcaaaacatcttggagctataaattatcaaactttaacaaatccatctctaagaatctaaattctaagaaacggaatgaaaaacaaataaaacataaccaaatcgattgtttcaaaaaacagaaaagaccagagcttggctaagaacagggaaattcctaatggttttgtagtaatcagcaatgaaataaaccattagatgttcgtattctgataagtgtgtattttacatgttttaagcatccatttgtcatcactttagcatcatatcaccactatgttataccatttctcatcatttgtcatcactttgcatgtttaggatagttttgcatgcatgttgcatatttgtgttattttcaagtgatttggagctgtagacgacatcattggaagaagtggacttgatcatatcaatatactcgaccccgaggtcgagtacctccatcttggactttctgaaggactcggtcacggcctccgtacaacatcactcgaccgcaacactctggatcaccactcgaccccctggtcgagtagatggcatcacctcttctcaccaccactcgaccccctggtcgagtagacgacctcatcacttcacatcaccactcgaccccctggtcgagtaccaccatcaccttcactcgatcacttactcgattacatggtcgagtcctatcataatcgcacactcgaccaatcactctaccaccaagttgagtaccaccatcatccaccactcgacatcatactcgactgccagcttcagagtcttctcctttccgcactcaaccagacactcaagaacaaggaagagaagaagactccagcttatcactcgaccaatcactcgaccacctgggtcgagtgcctatcttaaatccgtcccaatactgtgtcgttttgagtattagggtttcagaatattttaagtagcttgtactttatatttttcgagacaagttttattccgatgacactgtgtgttcttaacattttgtaattcggatttctcttaatctattcagtatttgcttttcatttcgtttactaagttgttcatcctgttatcatcttgccattactctgttgctatcatgttttcattcttatcttcgtttatgctctctgcaatgatgtctgagtagtgactaggtttctgaggatgggttagagtagtttagaattctcagtatgctaggtggttgagtttgatttatcgatcccttctagattcgttgttcttaatgcctattggtttctgaacaactggaatttgagcctagacatttccgcatccaaaaggtgttcgatgaaatgtctgaaccactaattccagagattcgtggctctgtaccaaggtattggttacagggagcgtttcggctttaacttgttgattcgtaatgcctattaggttagctctcgtcaatggtgattgattctgggactggtttaacttgagggtctctattgttttggcacttagatttgaatatcgaacttgttgtctagggataatttattgagcatgtcaatcacttgaaaactaaggaaacaaaattactcaattaccccatcctcgagaatttctcatctaattgatttcttgtttactttgctattgtttactgcatcttgttacctcttgcttagttttacaacttttgcatgttactcgacctgatactcgaccacccggttgtctggtaagagactgtgcactcgagtatccctgttacattttctgtctgttactcgtccattcactcgaccacgcccagtacctggcaacgagctgtgttggtcgagtgttttactgtttttttttgaatttctgtttcctgcatgttcacttaggactactagaaaccccaaaacctgttattgtttggcttgactctatgaactcatattgcatcttgattgctagcatcacacccatttggattgacaacataaaatactacaacgacatgattggtgttttaggataattgactaaaaacctaatatcaatttaacgtcgttgcctattgggtgtttgtttgttacatttaagacttcagacttgcttagatcaagttctttttcacttttcatttttggtactaactatgtgtttttcttgttgtcttcttgatccaggtacacctctgctgtatgcaaactcgatcaaccgccaactagaaactccttttcgacgataacatcgaccgcatagctcgcgaaataagagaaaggagaaatacagtcaaccttgtacctcagcaaacactcgaaatgactgacgaaccaaatcaacagagtggacccgcaaacattggtgctggagatgcaccacatgatcatcgtcagaggaaaggaattgcacctcctgctatccagaacaacaacttcgagattaagagtggtctcatctcgatgattctggggaacaagttccatggtctgcctatggaagatccactcgaccacttggatgaatttgataggctctgcaacctaacaaaaatcaatggtgtcagtgaagacggattcaagctccggttgtttccattttccttgggcgacaaagcacacatctgggaaaagaatctgccccatgactcaatcaccacctgggatgattacaagaaggcttttctagcaaagttcttctccaatgccagaactgcaagactcagaaatgagatctctgatttttcacataagactggtgaaagcttctgtgaagcatgggagcgtttcaagggttacaccaaccaatgccctcatcatggcttcaagaaagccactctgctcagcactttatacagaggtgttctaccaggcataagaatgcttttggataccaccagcaatgggaatttcgagaataaagatgtcaaagaaggcagggaattggttgaaaacttagttcagtcagattacaatgaggactgcgataggaccattagaggaacaatcgactctaatgacaaacacatgaaggagatcaaagctctgaatgacaagctggataagattcttcttagccagcagaagcatgtgcacttccttgttgatgacaagcagtatcaggtccaagatggggagggaaaccagttagaagaagttagctacatcaacaatcaaggtggctacaaaggatacaacaacttcaagactaacaaccctaacgtctcttaccgcagcaccaacgttgctaatcctcaggatcaagtgtatcctccacaacaacagcaggttcagaacaaaccttttgtcccctacaaccaaagttttgttccaaagtagcaatttcagggtaacgaccagcagcaaccaccacctgggtttgcacctcagcaacaccaaggtcctgctgctcttgacgttgatatgaaacaaatggtacaacagctgctacaaggacaagcatctagctctatggaaattgcgaagaagatatcccaattgcaccataagctagactgtagctacaatgaccagaatgcaaaagtggaggcttggaaggacaatccgcatctacctctcctcccaaagttataggacttcctgggaagtcaatacagaatccaaaggcgtatacaacagctcacgccatcactatttgccatgatcgagagctgacaactccacttgttcctaacttaatcactggggacagcgatgttcaagaaagagaggcttctactcagattgaggtctctattgttgaattcaatcagtctggtggatctcgccatcttattcaatccacctcagaagagaaagcagccataatcgagagaatggtaaaacgattcaaacctactccattaccctcacgtgctcttccatggaaattcaggaaagcctagatggagagatacaaatctgttgcagagaaacagcttgacgagattgaagcagtgatgccactaatgaaagttctcaacctgattcctgatattggaaaggatcaaaatgtattacgattcagatgattaatgtgatgcttatccgtctcgagctgctgataagaggattgttcaagaaaaattagaagatcctggatcttttactctaccatgctccattggggaattggctttcagcaattgcctgtgcgatctcggagcctctgttagtttaatgccactctctgtggcaaagaggttggaattcattctgtacacgctttgtgacctgactttgatccttgcggataggtcttcaagaaaaccctttggcatgctaaaagatttacccacatgattaatggagtggaagtgcctacagacttcattatcctggatatggaagaagaacataaggatcctctaatcttgggaagacctttcttagcctcagtgggagcagtgatagatgtcagggaagggaaaataagtctcaaccttggaaagcacatcaagctgaagtttgacatcaacaaaactccacaaaggtcaacaaaagatggaaaaacctatgaggacgatagagtgatccggggagaaggatatgagactaaaagagtaaaagagcttaaaaagaggtctgataagcaagagaaaactatagaggagctagctaacaccgttaaggaacttaagagtaagttaaatcagatgcaaaaggaagctcaacctaaagtcgggattgacactatccagagaaaaaagttcacttcaagatggtctgaagagatagattaccctccagaagagaaaaaagcctactttgaagaaaagggaattgagtattctgtcgcacacctctcaagggaagatgctgagtatgatgatgagaacagagaggactatgcagatcctcactattactcattttcttctttataagtgtgaggagtcaagctagagagtttaaacactgctcacttgggaggaagtcccatgactatccctgtaaatgactttttcctttcttgttatttttgatttgttttagttgtgtttgtggttctcaggagcaaaggaacaacggggagatagagggaaaattcaaagcttttactctacagagggcctagagattgagtacacagtccaatgaagtgctaaaatttgaaatctttctgttgcacctggagaccaaccactcgagtgaggaggtcgagtataggtgtaattttaaaacagaatttctttaaaaaaaaatcatcataatactcgaccaacagaagctacaaagacttacataaggtttatcaagtttagagaggattgcgggatttcctgaaattttcccaatgaagaaagagcaatgattcagaacaaaaagacaaccgtgggacccaccactgcaccctatgtctcccacactcccaaccaaaagacaagaaatctctctcatttcttctcaaccaaccatacctcacccttacccttatcatcactcgacctccatctcttcaaatcgccaaactcttcactcatcactcgacctcaacaaccattttctctacctcagtttttccgcaacctatactcgactgcacctctctcatctctcatcgtcgctcgctgcaattcaagttattcaagtgctcgacatcacactcgacttcatcactctccaacttcaacaatttcacttgacctctcatcaccatcttcctcaccgacgcttgaccaaaccacaccatctctccatcgccttatcactcgactaactcaacggaaaaacgagaacgaagatggtcttcattcactcgatcgcaatgctcatcgctcatccgttcacttctctctctcgcaaaccatcgagctagtctcaccaccgttaatcacttgatccatagccaaagaaggaagagaagagaagtattcgaccacgaaaacgatttagtcttcaaactcatcatctcttcatcacttccaccgccgctgctctcttctcaacaaaagctcaccactcgaacgcttcttcacttctcacactcgcaaccaagaaatcatggcctctaccattactcgaccgtcgtgaacctctttgctatctctcaccgaaaccaccaccatctctcgcttctcaacactcgaccgcgtcaccaaaccgggcaagaaaaccaactatgatccaatacatcaaattcaacaatttcactcgacctgtttcggtttactctaccctgttactcgatcattttactcgaccagtttgtgtttttggttttgttggaactaacgtattaacgttgctctttgagttccatctgtttacaggaaatcaacatgagtaactacagtggtgagtcttctatggatccagattataatgtggatgaagctgaatcttcgtccactagaccagagaaagaggaacatgtttacgaaagttttagagcacaaatgcaacgctcagcagcttgacaagtcagagaagtgctgaaatcggtagaggaaagagagcgatgttgagtaggtatgagttgattgattaggacattgagactgagtatgagtcagagtcatggcgcaaggagacaaagctactgaacaaacccgacgaggttccagtcgaagagtatatcagactctttgagctgaaagatttctagggaacgaggtacccctgctacgagactttaacccagttggggctaccagaggacgtgcagcacctgttcgagaagtgtcatctgaagacactcatgtcctacccatacgctgcctacaaggaggaaacgatcgagtttctgtccacaatgcaagtggagatgtatcagggtctcacaaagtatgagttggagagtataggattagggttcttgacgttttcggttgatcaacagcgctatcagttgtcgatcaacagtttggaaagactgtttggcttccctagtggaaagggaaccaagcctaagtttgacatggaagagcttaaggatttgtgggctactattgggaacaatgtgccgctaaactctgtgcggtccaaaagcaaccaaatccggagtccagtgattcgctactttcagcgctcaatagccaatgttctttactccagggagtctacaggcactgtgtctaacacagacatggagatgatagatttcgcacttacaggcattctccgccgtacaaagcgaaagaaggtcctgagaggcgatctcaatgacgcgccaccagtaatgcttctattgatccacctgtgtggatacaggaagtgagcgttgacaaacggcaagaagaaggtgagaggagcactatgcataggtggcgttgtgacgccaattctggcagcttgtggagtaccgccgaaggaaccaaggttagaaccaagaatgatggatttagatcatttgcgttgatgtgagttcttggagtatgacatggttggcgacttctaccgctacaggtttgagcattcgtcgatcaaaatcgccaatattcttctcccctgcattgaagctactagaattctcgagggaaagaacattgacttcaagcctgcgcctgaagatatttatttcgagggcagtccgccaactgaggagatcactcacgaggaaggagttacaacagaggaggttgatgagactaatgaaacagatgaagtggagtatgacacgagcatgtatcattttagtgagcatgtacctccagcgagggagagcaagagtttgagtgaatctcacagaaacaacagcaagttgcaaaagtggtgcaagaaacaagataaattactcattaagtgcttcaaggctatcaagtttctgaaggacaagctaagctgctcctcttccactactgctattccgtagggacagatccctcaggacttaccgtcgaggagatatgacgagcctgagccaagtcggcgcaggcctgagcctagtgagcaagaggtcccgcatgttcctacaaggcattcatcattcgagcctcgtgagtatgggagaaagaggaggaccgtgctcactcgatctagcagcaggagtagaagacttctgcagtctcgaagtttacacgaccgcggtgctggccgcaacagaaggagagaggtcgagtatcctcagagcggtgttggccgccacatagctgatgaggtcgagtacccacatactggagctgatacagaacagggcgactcgtcaatggcatgggagcaatcacaggcagccattgacaaccaactccgttcattcttcgattgaggtaagcgcctcacttcaccattgtattataccatctcctgtttttattttgtttctgtgatttgttttgtcctgggtactctcttccaaatttgatcacacagtggactgtgtgatttcagtttgggggagggctcagaaagtgtgtgttgcattgtatatactcttgagtctgcattcatctaatgcatagaaaaaccaaaaaagatttgaaaaaattcagaaaataatttcacaaaaacagagtcttcatgtagttgcattacatttaggatcgagtctagagtgttttatttaggattgttgcatatgcataggggataataatgagatagccttgtaagcattttggttcaccggataaactgagttccctcgttgctagttatctgtttcgtagtcaatgaaattgaagtaaaccagcaccatgcctagattgctctattcgatcacactgtcatgatttgataccattccctatcaatttgaacctgactctgattttcaattatcatgtctgcatcaatttgaacttatggataccctaaaatacttggattatcttactcatttaaccactcttgttaatccaagtagctgactctccttattagagcagttaaacccgaacccaaacctaaactttctttcaagccttatatcacttgtgagtgtttgggaggtcttattccgattaagcttggtagaaagttttaggttcgtaacgactagataggactagataggagtaggtgggcgcttatattgtggattgggttgtgtctaaaagaaacaaaaaaacggtggattcattgataagaaaaggtcaaagactctaggtgaagtagggtaaagaagcagaaaaaatctagtaaagattttgggatttgtaaagaaaagaaaagggttcttattagctaatgaagaagggcaaaagcccttggttttaaaaatttaaaacaggaaccttagttgttaaagaaatccaaatccgctagatgtatcaaagtgttgagaaagcttctcctaaagttaagagaaaagaaaaaaatgattagaaaaagggtttaaaagactcatgaatgcaaagggtagagttaagttcttaatttgagactggagatgggattaccattagagcttcattggttatactctgggtagatgggatcttatctttgtatgcatagcttgggacttacctttagcattctactaaagcttaatcagttttgagagatccctgttactgcagcgtattatgtaaaggaccatctttgtctcttgacctataccttagccaaatgagttcattgctgatgcatttcttgattcacgttccataactaatgaatgttaaagggattggtagatttgaaaacatgtgtaggtcgagcataagagtcggattgattaataacaaggcatggctaatgtttttgagtaggattcgatcatatcgtagcttagaactaccaacttggacatcgatttcatctgatttatctggtgctttggctctgagtccctgcttttaaacctcacctccagcttgttctttattgtttgcttagcttgttctttattgtttgcttgagggcaagcaaagactaagtttgggggagttggtaagtgtgcatgttttgagcatccatttgtcatcactttagcatcatatctccactgttttataccatctctcatcatttgtcatcactttgaatgttaggatagttttgcatgcatgttgcatatttgtgttgttttcaggtaatttggagttgttgacgagctaattggaagaagtggacttgatcatatcaatatactcgacccctaggtcgagtaccgccatcctggactttctgaagtacccggtcacggcctccgcataacatcactcgaccgcaacactctggataaccactcgagtagatggcatcaccacttctcaccactactcgaccccctggtcgagtagacaacctcatcacttcacatcaccactagaccctctggtcgagtaccaccatcaccttcactcgatcactcactagattacatggccgagtcccgtcatcatcgcacactcgaccaatcactctaccaccaagtcgagtaccaccatcatccaccactcgacatcatactcgactcccagcttcagagtcttctccattccgcactcaaccagacacttgagcacaaggaagagaagaagactccagcttaccacttgaccaatcactcgaccatcagggtcgagtgccgttcttaaatccgtcccaatactgtgtcgttttgaatattaggatttcagaatatttcgctataagtagcttgtactttacatttttcgagacaagttttattccgcagacattgtgttcttgacattttttaatccggatttctcttaatctattcagtatttgcttttcatttcgtttactaagttgttcatcctgttatcatcttgccattactctgttgctatcatgttttcattcttatcttcgtttatgctctctgcaatgatgtctgagtagtgactaggtttctaaggatgggttagagtagtttagaattctcagtatgctaggtggttgagtttgatttatagatcccttctggattagttgttcttaatgcctattgctttctgatcaactggaatttgagcctagacatttccgcacccaaaaggtgttcgatgaaatgtctgaaccactaattccagagatttgtggctttgtaccaaggtattggttacagggagcgttttggatttaacttgttgattcgtaatgcatgttaggttagctctcgtcaatggtgattgagtctgggactggtttcacttgagggtctctgttgcggtcgcacttagatttggttatcgaacttgttgtctgtggataatttattgagcatgtcaatcacctgtaaactaaggaaacaaaactactcaattatcccatcctagggatttctcatttaattgatttcttatttactctgctattgtttactacatcttgttacctgttgcttagtttttgcaatttttgcctgttactcgacctgatactcgaccacccagttgtctggtaagagactgtgcagtctagtatctgttggggtcggatttcacccaggtaaccgagccgaccatgatcgatgcctcagagatcacgtcgaagaaccatcccgagccggcctctaaacacctcggagatcacgtcgaggaaccatcccgagatgacctcgagaacgcctcggagcatcaccgcactaggtttccccgacccggtctcgaaatgcctcggatgccaacccggaaaatcatcccgaggcgggtttcaagatacctcgggatcgggaacgcatcattcggctagcgtgatccgagccgctcaaccacgatctgagggtcagctcaacccggctcggaagaaacttcggatcgggtcagaaaaccttcacccgaagaaaggacttaatcaatacaagatcgacataccatttccgaaaagctcggaaaagatattagagaatctccaaagaaacccttagtacaatttctattatgtgaatttcgactctacaactcaagcgtccgacagcgaaggtttcaagaacgagatcgagttctccgaaaagtctttcaaaacaccgccgaaccgaacgctgggaagctcgggacgaattgggaaggaccatacgtaatctccaggatcgttcgacccggagtatacgaactcgccgatttaaacggcaaagctgttccaagatcctgtaacgcaatgcacctaaagaaatactacaactacactcagagtcttcggacgagttcacccaccccccccaattaaaaaagggaggagtggatccgtatattcatactcccatttttatcatcttgtaagtttttgaactttggcataaataaaatttcttcacatttttaaacgcttcggctaatacgatgagcgacgactctgagtatcctttacgcctgctcggctacaacgcgctatacaaatacgagatgaaatctattagattacctttgagaagaaactttcatcttcagaaactcggctatactttaacaccggtaccccagctcgtttctaaacgctggtcgggaagtgaatctgatcggatcgcaaccgagaagtttcacttaaaaacccagtctctcacactggtcgataaaacagttcggatctaaagaaagattctaaccaaaaaatttcgaactccaaaaacttattggataaagccatccaggcacatgttctacaaattattggataaagccatctaggcataagtgctacaaccaaacatactaacaaaaaaaagggcaagaaaaatcccgcttcgggtccctaatcgagctcttcggacgggcggtactctcggcaggaaggagcgatccggattggtcggtaaccctcgcctcgtcggcaagagtctcaaccgacctatgaccacccagactcagaggagcgggctcgggagatagagctttaagatcctctttcagctcggcgataaagcggttgaggttagcctcggcgtcggcaaaatccttcaaccactcatcgacttgatctttctctttatcgagaaccccgccttcttcgagcaccttgattagctgcgtattggctcgcgcctgggacatgtacatgaattggtcattgacctcatcaaggagcgacactttgtgctcggcagctttcaacttggcgataaaggtttctgaaacctctcgcctcgtcgtttgaatggcccaagccacctcactatcacgaagtcctctcgcctgggcaaacatccgcttgagacgaacgatctcagaatctgccttaagattctgcttggccatcttgatggcgttctctttgtttataaaggtcgcccgctcagcctcctcccttgccagattcgtcgtggttgcttcggagagcgcttcatttttctctcgctcggcggcttgaatccgggaccccgcctcggctaacttgctaaccgcctccatattattccgcatagccgagtcgtacgaatgcaccattcggttcatcgaggcgacagcctgaacaagaaaaggatagggttacaatattggaaccgaaaacaaactatgaataatgaaacacatacccgtaagaattaagatgccgtctcggcatacttccgtctacacatctcccgaggagattagctgaagcaatacaatcttcaaagatcgggagcactttctccgcctcggcacccgaagtcttcttcttcttcttcttcttcttggacgattcgttgtccatccgaacgcgtttacccgccgctttatcgctcaaaggctatagtcttcttcttcttcttcaaccaatcgcacttccgagccgataacgcgtgaaaagccgaaatgaaatcatctggaatcagctcgaggaacttgagggtgcattctacaacaaaggaaaactatagttagaaaaagaaactataaaaccgcgtcgggcacaaataaattgttagctacacctacccaaaattctccatctcgtcagaaccgacccaaggaggtcttcgtgaacagcatcttcgagggctacaaagaagaagtgatcggtatacggttcatccttgctcgggaacccatcaataactttcctacccttagcaggagagatgtaataccgatccacctcggatttgggaacccgccggttctcaagaagatttctaagatgagcaagcgtaatgtcagtttcagattcataactccgaatcaaaatcttgagcagatgtctcaaggaccgcatcgtgatctgcgagagggcgatctggtacgatgtcacgtactccaaaaccagccttgggactggcaaccacaaaaaacaaccgtaaaagaatccctcatacagagtatagaagcccgcggggggattgtcggctcgctcaacagggctcggcacatgcaaggtgacctcaccaagaccgaatcaggccctcatatcctaaagggaccgctcggtgcataatgttgagccaaggggatccggcactatcgccctcttactcttgttcttcttcttcttctcggctttcttaaaagccctatgctcgttgagacgcagaatatcttctgtctcgttcgggccgaaataaagaaagtcctcaatctttatcgtcggcattaagggctcgagcacgtctcgccagttggatgtcccggcttcgtcagccatcagggcaaggggcctccggacgagagtcggctcgggatcatcgggcaaatccagttcccgagcaatatcggcattggtatcttcccgagccgtgaaagaggtcatctgctcgggggcactcgaacaagacagaacatcatcttcagaggacgtccaaactgctctccgtttgtagatggggggaaggtcatctggatgattcgagtcgctggaatcggcgagagaggtgctcgggatcgaaaaagactggctagaactcatactcggctcggagatgctcgacgagatgagaaacgaccagaaaacaaggaatttctaaaccggaaaaatcaaaaataacaaagaaacggcggagctcaccggaaaaagagagaacaatagaaatatcaagatcagagagaagaagcaaaccttgtttcttttcttcgaaaaccttgttgtctatggataatttattgagcatgtcaatcacctgtaaactaaggaaacgaaactactcaattatcccatcctcgggaatttctcatttaattgatttcttatttactctgctattgtttactgcatcttgttacctgttgcttagtttttgcaatttttgcctattactcgacctgatactcgaccacccagttgtctggtaagagactgtgcagtctagtatctgttggggtcggatttcacccaggtaaccgagccgaccatgatcaatgcctcagagatcacgtcgaagaaccatcccgagctggcctcaaaacatctcggagatcacgtcgaggaaccatcccaaggtgaccttgaaaacgcctcggagcatcaccgcagaaggtttcctcgacccagtctcgaaatacctcggatgccaacccggaaaatcatcccggggggggtttcaagatacctcgggaacgcatcattcggctattgcgatccgagccgctcaaccatgatctgagggtcagctcaacccggctcggaagaaacttcggatcgggtcagaaaaccttcacccgaagaaaggacttaatcaatacaagatcgacataccatttccgaaaagctcgaaaaagatattagagaatctccgaggatattatcgaatatagaagctcccacaatcttcggaagataaagacaatctccttcgccgactctaagataaacagaaatcttccgagaatatcgtgagaagcgatctgccaaagccctatataaagcacctctaaggacaaacaaaaagaggatacgcactaaaacgctctcaacttcaggctatcaaaaacgctctgattttgaaggcaaaacacttatatttcatatctctaaacacttgtacgatcaaatcatcattatctcaataatataatcaagaacactgtccgcggtaaccaacaactctgttgttctttgagaatctcacaaaagtccgttctttgaagaaacccttagtacaatttctattgtgtgaatttcgactctcacagtatccctgttacattttctgtctgttactcgacctgtcactcgaccacacccaatgctaggcaacgagctgtgttggtcgagtgtattactgtttcttcttgaatttctgtttcctacatgttcacttaggagtgttagagcatcattattggtgggttcttagtgtagttcttaggtcaattggatgtaaaaattaatgattaaattgatttatttgctaagaatagctcttatataagagcaaaactaagggttaagagctagacaactgtctattgttgattggctaaataataaatattaaaggagcaaaaaatcaattcaaatttcaatctcatcaaatgaattagaaatgtcaaataactaaaccattttgttcttattttttatatcatctatgttaacctatcaaccatttcttttttaaaaagttatatgcccataaggcattgaaaacaagattttggttagtctttatgaatgataagcctttcaatttgttatatcatctatgttaaactattaaaatttttgtgttttgtaatgtcatgtatgtatataagttataataattattaagttttttaaaattaaaatgtttttatttttaaataaatttttttcttcttaagaacttcaagctaagatcccaccattgcatattactaaaatttcaatctcttaactaaactcttaacaacaaaattttcaaaatcaataatgatggtcttagaaaccccaaaacctgttatttcttggcttgactctttgaactcttattgcatcttgattgctagcatcacacccatatggattaacaacctaaaatactacaacgaaatgattggtgttttagcataattgactaaaaacctattatcatattctatcaatcgatttgagtccatgagcttcaataccttccctcttccatttcccgtgaagagagaaaaaataaacacttcaattgaaaattgaacagattttagaatctcttagattcttcagcgatttaccttttccccagagaattgccatgagaaggagaagaagattagccattatcggattcatgatttcatccgatctttgtttagaggattggaattgtcgttcatgtaactttctgttttttttttttttttgtctctttagacattgtcacaaaacaaagatcaacaatgaaataatttatttgctttatttatctccgctttaaagacatatattataaataacatagatgttatggtctttgttttgtgccaaaaaaatgtataacctatcaaaaccacttaatcataaatagaattacaccacctttgtgaatcttacattttagtaaattctttacttacattaaattggaaaaaaacaccaaaaaacccaaactatttttgattttgaagttttatacctaagacttttttgtttggattagaatacctcacttatatattgttggtttaaaaatatatcatctataaattgttggtagattcgaatcaacaacttaacagccgtaacggacgttacaaaattgttggatggcgttaatttatctttgcgtatttgaataaatatatattacacttttattactttagtctactggtaacaagtcgatatttgtaccacaacatacctgggttcgaatcctcaactttttttttttttttttccctcttcctccttcttgcctccttcacaaaaaccctagggagcatcgccgtcgacgccggtttgagcttgagattcgaaggacatagctttttatttttgttattgaaggacataatttcatcatcgtcttttccaatgaacctctaattcttaaaaatgattttaaaggaaacgtgaaccagtggtgggatctctgggaattgatccaattttaacttgttaatctagagagtagtttaattaatgggtgaattagggaagtcccgcagtcatgcggacatcgatgacgaaatttgcgtgaaagagttatgaggaagaaaaaggaggacgagagacggcgagaggacagaaagagaaaaagaaaaaaaaaggaaaaacaggaggaacgtccatggttcgaacctgagttatgtgggtttcaaaacagacatttaccactagactaaggtaattatgatattttgtaaatgtaaatgtgtaatatatatctacttaaatacgcaaacttaaattttattttcgttaaataattccgtaacgtccgttacgtcgcggattcgaatttaccaacaatttatagatgatgtatttttagaccaacaatatataagtgaggtatttttattccaaccaaaaagtattgggtattaaacgtccaaataaaaaataattcagttttttttcggggttttcccccattaaaattacatacacattactaatatttaaacacattaaaatgcattcctcttattataaataccaaccaaacaataaaaaattccaataattatttataagagtttaatagaaaaaatatattttataattttacaatatcaaatataatcaaatatttagtaaaaaaatatataaccccattgtccacggtaaaccgcgggttaaatcctactatatagttaaattgtatagcaaaatagaatgtgatgattagaattttgatttttagaaaattactaaacaaaatacagaaaaaatgtgctgactactattttaaatttaaatatcatcaaaaagttatagttaaagttattaagtgtatagcaaaatgaaaattgtaagattaaaattcaatttaaaaaaatttactaaattatatatttaagaaatagagattatcatttactatttagaatttaaatatcattgataaaatttataattgtttttttaaacccgcatatctaggcgggcctaacatagtatatatatataccacaactaaaacatattattaaagtttgttttgtgttgttaaaaaaaagagtattaaactttttctttttcgtaaagagtttaataaaattctttacaaaattgtattgcttgaagaagtagctagtgtttgttatttttataacgaggtagcaaatggacaaagcgtgaaatcgacaaatgacaaggttaggatgaagagagaaaatacgatgaagaagacaaattctgtacaacataaaacagcggaattatttgaggtgaaaagttagttggagggttaaagtatgcatctttactgatggagccgatgaatatttttcttgtttcagacagaaagcaaccaagttataggagatgaattggaaactaagcagaaagagttgaaagaacttaagaagcgttaaagacaatgtaggtaaaataagagaaagaggactatttgagtatggtttagtattattatttctggtattgtaaaccggtacggtataaataattcaagtatgcaatccagattcattaatgagaataacgatcttcgtaacaaacttttcttcttcgttctctccttccatggagattctagttctctaacatggtattagagcgatgaatccttaaaattcatccgattctagacctaaatctctattttatttctctttcgatcaatttctacggttgtttccaccgtaaaattgttgtatcaatcaaaatctttctcagtttctttatcctcaacgtattttcgtttttccgatggtggttactcacagaattaatcgtcgcatgatgataagtgtgtattttacatgttttgagcatccatttgtcatcattttagcatcatatcatcactgttttataccatttctcatcatttgtcatcactttatagatttgcatgcatgttgcatatttgcgttgatttcaggtgatttagagctgttgacgagctatctggaagaagcgggccggatcatgtcaaaccactcgaccccgaggtcgagtagaagcttcaagatctcaacagatcactcgaccccctggtcgaatagaggacatcactacttcaccacatcactcgaccccgaggccgagtgtcttcaccttcattgctagaacactactcgacctcttcactctacctggaagtcgagtatcaccatcaccaccactcgactgcatactcgatgacaaacttcagagccttcttcattccgcactcaaccagacactcgagcacaaggaagaaaagaagactccagctattcactcgaccacccactcgaccacatgggtcgagtacagttcttaatccgtcctaatactgcgtcgttttaagtattagggtttcggaacatttggctataagtatcatgtacttcacattttcgcagacaagtttttatctagttttattccgcagaccttgtgttctagaccttttgtaatctggatttctctttatctattcagtattcagtattcatcttttgttcttgatttcgtttactgttgttcattctgttatcatcctgctgttacactgttgttatcatgttttcaacttgttcaacgtttacgcttactgttatgatgtctgagtagtgaataggtttctgaggatgggttaaagtagtgtagaattctcagtatgctaggtgattgagtattggttgatagatcccttctgaattagttgttcttaatgcctattgctttctgatcaactggaatttgagtgcagacatttccgcgcccaaaaggtgtgcgatgaaatgtctgaaccactaattccagagattcgtgatcctgtaccaaggtattggttgcagggagcgttttggctttaacttgttgattcgtaatgcctgttaggttagctctcgtcaatggtgattgagtctgggactaggttaacttgagagtctcttttgcggtggcacttagatttggttaatgaacttgttgtctagggttaatttattgagcatgtcaatcacctgtaaactgaggaaacgaaactactcaattaccccatccttgggaattctttatctgattgaattctttgtttactctactgttgtttactgcatcctgttatctgtcgcttaatttctgcaattctttctatttactcaacctcgtactcgaccacccagttgtctcgcaacagactgtgcagtcgagtatctgtgttttattttctgtctgttactcgacttgtcactcgacctcacccagtgctctgcaaagagctgtgttggtcgagtgtttcactgtttctgtttgattttctgttttctacatgttcacttaggactgctagaacagaccaaaacctgttattgcttggcttgacttagtgacttctgatcacatcttgattgttagcatcacacccatttggattgacaacctaaaatactacaacgatatgattggtgttttaggataattgactaaaaacctattatcaatttggcgccgttgccaattgggtgtttgtttgttacatttgagattttagacttgcttagatcaagttctttttcaattttcttttcggttactaacagtgtgtttttcttgttgtcttcttgatccaggtacacctctgctgtatgcgaactcgatcaacagacaattagaacctccttttcaacgacaacatcgaccgcatagctcgcgaactcagagaaaggagaaacacagtcaaccctgtacctcaacaaccactcgatatggcttacgaacagaatcaacaaaatggccctaccaacattggtgctggagatgcaccacgtgatcactgtcagaggaaagaaattgcacctcctgctatccagaacaacaacttcgagattaagagtggtctcatctcgatgattccggggaacaaattccatggtctgccaatggaggatccactcgaccaccttgatgaattcgataggctctgcaaacctaacaaagatcaatggtgtcagtgaagacgtattcaagctccgtttgttcccattctccttgggcgacaaaacacacatctgggagaagaatttgccccatgactcaatcaccacctgggatgattgcaagaaggcttttctatcaaagttcttctccaatgccagaactgcaagactcagaaatgagatttctggtttctcacagaaatctggtgaaagcttctgtgaagcatgggagcgtttcaagggttacaccaaccaatgccctcatcatgactttactaaagcctctctcctcagcactctttacagaggagtcctaccacgcatcagaatgcttctagataccgccagcaaagggaatttccagaacaaggatgttgaagaaggctgggaattggttgagaatcttgctcaatcagatggcaattacaacgaggactgtgataggaccgtcagaggaacagctgactctgatgacaagcacaggaaggagatcaaagcgctgaatgacaagctggacaggattcttcttagccagcagaagcatgtgaactttcttgttgatgacgagcagtttcatgtccaagatggggagggtaaccagttggaagaagtcagctacatcaacaacaaccagggtggctacaaaggatacaaaaactttaaaaccaacaaccccaacctctcctaccgcagcaccaacgttgctaatcctcaggattaagtgtatcctccacaacaacaacaaggtcagaacaaaccttttttttccctacaaccaaggtttcgttcctaagcaacaatttcaggggaaataccagccgccaccaccacctgggtttgcacatcagcaaaaccaaggtcatgctgctcctgaggctgatatgaaacaaatgctacaacagctgcttcacgggcaagcctctggctccatggagatgccaaagaagatatctgagttacataacaagctggattgtagctacaatgatctcaatgtcaagatggaaacactgaataccaaagtccgatacttagaaggagattctgcatcttcttcagctccaaagcagacaagccaactaccaggcaaagcagttcagaatccaaaagaatatgctcatgctatcacactgcatagtggaaaagcacttccaactagggaggacccaaagacggtcactgaggacagtgaagatcaagatggggaggatttaagtatcgagaaagatcaagctgacaaaccactcgatcaaccactcgacccgtcactcgagcaaccacttgacctgtcactctagcaaccactcgatctgccactcgacaacgttactcgaccaacaactcgacctatcttcccagcagcatcaccaactgctccaaaaccagttgctgtcaaaaacaaagaaaaggtctttgtccctcctccccacaaaccacatctttcatttcctggccgtcacaaaaaagcgttggcagataaatatagagctatgtttgccaagaatattaaagaggttgagttgcggatacctcttgttgatgctctagcgcaaatcccagactctcacaagtttctgaaagacttgatcgtggagagaattcaagaagtgcaagggatggtggtattgagtcatgaatgcagtgctatcatacagaagaagatcaatcctaagaagcttagtgatcctggttcattcactctaccatgctctttaggtccattggctttcaatagatgcctatgcgatttaggagcatcagtcagtctcatgccgctctctgtcgccaaaagattggggttcactcaatacaagtcctgcaatatatccctcatcctagctgacagatcagtaaggatccctcatggtgtgctcgaaaacctcccaatcaggatcggtgctgtggagataccaacttactttgtaggcccagagatggatgaagagaccaaggaccctttgattcaagggagacctttcttagccactgcaggagctatgattggtgtcaagaaagggaagattgatctaaaccttggcaaagactttaggatgacctttgatgtcaaagacgcgatgaagaagcctaccatagaaaggcaactcttttggatcgaagaaatggatcagttagccgatgaattactggaagagctggcagaagaagatcatcttaacagttctttaaccaaaagtggtgaagatgggtttctgcatttggaaacattggggaatccagaagctgttagactcccataaagcgatggaagaaccagaccccttttaggaattgaatggaccagcaacggaggtaatggtaatgagcgaagaagggtcaactcgagttcaacctgcactctcgaggacgtactcgaccagccactcgaccttgtctgccaacgaatctggggagccgatcattccaacttcagatgactggtctgaacttaaagcaccgaaggttgatctcaaaccacttcctaaaggtctaaggtacgcattctttggtccaaactatacttaccctgtgatcattaatgctgagttaaatagtgatgaagtgaacctgctattatttgagcttagaaagtataggagagcgattggttattcattatccgacattaagggaatttcacctactttatgcaaccataggatccatcttgaaaacgaatcctattctagcattgaaccatagaggaggttaaatcccaatttgaaagaaatagtgaaaaaagaaattttgaaactgcttgatactggtgttatctactctatctctgatagtacttgggtttctccagtgcattccgtccctaaaaagggtggaatgactgttgttaaaaatgaaaaggatgaactgatccctactagaactataactggtcatagaatgtgcattgattataggaagttgaatgctgcatctaggaaagatcattttcctttaccattcattgaccaaatgctcgaacgtttagctaatcatccatactattgctttcttgatggatacagtggtttctttcaaataccaattcaccctaatgatcaagaaaaaaacactttcacatgtccttatggaacttttgcttataagagaatgccatttggtttatgcaatgctcctgcaacatttcagaggtgtatgacctctatattttcagacttaatcgaggagatggtggaggttttcatggacgatttttcggtctatggcccctctttctcctcatgtttgttgaatcttggcagggtattgaccaggtgcgaagagacgaatcttgttctcaattgggaaaagtgtcatttcatggtgaaggaaggcatagtgctgggtcacaagatatcagagaagggtatagagattgacaaaggaaaagttgaagtgatgatgcagttgcagccaccaaaaacggtgaaggacatcagaagtttccttggtcatgctgggttctacagaagatttattagagacttctccaagatagccaggccgttaaccagactattgtgcaaggaaaccgaatttgaattcgatgaggactgcctcaagtcctttcaaaccatcaaggatgctttggtatctgctccggttgttcgagcgcctaattgggactatccatttgagatcatgtgtgatgcatcagattacgcagtaggagctgttttaggccagaaaatagacaagaagcttcatgtcatatattacgccagccgaacgttggatgacgctcagggaagatatgcaacaactgagaaggagcttctagctgttgtattcgcatttgagaagttcagaagctatttggttggatcaaaggtaaatgtctatacagaccatgcagctttgaggcatttgtatgccaagaaggatactaaaccaagactattgagatggatacttttattgcaagagtttgacatggagatagtagataagaaaggcattgaaaatggtgcagctgaccatctgtcaaggatgagaattgaagaaccccttccgatagacgattcaatgccagaagagcagctcatggttgtagagttcttcggaaggagctacagtgggaaagagtcccaccaactgaatgcttttgaaggagaatctccatggtatgttgatcacgtcaattacttggcatgcggagtagaacctcccaacctgacaagttatgaaaggaagaagtttttcagagacatacaccattactactgggatgagccttatctttacactctctgtaaaggtaagatttacaggagatgtgtctcagaagatgaagtggaaggtatcctattgcattgccatggcttagcatatggtggtcacttcgcgacgttcaagacagtgtccaagattcttcaagcaggcttttggtggccaacaatgtttaaggacgctcagaagtttgtttcaaagtgtgattcatgccagagaaaaggtaacatcagcagaagaaatgagatgcctcagaatccaatcttggaagttgagatctttgatgtatgggggattgattttatgggtccattcccatcttcatacggtaataaatatatactggtcgtcgtagactacgtatcaaagtgggtcgaagctattgctagtcctaccaacgatgcaaaagttgtgctgaagttgttcaagaccataatcttcccaagatttggagttcccagggtagtaatcaatgatggcgggaaccatttcatcaacaaggtttttgagaacctcttgaagaagcatggagtaaagcacaaggtcgccactccctatcatccacagacaagcgggcaggttgagatctccaatagggagataaaaacaattatggaaaagactgttgggattacaaggaaagactggtctgcaatgctagatgatgcattatgggcttacaggacagccttcaagacccccattggtacaactcctttcaatcttctctatggaaatcatgtcatctacctgttgagctcgagtacaaagcaatatgggcggtaaaacttctgacctttgacataaaaactgccgagagaagcgattgatccaactcagtgacctcgatgagatccgtctagaagcttatgagagttcttaaatctacaaggagagaaccaagcttttccatgacaagaagatcatcactaaggatttccaggttggtgatcaggtgctgctattcaactctcgcttgaaactctttccaggaaaatttaaatccagatggtctggccccttctgtatcactgaggtccgtcctaatggagcagtcactctagctggtaagagtcgagattttacagtaaatggtcaaaggctcaagaaatacttagcagaccaaatccttcgagaggtgacatcggttcatctccaagaacttcttgatgattaaaggagtaaaggagtcaagctaacgactttaaacaagctcacttgggaggaagtcccatgactatctctgtaaataaattttttattttcttgttattttttatttgtctcagttgtgtttgtagttctcaggaacgaaggaacagtgtggagatagagtaaaaactcaaaacttttactctacagaagacctggagatcgattgtatagcccgttggagtacaaaattttgaaaatcatctattgcacctggagaccaaaaacttttaaatcatcattttactcgaccaacagaagctacagagtcttacagggagtttatcaagtttacagtagatttcctgcagttttcccagtcaacagagtgtaaaccacgcgctaaggataagatggagagagaatctcaaactcaatctcagccattcctttcactcgaccttactctctcctgttttcaaccactcgaccaaaacaaccaactcgaccttactctctcctgttttccaccactcgacctaaacaaccaactcgacctcataagccctagccgtactcgacctctgccgcatccacacagttcaacgattcactcgacccgcagaaccactcgacctccgaggaccactcgacctaggcgccgccgtcaccagttcatttcctccttcactcgaccggacctctacactcgactccgttgggatactcgaccaattcatcacatcaaccgccgtctcttccaaaagaagctactcgacctcgttactcagtctcgtagccgcactcgaccgacgccgcctcagccgatttcaacaacgcactctaccgacgccgcctcagccgatttcaacaactcactcgacctttccagtgccgccgctatcgagtactcctcctcgttcaccgtcgaattctcagggttcaagatttcactcgacctcgagttttaactcgacctctgtaactgcaactcaacttcttgaaatcaacagagccctgaagcactgtaatagagattactcgacctcaagacttcaccggctgaactcgacatccacaattcactcgacctccaggaacagctcaggagaatcatgagcaattacagtggcatttcttctgttgatcctgactacaacatggatgagacagagtcgtcatcttcaaggctagagagagaacagagaatatgaaagcttcagaaggaaagctgagatagccggagggaagagagcgatgatagagaggtatgagcttatagacgaagatctggaagacgagtacatgcctgaacagactcgcagagctaccaaacttctacacaagcccgacgtattgcctgctaaggaatatgttaggcttttcaagctgaatgagttttgtagcacgaggtatccttgctcgacctcacttgcacaactcggattgttggaagatgttcagcacctgtaccagatttgtcatctggacactctgatggcttatccgtatgtagcgtatgaagatgagacaatacaattcctctccacgctgcaagtagagctctaccaaggtatgacctctgatgagttggattgtgaaggattgggattcttgcgattctctgtgtatggtcatgagtataggttatcaatcaagcgcttggaaggattgtttggcttccccagtggaacgggatctaagcccaagtatgacagagaagagttgaaagacttgtggatcaccattggcagctctgtacggctgaattcttccaggtcaaagagcaatcagatacgcagccctgtcatcaggtacttccagcgttctatagccaatgtactctactcccaagagatcacagggactgttactaactctaatatggagatgatcgcaatggccctaaagggaactcttcgccaaactaagaatggtatgtctctccaaggtgaaatcaatgacacacctctctctatacttcttctgatccatctgtgtggatacaagagctgggctgtcagcaataaccacaagagagcacgaggcgctctgtgcataggtggtgttgtgacaccgattctgatagcttgtggagtcccaatcatttctgctggactcgagccgcgagcaatggatatcgagcacctacgtcactgcgaattcctggagtttgcaatggttgacgacttccacaggttcaggtttgagcactctacagagaggagagctagcatccttctccctagccctgaggttacacagataatagagggagataacattgatttttagcctgaggttggacgcctctactatgagaacgctctgccattggatgaggatgatcttttagaagaagctgcttcggatgggatggatgaagatagagcagtggagttcgacactagcatgtatcactttggtgaacatgtacctccagcgaggcagagcaagagcttgactgaagcttataagaacaacagtaaattgcagaggtggtgcaagaagcaggacaagctgctcgccaagtgtttcaaggctatcaagcttctgacagataagttgagttgttcctcctccaccactgctattccacagggacagcctcctctggagatgccatcgaggagatttgatgagcctgcgcacaggtctgagcttagcgagcagagagtctcacatgtcccggctaggcattcgtcattcgagtcccggtagcacaagagaagaaggaaggctacactcactcgatctagcagcagatcacgcctcattcactcgaccgcggtgctggccgcagcagaaggagagaggtcgagtatcctcaaagcggtgctggccgcaacagaggtgatgaggtcaagtacccacctgctggagctgatacagaacaaggtggttcgtctatggcctgagagcaatcacaggcagccattgacgaacaactacgttcattcttcgaccgaggtaagcgcctcacttcaccattgtattatatcatttgttgtgatttgttttttttttcattttgtttctgtgattggatttgtcctgagtactctcttccaagtttattcgcacagtggactgtgtgatttaagtttgggggagggctcaggaagtgtgtgttgcattgtatatatttttgagtctgcattcatctaagggatagaaaaaccaaaaaaatttgaaaaatttcagaaaatgatttcacaaaaaaaaagagtgttcatgtaattgcattacatttagaatcgagtctagagtgtttcatttaggattattgcatatgtataggggatgatgatgagatagccttgtaagcattttgattcaccggagaaactcagtgccctcgttactagttgtctgttgagtagtcaatgaatttgaaataaaactgaaccatgcctagattgctctactcgaccacactgtcatgatctgatacgatttcctatcaatttgaacctgaatctgatctttaattatcatgtctgcatcaaatttgaactcatggataccctaaaatacttggattttcttattcattttgatcactcttgttaatccaagtagctgattctgcttattagagcagttaactcaaacccaaacctagactttctttcaagccctatatcacttgtgagtgtttgtgaggtcttattccgattaagtttggtagaaagtgttaggttcgtaacgacagagatagtgtctcatgtagttctagttcatatttttcggactagataggactaggtgggcgcttatactttgggttgggatgtgtttaaaagaaaaaaaagagggattgattcattgataagaaaaagtaaaagactctaggtgaagtaagctaaagaagcagaaaaagtctagtaaaggttttgggatttgaaaagaaaagaaagagttcttgttagctattgaagatgggcgaaagcccttggttttaaaatgttaaaaacaggaaccttagttgttaaagaaatccaaatccactagatgtgtcaaagtgttgagaaaacttctcctagagttaagagaaaagaaaagaatgattagaaaatggcttaaaagattcatgaatgcaaagggtagagttaagttcttatattgggattggagatgggattgccattagagcttcatttgatgtactctgggtagatgggatcttatctctgtatgcatagcttgggacttacctttagcattctactaaagcttaatcattttttgagagatcccctgttactgaagcatattctgtaagggaccatctttgtctcttgaccttttatcttagccaaatgagttcattgatgatgcattgcttgattcacgttccagaattaatgaatgttaaagggattggtagatttgaaaacatgtgtaggtcgagcatatgagtcggattgattgataatgaggcatggctaacgtttttaagtagaattcgatcttgcagctagaactttcaacttggacattgatttcatctggtttatcttgtgctttggctctgagtccccgctttcaaacctcacttccagcttgttcttgattgtttgcttgagggcaagcaaagactaagtttgggggagttgataagtgtgtattttgcatgttttgagcatccatttgtcatcactttagcatcatatcatcactgttttataccatttctcatcatttgtcatcactttacatgtttaggatagatttgcatgcatgttgcatatttgcgttgatttcaggtgatttggagctgttgacgagctatctggaagaagcgggacggatcatgtcaaaccactcaaccccgaggtcgagtagaagcttcaagatctcaacagatcactcgaccccctggtcgagtagaggacatcactacttcaccacatcactcgaccccaaggtcgtgtgtcttcatcccatcacctgacaatcactcgatcacaccactcgaccccgagaccgagtgtcttcaccttcattgccagaacactactcgacctcttcactctacctggaagtcgagtatcactcgactgcatactcgatgacaagcttcagagccttcttcattccgcactcaaccagacactcgagcacaaggaagaaaaaaagactccagctattcactcgaccacccactcgaccacatgggtcgagtacagttcttaatccgtcccaatactgcgttgttttaagtattagggtttcggaacatttggctataagtatcatgtacttcacattttcgcagacaagtttttatctagttttattccgcagaccttgtgttctagaccttttgtaatctggatttctctttatctattcagtattcagtattcatcttttgttcttgagttcgtttactgttgttcattctgttatcatcctactgttacactgttgttatcatgttttcaacttgttcaacgtttacgcttactgttatgatgtctgagtagtgaataggtttctgaggatgggttaaagtagtgtagaattctcagtatgctaggtgattgagtattggttgatagatcccttctgaattagttgttgttaatgcctattgctttctgatcaactgaaatttgagcccagacatttccgcgcccaaaaggtgttcgatgaaatgtttgaaccactaattccagagattcgtgatcctgtaccaaggtattggttgcagggagcgttttggctttaacttgttgattcgtaatgcctgttaggttagctctcgtcaatggtgattgagtctgggactaggttaacttgagagtctcttttgcggtggcacttagatttggttaatgaacttgttgtctagggttaatttattgagcatgtcaatcacttgtaaactgaggaaacgaaactactcaattacgccatccttgggaattctttatctgattgaattctttgtttactctactgttgtttactgcatcctgttatctgtcgcttaatttctgcaattctttctatttactcaacctcgtactcgaccacccagttgtctgccaacagactgtgcagtcgagtatctgtgttttattttctgtctgttactcgacctgtcactcgacctcacccagtgctctacaaagagtattggtcgagtgtttcactgtttctgtttgattttctgttttctgcatgttcacttaggactgttagaacacaccaaaacctgttatttcttggcttgacttagtgacttctgatcacatcttgattgttagcatcacacccatttggattgacaacctaaaatactacaacgatatgattggtgttttaggataattgactaaaaacctattatcacatggtccgggttcctacttcagctcgaatagtttgacctaatgtaaagatcaataacatgacataagttaaaaaataggcgggccttatctaatcaataataagatgaagtgtataaattgaaattctatttgttatgataaaatagatagttatgaaatgtataagattaaaattattgaattaaatattaattttttggattactattttgaatcatagaaggggaataataataattagttgaattcctttcttctatcgtgtatccctgaattttttctctctcgatccgcttgatttcaggtttgattcaaatctctgattacatatctagttattaggattttgtagagagacaaacttagatctatgatttttggctttgatttaaatcaaagaaaacaggcgtttaccaactagaacactagtcgtttcatagtcatacgactaatcagacgactaatcagagtagtcgtatatatagtcgctaagcaacatattcgtatgttagtcgtaaagttacgactaacttacgactacgtaacagtcggcatgaaatagtcgtcgattggtcgtaacatttggtgactatacagcgactatgatacgattaattaacccttttatgggggattattcgtgtagtcgtaaaatagtcgtacttctattgacgattactttgcgactagtttacgatcaattgtattgaactgtgggcgctattctggttgtcgtatcttagtcgctaaataatagacgactattataagacgcctttacgattacttaatgactctcttatattgtcagacaatagtcgttaatattggtgactattttacgactatgatacgactatttgacgactattggacgactatttgacgacgacattttgtgtccaaataagaatttggtcatatcttgatttctttgttggttggtcatcgattctgagaattcggtttgtttgttgttctaaatgctataaagtataacaaaaacacatttttatgaaaatcctatcaaatacataaaacacaacttacacttaaggttcaaagtactaaacacacacacaaacattattgttcaaagttcaagtgaaaagggactgaaatctaaacctattgatcattctgtggagtagctggtagaggctttgtggttgtcgaagattgagaggccatgaagtcaaggaattgcggatctgtttgtcggagatacttctccactaaggacaagtgttcgagcttgtccttttgctcagccgtgattcgggcagtctcagcttcacgcgcagcaatctcataatcacgcttctcattgtaggctgcctgctcctcaatcttacgtatcgcttccttcagccgttcttctaaatctaggaaggacgatgatgattgtctagggagattgcggttggcacagcctaatgtgcctttgagactgccaagtccataaggattgcctctggaatccctttctgtggactgaaaatatataaagaagagattagtgacagaataaccaaaaactcaaagtcaagaggtttagactgcaacattttacctggagaaagatggttgtcaactcctcatttgtcagctcccgaggacgtgaagtgccatcagacacagcagaagcttccgcctttagctgtgacaatctatctctcacattgtgctcataagtttgagcaatcatctccgccttccgatcaacatacaaaccatccgacttagtatgagtctctacaaacaccttaccaatagtgactgttcttcccaatttctcctcctgcagtgaaaccaacacagctcaaatactcaaaaacttacatgtgagataactgaaaaaggtaacagaataacttaccaattggtcttggatttcctgaaaagattttggcccagagaagtggatgtgaggaccgagaccgttatggtcagagagacgagctttggaataggtctgactccatttttgtgcttgttcggtgtcccagtaagcgcacataacagcccacagagtttcaccaatccatggaggctgctctctagttctccttgtggtgctaaccatgtctttcaagcgccgtttacagacctgattgaagtggtactgcacaatccctgttattaagggatcccaactgtgagttttctacaaaaaattgtagcttgagttagtgaaattcaaaagattaagctggaaagttaagaaagtaagagagatgcatgacagcttaccgcaaactcaagaaataacctctctcttttatccactggcacacatgaccagttatagtagggagcattaaatttttgtgtaaaaatccgagtgatctttctaaccaactttgatcccctgtcgcgagtaaacctccaaacacatgaaacaatgaaagataaaaacatgttacattagtgaaactactcaacataaagaatagcaagccaccacaacagaacaaaagagagcaagccaccacaacagaacaaaagagagcaagccaccacaatagaacaaaagtatgctagacatgaccactatgttcacagaagatatagcaagcgaccacaacagaacaagccaccacaacagaacacaagtaaggaagccaccacaacagaacaaaccgccacaacagaacacaagagagcaagccaccacaacagaacacaagtatgctagaacatgaccactatgttcacagaagatatagcaagcgaccacaacagaacaagccaccacaacagaacacaagtaagcaagccaccacaacagaacaaaccgccacaacagaacacaagagagtaagccacgactctagaacacaagatagcaagccaccacaacagaacactagatagcaatccaccacaacagaacaaaccgccacaacagaacacaagagagtaagccaccacaacagatatcaagctcatcaagacatgagtttatgttcacacaagatagcaatcgaccacaatctaacacaagctcatcaagacagagtattacagaagcgaatcaagacccaatccaccacaatctaacacaagcagatgaagacaacaagctaatcaagacacaacctatcttttctaatcattgctacaacctaagacaagcaactcaagacaacaagctaatcaagacacaacctaacacaagactgcaaccgaacacaagctaatacagaatctaaaacaagctaataggttgaggaagagcacataccattcagtcttcggcttgggaataggagacagtacgatggtccacatttccctcccgcgaaccataagtatgtcggagagagccctcgccgagtcttcttgtagctccggcaatgattgaggagctccctcttgaaagttgttgccctgagaagatggatggctgtgtccctgagagttgggatttggagactccggaggctcttggtttagaggatcttctggcggtggattaaactgcgcctcttcagatcgcggcggcggcggatcaacacgctgagtggtggagctcttgaatagttgctgcggcggcggatagttgcagtagtgggggggctgacgttgaggcggctgcatcagaggagcttgaggcgccgccgccggagtgaagtcgtactgctgaggcaacgacgctggtcttccaaccggtgtggaccctccggctctctgtgtaacgttgggggtcgtcttcctcttgcgtgaacattcacgaccggcgataggcatgttcgaagaaagagaagacaacgaagaaagagaagatgattcgaagaagaagaagatctaatgaagagaagaggcgaagaagaagtttcagaagaagatcgaagaagaagaacttgaagaagaagatcgaattagatcgaagaagttcgaagaagaagaagttgaagaagatagatcgaagaggttttgtttggatgaaatgagaagtgaatcgatcgaattagggttttctttatacacgtagtcgcaatgtagtcgtattttagtcactaattttcttggatttgggccgcgaaataagaaagcccaacaacaaagacaaaagtcgccgaatagtcgttgaatagtcgttactttttattgggtttgggcttcagaattactaagcccagcaaatttatggtgtgtcgcatgttagtcgtaatatcgttgttagctttattgggtttggacttcggaattactaagcccaacaaataaaaagtctgtcgcaagttaatcgtataatagtcgcaaattatttcggttttgggctcggctagtcgtcggctagtcgtattacagtcgttaattttattgggcttgggatttcgacagccaacaaattaattatatttataagtattcatgataattataaaatttctataatatttattcaaataattaaacatgatatgattcttaaacaaaaaatttcaaaaaaataaaaaagttaatatacatataagcacacatttagaactcttcatcatcttcgatttcatcatcgtctgaagacgataaattacatcgaaattcatcctctggttcagcatctccgacatcgtaatcgagtatgattgggtttaggctttctaccggattgtctagtaccagatcttcaattgtagtcagcaacacagcttcatcattttctgtttgcaaaagagtcggatcattgttttcatattctccagaaatgtttccccgaggattaacttttaaaacatttagccaaatgcttgttggtttctttgtatatggatacggaatataacaaacttgatctgcctacgatgctgaatacacaaattatacatattaataaatatacaaaattatttaataatttatagagaaccttatgtattcttaattacgtacctagaataaatggctcgtatttattgtatttcctagatgatagaacgtctacaacaccaccatggctttgccgagtgcctctaccaatcacagggtcataccacttacacttaaaaagtgtgattttcaaattgacgatcctctcatactcgagttctatgatatcagttaaggtaccgtagaaatccgcttcatcagatgaatccgcgtaattttctcctttaacacataccccatagttacatgttttttgtccagcgccatgatttttcgtatgaaacaaatatcctcgtgtgaaatacattggccaagttttaaccttgttcagaggcccatgcacaatctcttgaacccaagtaggaaatggagaagtagggttccaatatgttacctacataataaataaacaatatcaatatcaacataatttaaatgatcacttttaaaaattactaaaatgatgtagacttacatattctttaacccattgataatattcttcagctcttttcccgtagagttctttttcggacaaggttggatatttcacataaagaaaatcctcgaacatactatatttacaaccgaagataaataaatcaaagttatcataatgaaaattttaaattaaggagtgatttaaaatacctctcaagtggttgaaaatagtcataatttcttaaaaacatatgcatgtgcgctttggtagtctttttctgaaagccattctacgtgcatttcaccacttggacggtcgacatgcataaatatgttaggtactccaaggacatgatatacaggaacttctcattcatcaaatcttgttaacctgattcatgtaattgattttaattctgaagtatagattgcgaatcgtaaaataaatagttatatttaccttgattttgtttgtatatgatcggcaaagtagtgctctgaaaaataagcaatctcgtcattgatatatgactcaacaattgattctgccgcatatcttttgttctttgcttttcctttcaactttttgaaaaacctctcaaatgagtacatccaccgatattggacagagccacccaattcagcttcgtatgggagatggataggtaagtgttccataacatcaaaaaatgatggtggaaagatcttttccaagttacagattattatgttctatttgagaatttgaacccgacttttctgtaaagttctcgaacataagtcccgaaaaaatgctccaatcccttaaatatatatatatatatatatatatatatatatatatgtgtttaagttaaatcagaggtttaaaaaacatatattgtacctgataatgcaaggtggacattccggtcaaggagttcagcaaagataaatggcagtagtcgctccataaaaacatgacaatcatgactcttcatgcctgaaaactttccattctccatgtctacacaagtagccaaatctgaagaataaccatctgggaatttaacctcatgtttcacacatgataataaactctttttggcttcttcgattaatgcatacgctggaaatggagctttaccctgactatcaatatgtaagtctgaccgagaacaaaaattttcaatatccaatcttgacatgatattatcttttgatttacccttaacactcatgagagtgttcatgatgttgtcaagaaaattcttctctgtatgcatcacatcaatattatgtcgaagattgaggtccttccagtaagacaactcccacaagatgcttttcttgtgccaattatgttcatttccatagcctggcatcttcttttcatgaccgttcccaccaacgtcctttgtttttgctggatttacactagccaaccgctcgtaataaacttgctcccctgtcaaagactcgggtggatactcgctagaagcgtctcttcccttcagaaagtctttcttgttcctacgggatggatgaccatgaggaaaaaatctacgatgacaatcaaaccagcatgtcttccgtccattgggtagataaaaagactttgtacttttcataaaaattggacaagacaatttaccatgagtagtccatcctgataacatgccatacgccgaaaaatcgcttattgtccacagtagcactgcttttagattaaaattttgactcaatgatacatcgtatgcatcgactccagtagaccacaactcttgtagctcctcaataagaggttggaggaagacatcaagactagctcgaggatgatttggcccaaaattcaaaattgtaagaaataagtactctgtattcatgcacataacagggggtaaattatatggagtcagaatcacaggccacatagaatgattacgagacatgccaaacggattgaacccatcagtacacaacccgagataaacgttacgaggttcttccgcaaaccggggatgtaactcttggaaatatctccactctgccgcatttgaaggatgattcatttctccctcatttgattggtgctcagcatgccatcgcattgctgcatctgtcttgtggctctgatacattctttttaaccggtccccaataggtagataccacatacgactatatggtactttggttcttcgacggtcatctttaagcttccatctttgtgcgccacaaaatcgacaatgatcttttttttcgtcttctttctagaaaagcatacaattgttcgagcaaacatcaatcgtatgatatggaagtcctaaattgcgcatcaacttttcggtttggtaatgtgaactagtagcctggtttccttctagtaaaaaatctgtaaacatttcgcaaacagaatccactaacttttcactcatattataatctgccttgttctgcatgagtcgagatgctaaggataactgcgactggccttcacgacaaccatcgtacaatggagtatttgcaccttctaacaagtcgtagaatttctttgaatggttacggaccggttcttccacattctgataactactatcctgatgataactatcctgatgatattatcatcaaaccccacgttaaaattaaatgcatcgttcaccatatccacatatggattttctacaacattacctacttcttcaggattagaactaaaatacgtcctatccgtgtaactagttcctatatccatattcaattcttctccatgcttataccaaacataataatcaggcataaatccttgactaaacaaatgactactaactcttctacccgagatgatgtgtttttcattcttgcatacactacaaggacaatgaaatttacctcgactactctgtactataggctaactattagcgaatgtcatgaactcctccactcctgcgacatattcggctgacaaatttcccgttacttcatcaattctcttgtacatccaatctcaatagaaaccgccaccaccgctataattgaagtttcccgccattatagcataaacgaaacttatatgtgtttcgaaatcgtttttttcttttgatgttgttttgatttgttggtgaataagaatgaagagtgccgtggattatatagaggattttttacgactactatacgactaaacattgtagacgctcagaaattaggtgtacctacccagtaacgcgtaaaacgttttccaaccatattatacgacaattatgcgactatgttacgacaaaggaaaagtagtcgtattatcgtcgccggatttacgactattgtctatagtcggatatgtagtcgtcaaaaaacgactactttacgactacatatttttctcaggaatgttgtcgtccaatagtcgtatttggacgactatgtaccgactaaatagtgtagtcgctaaagtacgactatgtaacgaccaatttttctgttgtcgtaaagtcgtcgtccagcagtcgtaaattagtcgcaaaaaaggacgactacattgttagtcgcctttcgtagtcgtcgtttgtctgttttcttgtaatgaatttctagattgaatctagtccttagattggtttatgtttttttcttttgacgtttaggctattttttcctaggtcaacttcatgcatgtgtgtgtattggtttttaagatatttttgctgcaagaatgatgtgattttttagtatataaacttgaaattcttggtattaaaatcgtctcgtcttttggttttatgttctagaacatgtcagtttttattgtgacgagccttgaggatatagttattgatcattacatgtcagttttcttataattatcttattaaattttttaaaacaaatttccatataatgttttgtgaataaataaaaaataaaatttgtttgacatatgtcaaaatctgagatcgttcaaataaccacgtatcatgatctcgtaagttacgaactttcaaaaccatactttatataataagataaagtaatattcataaatttatttgttgacatttattaactattaaatttaacaaaatctcatagcatttaaataaaatgacaactaaagatttaaaaaatctaataatcaatttaatattttcctgtatttagatattagtaaacaatcgaaagtggaaaatactaactggaaatatttaaactgctgaaataattattgtgtgagctacctgatttcttattcatcaatatatttattataaaaaaaattgaagttcaatctttgttataaacttataattcaaaatggcttttaaaagaacaatatatttttttcttaaaattgtataagctaataaaatatactagatacacatatgtatattttactagataagacccgcttaaataggcgggtgtaagatataaatttattcaaatatttatagataatatttaaaatttgaatagtaaaatagtgattcacacactttttctaatatttaatttagtaatttttgaattaaataaaatttcaatcatacacattcaattttactatacattttaactatctctttcatcataataaactgccttttaattctatacactctaacttattgatgatatttgaatttgaaatagtagctcatatttttatacatattctatacactccatcttatggttagttttcctttttaattaagaaaattataagttaaaatttttatatatagaaatataaattagtatatgtaaatatgtttatttcttttttttaaaaaaacttttttttgacatatgttaacatctcaatggtatacctgacatgtgtcatgatctcgtgagttagtaactttcaaaaccgtactttatataataagatacggtctatattatcaatttgaaacgacataatataattgagaggagattaaagattggcgaggaagcaagaacataatctgtcaccgcttcgatcaattcttatgtaagttttttatgtccgtttcttctaggttttaatttgatgaagtcagatttggattttagtcgaagtcgatttctattaggttgcaatactttttcctaataagtagttgactttgagtttaagcttcatgttttaggtacgactagatatggagtcagtctctatgtgttgcatggcttcaatagattgtcttccagatgagcttcttgtcggaatcttgtccttcattctcactaacgaagctgcttcaacctctattctctccaagagatggaggactctctttgctttcagtcataatctagactgtaacgattccatattttgtcaccccagaaagaataaacgaaagagctttcggtatttcctgtacaaaacattggctaatttggaaggatatagccgtataaagaaattgtcattaaaatttgatgaaaaaagtgtatgtctaaacaaaagaatataagagaagggcatggcaagcttgttgttaaccactggatatgtaatgccctggaacacggtgtctctgagcttcatctatgcttcgaatatatggggtggtactaataagacccaaaatgggctatcaagttaagtaacagaaaggagatgagatagtagaagaattagagatgggaagcagaagattcagagaaggaaaggaagaagaagagacgagatgaagaagataaacttttctttgttcataatcgataagtgtttcagaaacaaaagctaatgttaaatagaagaactaaagaaaacatgctttaaacaataagccataaacgacagcccattaggcccaaatcataatctatcaatactctcccgttgagattcaccatgtcctcatggtggaaggaattgaaaatgaaactctcgggcattgatcattgccttgttcgccttagtctcgtgttttgtcttagctctaggatcgattgtaccgccaaaacctgtttggctagagcctctctccttgccctccttatgtgtgaccccaaactgtttccacctactcatttcagctgaccttttcaacgcacgtgtattctctaatgatgagactccattcgaaaccaacaacatctccaacatcatgcaacacttgtaaactctatcctgctgttttgaaaaactcccaaccatcagcctaaccttgtcttctcctgtctttaaccctaagactaggtgatcttcaatctcgcgtttctgtttttccacacagacatcaacttcaatggttgctttaacgttctcttgttccatcacttgaccaagaaacacttctggtggacgggtgaattgcatcttaacaaggatcccaatttgttcaaactcattgaaccaagaaacttcctttggatattcagtacttaacttcatttcttgattttcacccctcttctcatcttcacagtctcggtcattagtgacttctacacaactaacgttactctccccttttaaagctaccttgtccgcaaggtagtaagcaacaattccacaatcgctttctaattcatttctcattcctccttgctccttttcacttctcatcttcacccttttagtaccttgctcaagatctttattcttaggacatagagtgacccaatcttggttatggatgaaggaaaaactctgattctgccaattcacctctgtctctccaagttttgaaagccattcataccctaagatcacatccacaacatctcgtttcaaatcccacacgcaataatcttcaactatgtcgatgtcgttaatccgcaaagaaatctcttggcagctccttttaacgtcactagctagtctatagctaaaagacaccttatcaatactcgaatccacaactggcagcttgagttgagtagccaacctctcttaaataaagttgtgtgtagctctagagtcaactagcacaataacttcctgctgcaaaatatagccatagaatcgcattcccctgcatgtggccacttctgtccctggaagctcatgttcctgttttagtgtacctgtatcttcattcgcaggccttggtgtgtccttaagatcctccctcatgtatcccattaacaccatgctccttaactccgcttgtgtagttgggtagacttttggttctgtttgtactgacaacccacttccatagaccataagactgttactttcttctagccattgagctgtatccatcatttgtacaatgccattcggtttcaattctcgaactgcagtttgcaaactagggctgcaacccttgtaagaacaatgcctccaagccttgtccctggtaaaataactgagcctagacaaagagcttcgaacctttctctatactcccgaactgatccttcttgttggattcccgaataatgaggttgatgatttaccttcattgttgtctttgtctctcgggccatcatacacttaaattccttccagcttgtaggtgaattctttttccagagatgctttatccattgaccaatgtctccttccaagttagaataaacaatttgtaacctctcctgctccgggatgttattctcaccaaaatagttctcaaagttgctaagacatcttcttagattttcatctaagggccttgacactctagcttccctatgttcctcttcacaatgtgaatccttcactaatggaggcagtctttcccttccaaccatagctacttgtgactgttttttctgacccttccaagcagcgtctctgctaataatatcatgttccacctccatagcgacttgaggagctgttccttgaaatccaatgtataatactcttatactatcagcagcattatcattcttttcctgagaatctaatccgacttgctcccatgctttcttcgagttggtccaaaacaatgacccatttctggcactttgttcacttgacctaatgtcaccatccttgctttctcggtatcgtttacgttcccatgatttccttctagaaacaacaccatcactagattcttgggaatcagatccatagtaaccagagaaagaccttctgtgactttcttgtctagccactaacaaccgtggaaatggcactgtcgagtcaagccaggaagagcgaggtcttttaccaagtttcttaatggattgtttgttgatttgtgttgagggatcgatcatgagacgtctctttcatgttgtcttttctctaaccttatgatggctctgattaacaaaaataaatcctctcctgcgagcttgtgtaacatgggttcttcttcccctgcgagaatgcatcgccgttggaagctctgagacccaaggattgggagaagcttctagaaattcagtgcccaccaagtgttcgacagaattctcaagagagatgtctgggttttttgttgggtttgcttcagctctcgtggtgatgacttgatggagctcgtgatgctcttggttcttcatcttaggtggttcgtcacttgtatcaccgggaaaaactttgcaaatatttcacggatgcctcgtcgatactcctcttgttgtgcttggagcctttggacgacggaatcgagcttctcttctaacttctcaacgaatcgatcaagtattgcttcaagatctgtgactgtgatggcttgagcagcttgagtagccatgatttcaactctcaatgaaagcaccaattgataagacccaaaatgggctatcaagttaagtaatagaaaggagatgagatagtagaagaattagagatgggaagcagaagattcagagaaggaaaggaagaagaagagatgagatgaagaagataaacttttctttgttcataatcgataagtgtttcagaaacaaaagctaatgttaaatagaagaactaaagaaaataggctttaaacaataagccataaacgacagcccattaggcccaaatcataatctatcaggtaccttgatctcccatctaaaatcttcaccaatacaacactcgttaagttgtcattgggaagagaatgttgcatgtcaagctttcctttcgatatatctctcccagcgctaaaggttctcgctgcttgctctgcacttgaggacttaacatcagaggtatcattcaaaaacaccacaagtcatatccagcagtctgttgtctaatatcaacataattatgccgcgtattcttggattattacacttgacacactgagcgttgtcgacctccactactctgattatactctgccggggtctctgcattgtaatttggattcacttgccaaagttacactggacattactttcgcaaaaaaatcaaatgggctgctggtttacggggatgtggaatctcatcagcgggatacgcaacgtcaagaccctgcacctgacttcttctgctgtcgaggtcagttttagtgtatgctctcatcatcttttgcctataaacaagaaaaatattctttgtgtgtatatttcaggtgattttagtatgctgcaaaggtggactacctgttgtcaacaacctccttgagttattgttttcgtgttaaaaaaaatgttttaggaagcttctgccacttatgctgagcgttctccaaacctaaaactctggttctctcggtacgaagcaaacccttaagaaatcttacttaataatatgactggcattacattaaagtagtgtctcttcttgatgtttcagggtctgcatcgttacatatttaaaagaaatcggtttgtggggattcatattcccacaaataaccaagtaaagatattgagtatcatgcattatcaaggaagtgcacacgtgctgaaacagattagccatttcttactggaaatggagtgtcttgaagttgtgaaagttgtcatctccaatggatgacccccaaaaggtgcaactcacaaaggatctattggaacttgccaccgcttcacccaagctcaagatattgaagaatctgttgaagcttgccaccgcttcacccaagctcaagatattgaagaacctgttgaagcttgccaccacctcacccaaggtcaagatattgatacgagatacggtatcacatacacccgtagaggtttccaaaacccgagtccagtcttaaagagtttctagttaggtttttggtgcttttcccttttggattaggttgtttttggttcttcttctttttacattaggatgtgtttgatcgttgagccgaataatttgctttgaatctctgagatcttaggaacagctaatggatcgtagtatgatgatattaagacatctttcttatggttatgaaagaatgcaaaataaatacatgcatctttgtactagtgtatgtatgtaaattacccactaatggtggatgtacgagagaaaaaaatacaagatcaaccattactaggacaattcaagtagccatacatattacttacaacattgtagaaaacctaacaaagttttgtaacagcaaataaataattttcttaactaagacataaaatataactttgaagtttgaacaataatcacaaactatagattcataaaaacactttaaccttcgaaatctgttttaacccactgaacatgtttcacattcatcttctcgtccaactccattttctttaaatccgaactagtcccatcttcagcggtcgagactcttcggttacattttcttctaaaagaatcttcactctcaacatctaacccttcgaactctctaacccaataacaatgtaacaaacaagccagcactagaaccattatctgtaacggaatcatcgccacgaaaacaccacattctactctaaccaaagctttagcctctctagggtctcgagtcgatatcagcaaagaaagactctgtttctctctactaaacaacattaaaactgcaataaactgacccgtcagtgaggaaacatgaagcgttatccgcgcgatgaaacatgatcgagattggtgcgaagaggcactaccgaaagaggagatcagagagacgagtgagactgcgaggaaggctaaaccgagtgaagttggagggtttctaagaagaatgattggtacgaaagaacagagggagaggaggaggagagtgaaattcagacacgatacgagaatgttttggaacaaacataactttctgtgaaaagaagccattgatgttttgtgaaattatgttttttttgtttgtttcaagttttatataggtaaagtaagaaactaagcgcccgttggggagaagatgtaacggctatgatgaggtttaacggttatattgacataatgggcttcacaaaagtattgtaatagatttttgacctttagcctcacgaaaatgacggtcgtatatatttgaattagtaatactattttatcattattgtttacataaatgcctgaaactaaattgcttttttttttcttttcttctcaaagacctaaaactaaattgctactcgaatagaaatttgaaaaggattattatttttgatatatttcatgttgtccataaaatactcttttatgtcaattgtattttttaagcatctaaaatatttaaatttttcttctttctcaattgcaatattttaatattttatttacatatacatagactataccaaaaatcccaaaaaagattataaaaatattgaggtacaatatgagcttataagattactgtttaactgcaaaagaaattgtgtcttgactccatccaaacccacgtgtcaacaactgcgtgcaaaacaacatgtgttcgatgagtaatcgtacgatttccaagatcaaccttggtcgttgggtatatatttcggtaaaaaaatcatcgtcgaaacacaatcgatcattaattcttttatttgtcactgtagttaagccaattgaaactctaataaaaaattaagagcttaaaaacaatagaatatgcatctaaagatttttctttccttcaaaccaagacacaatctttaataatataattaaaacaaaaaaggtaaacataaaacaaagatgtttgaagacaccaaaaataggacggtgaaatttgacacaagtaataaaaaataaggtttgtattaatcaacggaaaaccatagattagaccattagagcattctcattgcataattatttttttagtgtctcaaaaccaatatatttaatattttaatattaaaagcaaactaaccattaaaaaaaaatttacagaagtggacgaaaaaagatttgctctcaccgtttgtcaaagtgagaactggtttttacggtttgtcttttcattcaatttcggaccaaattaccttgggaaaacttaataatggcacaaaccaaaccgtgcagcagttcgtatcggttcagttgatggcataaaccaaaccctacagcagttggtttcggtttagttgatgcggttcagttttgaaaaagacaaaacaaaaaaactgaaacgaagaaaccgaagaaaaagaaaaagagaagagagtaacggagagatttgagagagaattagaaagcgaaacgaaattcagtatccattgtttcaaaattcgacataacttcgaattgttgggtagttgaattgagtcactgaactcccacatccggggaagagaaagttactgtttttcccggcgaagccaagaaaaagttactgtttattccgacgaaatttgaacctccggcgagatagcaactttagctatggctgggaataaagcaaacgaagaagtcccgaggaagcagcatggtccagggaaggagaagcgggtattaagagtttccccgcagagaaaacgctctgcgacaaaggcaacggaggaactgggttagaatctctaatttaccgtttgttttctttgggtgtatcagaattgtaaagcttgtttgattaaagggttagaactagtcggaatttagcatatctttaggatgaaaaattgagaagtagaattggaaatctctgtttccgccaaaaatatgattttgagttataatctggaaaatgtctgtgtacgtacactacttcggtttgcttaacaatatatcacgtttaattgcaggtagtccaagtgttgctccgattgaagatcttacagttgaagagttaccaccaagactctttgctatagaccggtacccttccgagacaaagatgaacgcgtactctaaaccggagtacatttctaacatagcaaatgtactaaaggggaaaccagagatgcagtttcttctcgattctccatttggggaactttttaaaatacccaaaaacaaggcatctttcaatgctaagcttgtccttggactaatatgctgtcagttagtgacaaagaaggtgaatgagatgtggattgtattcggtggtcatccaatcagatttggattaagagaatttagtatcctaactgggctggaatgtgggaagtatcccaagaagaaagacgtggaggatgttatcagtgtgaaacctgagtgtgagagtgtttggaagactctgttcgatgagaggtttggggacacggttccaacaattgctgatttggtgagctggctgcaggaggaggaaagcatggaggggtggaagcaactggcactatctcttattattttggtagacggtgtggtagcggcccacagtaaccccaacagggctacttcgaagactgtcgagatgacgaagaacctggagttcttctgcaaatacccatggggaagggtgtcctttacccgtactttggggaggatagcaaaattccaaactccttacgatgctcaacaactaataaggggtttactggtagggtcttatgcactacatggcttcccattagctctccatcttttagctttcgaaacaatcccatcaattgctaagctaggacctgatgatgtacctaacaggacatttgctgagaggtctatccatcgtcttgcctcactgcgggcaatccggacatctcgttttttggagtgtgaggctgctgatgaggtgtgttaaattgtgtatgtacgtacataataagtaaatgtacattatctatggttaacatacttatttgtgtaggttgaggtcaactatattgtgaaaccagctgatagtgtttgtcctccatctctttcatgggatgatgaagttgatgatccaagggttgattacattgaggcactgttgatagatgggcaccagtggcaggaggatgaatgggttggaggctatgctagagtaccaaagcaggtgcgaccaccacaacaagaagagataggtaagtataagtataaaggttggttacaaatttttttgttatttcacccagaagaaaaccaattaatagcagcaactggtctattgtagatgttaagaggaaacgaaatgcaccgggcccgagccctaaagaacctgctatgaaaaaacagaaatctgaaatggactgtgataatgaagaaaatgctgaggattgttttggagaggctgtgcctgagaagtttattgttgaaatgaggaggtctttcaagaagctggaagaccaaatgtatcaaatgcaagaagatatgaaagactttgtccgtgagcagatacgtgctgcccttgatccaaaaggcaaaaggccaaaacaaaccataccttcccatgattcgcgggaaccacctacttctatggataaggcaccggttactgcgaagaagccatcgagaaggatgtctacaaaaggaagcactggaacgagaaagtcttcaaggctgacccgtgtttctcatgatgtggacactcctgcgctttctgttggctgtaattccaaagaggaagatttggatgtccctggagtacataccactactgtcggcggaagaagaaaaccttcaaagccgaagaaaaatgtttcttttgctgttgacactactgagctatctgattccaataaggaagatatgcaaggattcattgatgaacaggtaaggcatgtacgtacattgctaaatattttataatccataggtataactgtattgtctgcttcgatacagtatggcgctaataatgaaagtgattttactgcaaatgatggattggattcttcggccgctgaagaagagatattagacactggatttttaatagttccttatgctggatccacacaatcccatccggtatgtcgtctactaatactcttaacaatccgtttaaatggtgtatgtacatattcgcttaagaagttagttaaactatgtttcaggatagaggaaattttgttgttggtaagactgtccttttaggttcaatgtctgggactgtctatgttacacaagaagggaggcctgtggaagaagctactattgacaccgagatggaagaagttccatctaatgtgtctgcaagagtttcaaaggtagatcttctggtaatagttatatacagatttccattactatatgcatatatattacattaagttctccacttatctatcgcttaactctatggtagcctatgtttcaggataatggaccaaaggttgttgctgaacctggcttagttggtacccatacaggggccgatgaaatagctgatgctgacacagagatggtagacaatccatcaggtttaccttcaacatctgcacaggtatgtgttagtcacttgttctttttctatatgtgtacgcccataagactttgaaacttatttttgtttcaggaagaagcaagagatgcttgtgctgcgactgaagctaatggcagcgagtccgaagaaacttatgagccttctgatggagatacagctcacatacctggcacaagtgtacgtacatttttgtcactatggtctgtgtacatatatattgtttcatacattactaaaaagttgctttcctttgataaattctacaggttgaggcggcaagagaatccaaattagtgacagggatggaagttgaaatacctgagaagacccacattgatcccccgtcaccatttcaagtagttaacaatgtaagctaactcttgctgaaaataaaatgtactattaactgttcaaatgtataaaatttatattatgcaggtcacacgggagttggataccaaagtcgttggtgatttggctgcagctactgatgtggaggtaacaatttgtgtgtttcaattcctattctcggaatagcatacataggattatatgtgtacattatatagacttgtgtacgttaacttgcacagatagtgatggaagagccgggtattgtcgaggggtctgtaggaactgaggatcctaacccagggtcagatgaagcagaaaagaccgctattcctaaaaataatgtatgtacctattttaaacatagaaaaacgtataaaactgttgttgacaatcatatttgttaacaggatgaatcagacaatgttgctgctgtcgaagcaaaagaagaaaaaaaagcatccccaaaggtcccaaaaaaagtgaagaagcaacttgtctatgaacaggatgatgcccatcctgatggttttaaggcaaaaacagtcttggtgcccgatgtaccaactcaacagacagaggttgttatcagggctggaaatgtctcatacaaccccctggacatggttgacccttcaaaagtaaaggaattcagcaatatctttaaaggaccctctgtgtaagtacattatattaaaatggattatttaatatctcaatcatcatttttgcaagtcttaagcttgttatcaaatatttttctggatttacaagattcacactcttttcgggtttcgcaaagtgcccaacgagttttttgcgaaccttctaacacctggtgaatgggtcgaaagttcggtacgttgcatttatatacgtacactccttgttataaattgtacatagatgattaaatttttggtggaagtgtacgtacactgatatattttttgaacatttcagcatttagaaatgatggcaacgttgatgtggcacaagaacggggaacagatgatagcaaacagatgtattgtattggacatgatgctgacgcatctacttaccaagcgggtgggcgacttcaagaagtgtattaataagaacgggttcaaatggggtaaatttctgtccgacattgctaatggagtacacgtaaactgtgaacccaatatgaagtggctgaaggatgtcgatgttgtgtatgatccgatgaactggaagggtgaacattgggttgctttgggaatcaaccttaatgaacggctaataactgtgtatgacgctttaatatcgcacacgcgagagtcggctgtgaaggcgagaatgactcctatttgcgaaatgatgccgtacttagtcagagcgatgtgccaggatgtattgatttttccgtactcagttgaaccttttgagtatgtgcgttgtcctaccgttgctcaaaacccaactacaggagattgcgggccttacacgatgaagttcttggagttgcttgcgtttggacaccctttttcggaattgacaaccattcgagaaacagatatggtcttctaccgtcagaaatactcggttgacatctacgagcacagcaagcgtgaggacggtactatgcaatttctttaatcgtccaagaacaatattctgattctttgcaactaattattttgaacaaacctatctttgatatatgattgcaactacatttaatttggagattgtcagaagttaatttagtttcctcgatcactctcttgtcgtacacatcgttcacttctaattacataatgtaaatgtgtacgtacacgttaaattaagcttgtcatatatctatatgtctcgtacactgcatattaactttataacataactcaagtgataaattgatttgacagccaacgcttaccaacacatgtatgacattcatttcaaccgtaattgccccaaccaaattcacagtagtggttattaaagtgaagaaattactgacgatctctgactatctcatttcaaacgattcttcccgacgatttacccgactcttcccgacgatttacccgactcttcccgacgatttactctcgaagatagctaagaacctggctgaccaatgctggtccgaccttggtccattggtacgatcaggcactcgtggaagagacattgtctaccgtccggatgtcctcaaagatgccaatattctcaccttgtgtaactcgcccgatgacttccaagctggagggggctacaatccctccggatccgctgatgaaggccgacatcgaccatttttcttaagtttttttgcagctaataatcccacagccgtgtattacgaaggtattcgtgttctaatgcatgaacgaaacatcaatggagccatcaagctcttacaccgtcatgctccagtacgagcaaatgcaacacttgcatgcgccattgtattcatatgtgctgggtatgattaaatgggcggcttgtttctacagctcttcacccgcaaccattatccattggactcggttgccactcgagttttgggtgatgagttcatcgaggaaataaagaagtctgaccctccatacagcaatacataaggtcctactttctcttatcctaccagccatggaattagtatgcctccttgcgccttatattgttacatggtatcaggagctttccaaaacgtttgcaaccgctgttacctctggtcgtgtgccaggcgtgttagtcaaatgctatagttattccattctactttatatgtttgtttatgttatccgctatgtcatgtttcaaattatgataaggcttctactatgttgtttatgtttatgttgaaattatattattgcttaagaaatttgcaaggtgtgttatgtttcttcggattatttttcagccaaattcgcatatgatatttagttcccgtagtaaatgtaaattgtggatattaaaatctaagcgtccacaactacgtacacgtgcatctaccaaataatacttaaaggtttttggtttatctcggaaaactagatatggacgtacgctagcatgagatatcaaacatataaggtctttggtttgtctcataaatggtgatatttatgaatggacgtacactgatagtacactacagcgtacactgtttgttggggaaatgtagaaatataaatgtggacgtacagtaaaacgtacactaagacgtacacgtctagttttaagctgttattaaaagaggttgctcataacaacaataacaaattatacctttgcaataaatacaaccataacttacccaaccatatcttcaatgatgcttatttaagtgttggaatttcattttgttgaaacaccttactcctaaatatgccaaacccaaatattcctgatgatttgcttgcgaagatagccaagaaaatagctgacaaatgttggtggtacctcagacctatgttgaaatccggtcctcgtgaaagagacattgtctaccgtccgaatgtcctcaaagatgcaaacattttcagcatgtgcgacgatgtcgatgacttctacgcggcaggccacgatccaaatgacatcaactccgaaggtcgctatagacccttcttcaaacggtgcttagaagctggtaaccccacgactatttaccatgaaggactgcgtctccttacacatgagtctgacattcagggagctatcctacacttagagcgaattgccccaaggaacgccgctacaacccttgcatgcgcaattctttacatatgtgctggtaatgctcacatgggtggtgtctaccttcggctcttcggaagcaaccattatgctttggaatcggaggaggcacgtgacatttgtgaggaggtgctagaagatataaagaaatatggtaatactttaaaatacacatacgctaacagtttttcgttcccggaatgtggtgacgttcgcactcttgaatgcgcggagatgtgttacatgagatcgagactcttcaataatctttgcaaccaatgttacatctggtggtgtgctaaacggattagccagattctgtagagctcacattcgccacgatcctgtcatatttataagttttccatgcaataatatgtgagctttttacgttgattatcagtaatggaagtttgtttttaataattaccactttgtaattgattcaaacatactaactcaaactactctaatatgagacatcattaacacaaaataataataaactaataaaatatctacgtacacgatatatgctaatgtacaagtggcatagtataattccaactataaagattacatagtgagcgacgatatagttagtaaatgaagacgtaaggaaatttgatttgacgtcgtataacccatatctagaagatttcgctccatattaattacttgctgtcaaatacactttagaagtgacctctatcacactctcattaatatctctattagacgtacacggttcccgagcaacgtactcaattgatttggcagataaaataagtaagttaatgtttatttaaaaagaatgttagtaaatgcgttgacccctaatatagcagtatacatgaagccatattgttccacttatatgcaatacaaacagacgtcaactcaaccttgtgtcagaaaacgtaatgagtactttatagacgtacacggcgcgattatgagaggtacacagtagtttgtttaatttaaaagttactaatatgatgcactaaatatacatccacgtcacccacccacttacattgatggttattctcctctttaaaacccatgtcaaacacacttagttgaatacacgaatccgtctaaacctcctcatttgaaaaacaatgcctttcctacctccgctaacccctccaaccgagttgtacctaggaatccaatggccaaaccacataagcatacttgtcaactacctccccgtcagccagactcccatagagacgctaaggaacttagtctacagttgtgacatcaccacccttgcaatcgatgaattcatgacgtggccatcgttactccaaccggagtctaccttccggccatactttgagctgcttatagaacgtggatccatcccgacggtttaccttgaaggtgttcgccaagcgagcaacttcgtgacagtagctcagggcctttcagtcatgacaacggtcgctttatctgatccctttgcttgcttcgcaaccggtttgttccttatgtgtaccggtaatcacttggatttcctcccgatcagcgaaaagttcttggaaatgactcccacccttgaagctggccacgcggttgcagagatggtgatgtatcacatcagccagcttcacactgaaaatgctcgccgctgggaaaggtcttggaggtttgtccacccgccgagttgcgtagggcgatgcacgttccatcatggctgcagggtttgttttttctactggtacgccagggagattgctatattctactagaagcaaagctgctaaggtctaagctactctactcggctctactctcaagtattttggtatgacggatgcacacatattttgcaacaaatgtgtatgcttcgttcaaaaatttatgttttttgaatcgttccgaccttgttccatgttcaagtttatttatcttatgaatttccctttatataaactgcttgtcctttttatgtttctagcttttgaatgaattaccactttaagttttactagatgtcttcgtgtacgtacactatatagtacattaaacttggtttatcgtacattggcaaattgcgtacacaacataagtaaaaatctaatatttttttatgttgaaggcaccaaaactaatatacgtacacgatagcgtacaccagaaactatacgtacattgcgagagaatttaaacaataaaacaaggcacgtacataaaacaagaaattagattaacatttaaacagaaacaggaaacaacaacgactggaatgtagtttggttcttatggaaagaacaacaacaactgggaaagaaaacttaattgaaatgtagtcttatattatattaaaacggagaataatggatcattccctctagctaaaaaaccaccatcgcgatatccgcaacttctggtatgtctggattggcaaccacctttgaaatagcaccatggctcgcaagcttcgggttagacaattcggttaaacgccaaaagctgagtgcgacaacaaaatttcccttacccaaactcttaaagtaaccatccaagtactccgcctgtttattgcgggcttcgcactccaagacttcattgctacgttagaaataaggacagagcgtttagagggacattgtaaataaaacaaatgaaaagaacacttactatctatcttttatcttgaaactcattttgagaccgtaatagtctgtagtcaatccgccaacatcaaccaacgctccaacgacatctagatgatggagaaacaaagataataatcaaaaaatttcaaaaatgtattaaatgaagcatcgggagtattcctcctcaccgactaaaacgttcttgtaagcagatttctccaaaatgtagtcgaagggagtgaaatcgaaatctggaactggtggtgatctcggtggggcctcaacgacgacggtccgatccataaacaatatgccgtattcatgctttgttgctctgactgagtcagttgccttacggaccaagaaagaggtgatcgtcttccactcattttcaacgaatcggtcttcgtaaaatggagcaaggcgacgatcaacggtggcctcaatacgggaattggatccctacagaacatgatagtagacagttttatatacaagttaagcgaatgaacgaaaaaaacacataatgatttgacggaaattaccgcgtaatctgccaggataaggccgagttcgaagacgttaggcgatataacgttcttgaagactctcacgacaaagacataaattcgccacccagtgatctgaggacacatatctgagaccatatgaaacccctccatctcacggatagcaagaacaagcgaatcgaaagactaattttttttttgtgaatgatataactgctggcacaagaaatgggtttagaatgaggattgtggatacaattaaggaagggaggagacttaaatagaggaaatctggaacggctacagttattaatgcggttccaactacacttgattcaaatattttgtaatagcctggtaaccgtcatatagggtaattataacgttgatttgacaataaacagcaacagttacgtcctttccattaaataccaacataaccacaatatacccaaccatgtctccaactccgttcatttaagagggggaataagttagattttcaaaaaacttatttcaaattactcaaaatgttgaggaaccacctctatgtacccttattacatgaactttaacacgtacacagacaaaaacgtacatagttatacgaacgtagagtttaaacgtacttacacaacgtacatagttacagatggattatatataaacttacgtacaacgagaaaacaccgaagcgtacactatattggccggcttagaaacttgtcaccagaactagattggatttctgcacgtcttcttgttatgacctgcttgtcgacagcgtgagcactgattcggtaaaagtcttttctgtctctttttctgaagtgacaaagacaggaagttaaaaatctccgcatggtaatactcaaaatacaagtagatgaatgaacgatgttagtacatacccggttttcacctctagatgggatccttttggacagtggtcttcctggtggtcgtcaactgtatggaggaatgagtatcaaatccactatatgttgtgggatgacaacatctttcggatccgcgataggtagaattggttctcggaaagaatcagaaaacgtttgaaggccataccaccatccaacacaagccttcggatcaattccatgctcgattgcagctgctagagcgtgttcacatgagattcttagcttggtgtacctaagacacgtacacgtacactggtccagaacgacatgaaaatgctcagcggatttacttgtcacttgatagctccacggtccagacatcttcacagcgtatttacctgacgcaggcaactcttgtagaaatctctcatcaacctcaggtgtcacagaagatttgcttttgttaacacatgattcatggactcagagttgttgctagacatgatattgtagcgttctcctctacagtgagctcttgtccaatgctcaaatcctatgtcctctaggtattttgcgcatttagcactcttttcccttaacagttcaaaatatttctcgaaatccctgaccctataagctttggcagcgctgaaaaataaagcagacacaccaaacttaccataataggtggagaggtttcgctcaaggtgaacagcacatgctccatgatgcgctctcgggtaaacaacacttaggcctttgtatatagatgaatgtctgtccaagacaatcattaaatcgtcactgtctggaacaatctcagctaacttttcaaaaaaccatgcccaagaagcatcggtctcaccatcaacaacaccaaaacctattgggaatatttggaagttcccatcttgggtacatgcaataaggagacatcctttgtaaggtccgactagctgcgttccatctaccacaactaccttcctcatatatataagacctttgatagaagcgccaagagagacaaagacatactttgaagcgctgcttaccattatcttctggtgtatagtgtaggtgtgttattgtacccggattagctaattggagaagatatagataggtcggcaaaaacctgtaatttgctatctcatccccccttacattttccactgcaacctcttttgctctccaagcggtagaatatgaaatccgcacattcagatcatttaggagcagctgtggtaaatcgacagctcgcggcccaccctgcgtagaattgtatctgctcctcacaacttctccgaggagcttataattagcatgtttattgtagttcttccgagagtcgatgttacacgtatgtgtcgtagcatacaacgtgattttgaaactttctgaatctttcacgacgcgagcagtcaaatgccatggacaagtctcatcaacgcacaccatcttcaatattttaggacatgacttaggttgcttgaagcaaaagcattgctttatcgcttgaagagacattgtttgttgcaagacttttctattcttaaaaacacttccaacaaacaaagttttgcctgtgatgctgatttcaacctgtgtctcatcagctcaaaaattgagtaagtcatcgaacacaggagcagcatcgttaccgagaatcgccaactcgccaccatgtaacttaggaaattcattatacacttggtaagcctcagctgcggtaactaccccattatcattcagtgtcccagttgaggaagctccaataccgtcgatcacttcatccccggtgacttcgtctatacaaataagattggaatccctatgcccttcgcagcgtgtaccgtaacccaatggagaaattgtttctccgccaggtacactaagaccagtgtacgtacacgtttccaatagacgactgaattcccctgtatctccgccaggtacactaacacccgtgtacgtacacgtttcaaataaacgactgaattcccctggatgttgagcagtctgttgagtgagactgacgtcttcctcaagattttgttgtacatattcttctactattacatcgttccacttgttgtaatcgtattcttcgccaataccttcactatcgtctgtggtaggatacagagtacttcccccaatagatccatccacaccaagataatcatcacacccatcatcatcttcgttgccttcctccacttcatcctcttctgttgtatcgtcttcaacatcggcttgtttctctacatcctcattattttcatcaacatttgtagcactatcaaacacacggtcactttcaaaaacttcaccatgagacctagagacagtattcccgaacgccttcacggtagtattgaaagagacgaacaagttgagagaaagatacccaccacgaaccaaaaaaaacgtatcaagacccatctgactgtcaatgtatacaggagggcgtttagtatctatcagcactgacatttctcccggcatccagtagctaattatgggattgatctcggtggacttcaaactgaaagcgtctcggagtgtacggacaaagtccgtgtacgtcatggtttcctgaacgcgtacacaacgaccaaacatgccttcctcaggttcaaatttccattctccttctttgcatttccactcaccgaccataacccacctgcatcataaattcaggagacacacattaaatgcaactgaaaaatactatacatataaaaaacaaatggaatgtcgatactacacatttataaacctaaataccaattatcatttgactattttaaacaaacaaatatagatttttcaaattttctgataaaaacatggagttcgaacacaatcaagatcctaatatgacataacaaaaaacttcttaaaagaacttcgttacttacacgagcaatgcttgttttggctccaaacttggtacaaaaacaagatcaacacttcttcagcaacaatatacgttctcaataattctttattcctgggttcatcttctttatctcaacaattattatcaataatttttttaatattatttgatgtaatgatgattttgcattaattgtgacaatagtcacatctaaactttttggagcattaaatgttgatgtcacttcggaataatggaaataatctcacttgtaacggaaccgaatcgtgtcaacgtgaaacaaaaaatcttcaactgaaccagaacagtgtacgtaactaaacctgttaaactaaaccgtacatttcaacagttactaagagagaagcgcaagggcagaagcgtcattttgcaggcgaaaagacaaatggtgaaaaccacatttgactttgacaatccatggaaataaaacatggtaaacgggagggaaaggtctttaaacaaaccttacaaggtcttaaatatctctagaaagacacatatctcacctttattcttttatttcttttttattcttatttttattaattttatagttaaataccatttatttttaggaataagttagaaaatagtacgtttcccaaacttaattggaaaactagtacatgtactatttataattagtagaatagtcatagtacgttttgtttttgtttggtgaaagagagaggtataagggagagagatagcgtgtgagagagagtgggtcaagtgtgtcaggattttatgtatagatatatgtatagatattatttgtacagtgttcagtaatataaaaacaaaaaattattaaacaaaataaatatcaaatgatagagaaaaaaacatagatttttatatctaaacattggtcttcttttgtacagtggtctcaatgtaagaaaattttaaaaacgtacttggtttcaaacaaatatccttctttacagatgcatttcatcatttgatagcgcattccagatagcggtgtacagttagcgatgtaaagatagcgttgtgcagattacctaaaattctttcaaagtggcaagtattactgatgaatgcataactctttttatgtattatccaagtattatttgttatgtattttaatttaatttgttttctctctaaaaaaattgtttttctttgagataacgctgtacagatagcactatacagatacaaccgcacagattgcgccgtgctgattgcgctgtacagattatgctatacagattgtatttatatctctagtttcacaattatagtaatttaaaaattattaaacaaaatgcatatcaaatgataaagaaaataacatagatttttatttatataatcaattttagaaaaataaaaatttacaaacgagtattttagttcttaaaattatagggaaaatgaaatgtaataaagaaaaaacaaaaccatgactcactctttctctctctctcacatgttttctctctctcccttaattacacctctctctcacgaaagaaaaacgtattattactatattacatattataaatagtatttgtactactttctaattaagttttgaaaacgtactagtttgcaaagacactcttatttttatgaccaatgggatggtcttagaacaaacaacatatattaccacattaacctccattttgggcaaagcttgagtatgaagtaattttctctaaatccagaagtccaatgtagagtctcatcatcccaaaatgttttatgataatattcatgttagatatgacttgaattggattgggcccttaactttaggcataatcagtttagggttaattagggtttcttttgtataagtactcttcttaacctaaccttcatgtattctgtactctgttttctcaagcaataaaatctgtctctttgcccgtggacgtagccaacaacaagtgttggtgaaccacgttaaatatgtgtcgtgttctttacgtttttgttatcttgctcacatttgttataacaaactggtatcagagcacaaggttctttgttctgtgttcgtcgtgcgaatttcgtgcagtttcagatccgtgcaaaattcgtgtcagagcacaaggtttccttttatgcgtttcgtgcgatttttgggttaaagaaagttcgtgcagatctgtgtagaagaaggtttcgtgcaaaatccgtgcagaaaaagttttgtgtagaatcaggttctaggatttctgcgtttgtaatctggtgagaagatgtttgcgatgaatgtgaagatcgacaagttttctgggagaaacagtttcagtctctggcagattaagatgcaagccctgttaaagcaacaaggcttgtgggcgccgctgtctaatgacagtaaagggaagagtgacgctgctgggatggttgtcatggaagagaaggcacactccacaatcatgttgtgtcttgaagatgaagtcatcattgaggtttcaggagaaaccacttctgccaatttgtggaagaagttagagaatttgtatatgacaaagtctctatagaacaagttgattctgaaacgacgtctgtttgcattaaggatgcaagaaggtacgccactcaaagatcacttagatcagttgaattcagtattactagagctgcgtaatattgatgttaaagttgaagatgaagatgctgccttgcttctgttggtatctttaccactatcatatgagaactttgtggaatcattcatagtgaataaagttacagttactttggaagaagtcagatctgcgcttcacagcagagtgttgcgtcatcaggcggctggtacagttacagattatcaagcctcaggactagtagccagtggcagcagtgggctgggacacgctaagaagaacagaagcagaaatggtttttctaaaagtcctaagcaagatgatatctgctattactgtaaggagaaagggcattagaaatcagactgtcccaagaggaagcaacaaggatctgctgctgtagcagaagatgacaataagtctgaacatgatgttgctcttgtggctgatggaaacgcccacaactctgatgtgtgggttcttgatacaggagcatcatatcatatgtgtccatggagagagtggttctcaacttatgcacaggtagaaaatggctgcatcaagatggctaatagttctgtcagtcaggttgctggaatcggctctatacagataaggacacatgatggcagattttgcacactgaacgatgtcagacatgttccatcgatggaaaagaatttgatatcactaagtctgcttgatagcagaggtctgaaatattctggtggagacggaattttgcaggtctaccaaggttctgatgtgattctgaagggtgtcataagtggtactctgtatatactacagggttcactgttataggcacatcgaatgttgcatctgcagagattcacaaggaggatatgactaagctatggcatatgaggcttggtcatatgagtgaaagagggatgcaaattttgtcaaaggaagatcttttgtgtggtcatgaggtcaagagtcttgagttctgtgagcattgtgtgtatgggaagcttcaccgtagtaagttccctaaggctgttcacataaccaaaggcacattagattatattcactctgattgttggggtccagctcgagttgaatctctggcaggtcacagatattttatgtcgatgattgatgattattccaggaagacttgggtgatcatgctaaaacacaaaagtgaagctttcaagaactttagggagtggaaaattttggtggaaaatcaaactggaaagaagatcaagaggctgcggacagacaatggtctggagttctgttcatcagagttcaatcagctgtgtaaggatgaaggggctgctcgtcatcacactgtcagagataccccacaccagaatggtgtagctgaacggatgaatcagacattactggagagagctaggtgtatgctctctaatgctggtttagaaaaacggttctgggctgaagcagtaagtacagcctgctacttgataaatcgtgggccgcacacaggaatcaagtgcaggacacctgcagagatgtggtctggtaaatctgctgattactctaatcttaagatttttggctgcacagtttattaccatgtaaatgaaggtaaattggagccaagagcaaggaagggagtatttgtaggctatggagatagagtcaagggattcagggtttggtctccattagagaacagagtgattttgagcaggaatgttgtctttgacgaagtttctatgctcggacgttcagaaaagtctacaactacagaagagagcagtagttttgataaacaggtggagctgacacctaatcagaaagctgatgtacagaaaccagaagacagcaaggagctacaggcagcagatgggtcagctgacactatcaagccagaattaaaaccttacagtatcgctcaaaaccgaacaaggaggattggagttggaccaccacaaagatacggttatgaagatatggcaggattctgtcttgaggatatggcacggtatgctttacaggttgcagaagaggtggatactcatgagccaaccacttatcgagaagctgtttcatggattgaggctgagaaatggtttgctgcaatgggagatgagatggaatctcacagtaaaaatcagacatgggattttgtcaaatgaccaccaggaagaaagattgttacttgcaagtggatcttcaagataaaggaatggatatcaccagttgaaagggttaagtacaaggctcgagttgttgcgagaggtttcagccaaagagaaggggtggactacaatgagattttctcacctgtggtcagacacacttcaatcaggatgctgctagcaattgtggcaaatcaggacctggaacttgaacaacttgatgttaaaactgcttttctacattgtatattagaggaagaaatatacatgactcaactagatggtttacaagttcctggaaagaaagatcacgtctgtaagttgaacaagtctctatatggactcaagcagtctcccaggcaatggtacaagagatttgacagctatatgatggagctgggctacaacagaagtccgtatgattgttgtgtttacattagcaagctgaaagatgaatcctacgtgtatctggtactctatgtagatgacatgctaatagctgccaaactgatgtgtgatattcagagattgaaagatctgctgagtgctgagtttgagatgaaggatctgggagcaacaaagaagattctggggatggagattctgagagacagaaatcagaataagcttttcttgtcacagaaaggctacattcagaaggtgttgaacaggtttggtatgttatcaacaaaacctgttgacactccatttgctactaatatccatctcaccatgtttgctcctcagtctaaagaggacaaagagtatatgtctcgggttccctatgctaatgctgtgggaagcttgatgtatgctatggtctgtacaagaccagatcttgcacatgcagtcagtgttgtcatcaggttcatgagacaaccaggaaaagaacattggcttgctgtgaagaggattctcaggtacctgaaaggtacgtatgatggtggcctcatatatggaggtgaggctcctagcctgattgcaggagatgtagacagcagaagatcaatgactggttatgtgtttgccctgggtaattctgtaattagctggaaagcaactctgcagccaactgtgacgctgtcaaccatagaagcagagtatatggctttgacagaagctgctaaagagggtatttggctgaaaggattggtcagtgatatgggtttgcatcaagatcaggctacagtgtactgtgacagtttgagtgcgatctgtttagccaaggatcaggttgatcatgagaggaccaaacatattgatgtgagatatcattttctgagaaatgagaagaggattcaagtgaagaaggtagggactgttgataaccctgcagatatgttcactaagccggttcctcatagcaagtttaaacattgtttagacttgctaaatatctcaagttgttaatcgccctgaagggcgaacaggcccctaacggggcaaacaggtccctgtagggacatctggcctctgaagaggcataaggctcctgatggagcatctggccccagtggggcgttctggcttttgatgaagcattctggccctgacgggcgttttggcttctgatgaagcattctggtcctgacatacgttctggcttctggtgaagcatctggtctctgatgaggcatcaggctccttgtggagcagtctagctcgacagagcatctggcttctgaagaaacatctggctcagcgaagcatctgtcttgacgaagcagttggcttgtaggagcatctggttcctgatgggacatctgaggcaaaggagaattctggtatgtctgtctgctacatttggttggtacttctggcattgtgttaatgtatctggtacaacagtctggtagctgaatcttgtacatctgtctaatgaggaaggctcgtacaacactgtgagcagtgtgtcaagtacatctatgtggaggattcaagtcaaggtggagatgtgttagatatgacttgaattggattgggccatgttattttaggcccaatcagttgagcgttaattagggtttctctggtataagtacttttcttaacctaacctccatgtattttgtactctgttttctcaagcaataaaatctgtctctttgcccgtggacgtagccaacagcaagtgttggtgaaccacgttaaatctgtgtcgtgttctttacgtttttgttatcttgatcacatctgttataacaactaatttttgtttttaattattaatttagatcaaaatatattttgatttctagcacacccaaaatcatattttaaatgtaatgttaattttgttttagtcaagatatttcaaaaaatgaaattcttgatcaaaaaaaaattaatttgaatataatttattcctttatttcaattctttcatttggataatgtggtaaattaaatattttaacatatattgtgctaaatatcatttttgtcaatataaaaataatcattttcaaaattcaatatctgaaaaaattgccgctttatgcgtttattatcttaaaaaaaatattctacccacaacattggttaaatcttaaaactagttgaaatatatattaaaaacaaaaaaaaatataacatattcaccaactacattttaaaaagaatttggattttagggtgtattgaaccttacatttttaatgatctgagttttagtgagtttttatatgattttgatgatttttgggaagttaatatgatttattgtaaaatctttccaaattccatctaaaaccataagatttagaattctgtatttttaactaaattttttttttcaaatccttcaaaattaataagaatcaaatccacaagctgttttctagtagatttttaaatcattagttcaataacactagatttcattagagtttttaagaaactatgtttgaataacacagaatttgtaaattttacacaaatcacctaaaatactatattgaatacattcatcttagttcaatcaaattctattaaattgaaaaagcttgaagatctaagttttgtttttgggtttaaattgaaccgtaaagatttgacttttagcttaatatactgtcttaaactctctctctcttttttttctttatgtcttcaggtacctctagtgaagggttcaatgaattgtcttccagatgagcttcttgttcaaatcttatccttccttcccactaaagaagctacttcaacctctcttctctccaagaggtggaggactctatttactctcagtcctaatcttgactttgacaactccctccttttgcaatccaaaaagcgtaaatggaatatgcgcaatattcaaaagagtttcgttggtttcgtggatagtacattggctttacaaggcggtaagggtataaaatcgttctcattaaaatttaaagaaacacttggagatgtaaatggtgaagttgatgttaaccgatggatatgtaatgcccttgaacacggtgtctctgagcttcatctaaggatagactatacgaagcggtgtcatctcccatccgaaatcttcaccagcacgaaattggttaagctgtcattggtaacacaaagttgcttcccagttgtacctaattgtatatctctcccatcactaaaggttctcttccttgattcaatttggtttgaagttcctcaattcttaatatttctcactgcttgccctgcacttgaagacttaaccatatatcaaaagcctcattctgtaggaatgccataccatatatctagcaaaaccattaagagactctctgttacctatacatgtggttattttgttgattatggccttaaattatttaacacaccgagtgttgtcgacctctactactctgattatgttcgacataagtatccacatatgaatttggattcacttcctaaagctacactggacattcatttcttagatgataatgccgctaacgtgacagagctcctcagtgggatacgcaacgtcaagacccttcacttgacttcttccactgttaaggtcagtttcagtgtatggtctctcatactctctatggttagaaacaagaaaacattctttatgtgtgtgtgtgtgtttcaggtgattttgttatgctgcaagggggaaataccaatgttcgagaacctcattaatttaaagttttcgggtaaaacacgacagtggaaatttcttctgccacttctgctagagatttgtccaaacctaacaactctggttctctcggtatgaaacaaacccttaacgaatcgttcttactttgtttacacgaaattaaactagtctgtcctcttaatgccacagggtcttgatcaaaattggtttgtggggtttcgcactcctccaaacaatcaagtaaagatgctgagtatcatgcaatatcaaggaagtgagcgcgagctgaaactcattagctatttcgtactgaaaatggagtgtcttcaagttgtgaaagtttatgtttcatctccaatgaatgacctcaaaaagatgcaactcacagaggatctcttgaagcttcccaaagcttctcccaagctcaatatacaagtcctgtaaggtttttttgttcacaaagtttaaatttcatctgtgagttattatatgttcaaaattcaaaatagtaaagaatattatttatttattgttcggttttatgatttttgagttattttgctacatataagctagacaagaaaaccaaaaaaaactcaactaatttttatttggacgtttaatacccatatgtttatggtttgaagaaaaatacacgaaataataaaactgtgcaatttaagctatggcttcttgaacaattgtggttccttttatgagataattacgttgagctgctccaaatcttagcttagatctagataaaacttgcatatcaccaagaaaatattcataggtccatggagatcttaactattgaaaagttcaaatacttcaacattttaatagacaaaactgctaattgtttattttaaaaattatgaaatcatttaggtaaatatcttatttgatcttctttttttgcaaccatcatatattagaccgagcaggacaaggtttttgttagtgggatggggtatgtctctatggtttaaatggattgtcttcctgatgatcttcttgtccaaatgttgtcctttcttcccacgaaacaagccgtgtcaacctctcttctctccaagaggtggaggactatgtttactttaacacataatcttgtggttgacacctccatctttttgcacaccaaacggaagagtttcatggatttcgtggatagaacattggctttgcaaagctgtaaccatataaagaagttctcacgtaatcttagagtaagatgtgaagataaacatgacttgcaccactggatacgtagttccctgaaacatggtgtctctgagcttcatctagccacaaactctgtgtggctttttgttctcccatccaaagtcttctccagcacaacactggttaaactgtcattgggaacaagttcttgcttccttagtgttccttcggatacatatcttccagcacttaaggttctcttccttgactcagtgtggtttgactttcatcaattcgctaatgtttttttccctgcttgtcctgcacttgaggactttgcaatacatatcaagtcattcaggaggaaagcaagttattatatccagcaaaaccaaatagcgttgtccaaacctaaaaattatggttctcttgatatgaagcaaacttactttatatgtatgactgatgcatgaatattaaaattagtctcgttcctcttgatgcttcaggatttagattgttacacatttaggaccatccgtttgtagggattcgaattccctcaaataaccaaataaagatgttatgtgtcatgcagtgcagaggaagtgaaaacgagcttgaacatataagccatttctcactgaaaatggagtttcttgaagtgctaaaagtttacgttgcacttacaatggatgacaccaaaaaggtggaactcacaaaggaactgttgaagcttcccatatcctcatccaagctcattatacaagtcatgtgatcattatcttccataaattattatgttattccaaaattcaaatagtaaggtttcttgttttagtgatttataatttattatttgggtgaatcaaatagtaagttaattttctgattttttcatagttgtttcgttaggtctttttaaactccacatagttcatcaacaaaatccttctcagttttcagccaaaaacaactatgtttattttcttataatgagaagtatcaagactaaacttgggtttctctgaattttgagcccttaaaaaacagtgaaaaagtttttatgggaaaaaacctggacccaaaaacccgaaccaaaaccgacccaaaaaccggttcagggcgggtacggacattatacatataaaaggttattttatatttaatatttgaactaaatacatttatatccaaatatctaaggataattaccaaaaactaaatgcacttgtatttaaatacttctaagtatttttatactcaagatacttataagttttttggataattggacaaaattccagttatttggataaaatttgggtatttggataaaattttcggatattttggtgaattttctgctatttgggtaaaaatgtgggttatttgggtataaaatacccgaaaccaaaggatacccgattttttcggaaatttagcagttctgaaaaccgaaacccgaaccaatattttagatttttctacccaaaagaccagtacacgatcgagttttatccgagcccatcctgtatacccgaatgcccagccctaaaaggctgaaaattaaccgattagtgtgtgctaagaattaagttaaatctgacattcaatgaccataatgattcctattacctaaacccaaaaacatttgcacttccccaagaggcaagacgacataagtttgaatacatgtctcaagagtctaaatattctatctttaagtcaaataatccctttaaagtgcatcgattaagatgaaacagcccaattactttcattaattttagactatgactctcctttaaccaatgaatgttatatccctttataaaccaacaaaatctaccaagaataaccattgtttactgcattatgttttgtattgagaattgatatcaagcatgtgctctgacactggaaagagtatgatggaggccatcgaagcaaaggaggcagagcccgtgctgatcgctggaaaagaactttttcccagatctttccttatgggcataaacatcatgggtgagaatctgagtgagccagccttaagtaggacctggtactggtctccaatagaaggtcttaagcctgggggagcaattaggaagacgaatgacttcataaggcaggagattgcaaggatgaacatccatcttgaaaccggtatcaactctaccttgaggcgcaagaaaggtattgtcattggggtggcaagggctgtatccactgaaatgtatcgcatagtccccggaaacctcacaactgaagagatggacactgcaaaactggtggtgggagatgatgggaagatcatagtgatcaaattcgacgtggactctgttaagttgttgctactcttagctcagattcacacaaggaaaagtataaacccaaacttagagaattatgatcgaaagagagattcaaattgattatcaaagcaataaccaaatcaaattcgaatatcaaagatcgctcgctaaatgtttgctcacgatctacaagtaatcaacatagactactcactggaacatctccaggattattcgccctctctcaacaactcagataaaagacataatgaaagagaaggccaccaacgactatttaagcatcttcagtcgtaacagcaaagcctccctctggaatagagtctttctcttccttctcttcttcagcaaagactctaattccttcagtgtctttctcatctgttgactggatccaacgtggcattgaccgcttcctgtagtaagtctgatgaaccgtatcaatactctctttgtcgaaaatcagcttgtcctcaagcttgaaagttggaaacgcgagaacaaagtctttggataacatccaagagttgtcagtctccggatgatcctgccattgaaccaaaaattcacggctcccagtggcggtataacgaacctgtaaaacacgttcaggaaacagaaaaacatcctctacagactcggaagctctgtaatctgaatctgttgatgaggtcccagtactgccttgagttgagacacatggaaaacatcatgaattttagatccccctggtaattgtaaacgatagaccactgcttcaatcttctcaataacacggaatggaccaaagaatttagctacgagtttgtgacagctgcgacgcatcaccgtgttctgacgataaggctgaagctttaagtaaacctagtcgtctacttgaaacaccacatcacggtgtttcttatccgcattcttcttcatcttcctgagcacgaaaaagatttccccgaatacgtgataacattaaatctctttcccttagttgaacttccaaatcccaattgttattggagccagcttcaaaaggaacgacctgcggtggctccttaccatacaccatcataaacggagtagtcttgatggctgaatgataagatgagttgtaagaaaactcagcccaggccaagaatcggtaccaagtcttcgggtggctagaggcaaaacaacgcagataagtctccaaacagcggttcaagacctccgtttgaccgtctgtttggggatgatatgctgtgctgtacttcaacttcgtgcctgccaaccgaaatatatcggaccatacttcacccaaaaagattttgtttctgtctgagacaatggtcttgggaaaaccatgaagtttaacaacttcagtgatgaaattttgagccacatctatagctttgaagggatgtttcaagccaatgaagtgcgctgctttactcaaacgatcaaccacaacaagaatgacattaacaccaccagaagtaggaagaccatcgataaagtccaaagagatatcctcccaaatcccagtaggtataggtaagggttgtagtaaaccagctggagataatgtagaatatttttgtgtctgacaaaccacacactctgtcacatacttctgaatgtctttatacatgccttcccaatgaaaacaagcctgaatccgtttcaatgtcttcaaaataccaccatgaccacccaacttactgtcatgaaactcgtgtaaaagcaaagaaatgaatttagactgttttggaataaccaaccttcttttataccacaacttatcattcaccacagtataatgacctacagaatctggagatgccttagtttgagctaataaggtttgtatgctcgcatcttcagcaatctccttgtaaagctcctgtaactgaatcacagaaggtactgtcaaggccattaaaagagcagaaacaggatgaggaatgcgagataacccatatgttgccttgttctcaatacccgacttgtaaatgatatccatatcaaaacccaacaatttcaccaaccacctctgatactccatattcacttctttttgttcaaggagaaattttaaactgcgttgatctgtgtgtacctcaaatttcctgcctagcaagtagtgcttcctcttgagaactgccatcacaatggccatcaattccctctcataagccggtttaagctgttctctagaagtcaaaccatgactgaaataagcgataggtcttttattctgcaacaacacagcccccactcctgcgcctgaagcatctgtctccaacacaaacactttggaaaaatcaggaagacctaaaacaggaacatcaatcatagcttccttcaactgatcaaacgcttgctgagctgaatcagaccaaacaaattgattttttttaagtaactcagtcaaaggcttggcaattgacccataaccttggacaaacttcctgtaatatccagcaaggccaagaaaacctcgcaactgcttgatattgactggagtaggccaagtacgcatagcctcagtctttgccttatctgttgccaccccttcagaggaaataacatgacctaaatactcaatctgtggcacaccaaacatacacttcttcttgttagcaaaaagtttgttatcgtgcaataactgcaacaccaattgcaagtgaaccacatgttcagccacactggaactgtataccaaaatatcgtcaaaaaaacactaccacgaacttgcgtaaatatggtttaaacacattgttcatggcagcctgaaaagtggctggagcatttgtgagcccaaagggcattacaaagaattcataatggccctccaatgttctaaacacagtttttatgatatcttccttcttcatcaatatctgatgatagcccgagcgcagatcaatcttagaaaaaataactgctccatgtaattcatctaagagttgctcaatcactggaatagggaacttatctggaatagtaaccctatttaaagccctgtaatcaacacagaatctccaagacatgtccttcttcttcaccaacaagacaggacttgaaaaaggactagtactgtgttgaataattccagatgctaacatatcagctaccatcttttccatcacttcctttgtcgaatgcgggtatctataaggtctcaccgttatagattacacccctggcaacagagtaatcgaatgctccattccgcggactggaggtaatccaacaggaacctcaaacacagactcaaaagctggaagaactgctgaaacagccggatccatctgccctacatcatcctccaactgaaccttctttggaagcaccaattgggagggagaaacatccatttttttaagggacaaagctggataatgtaatgatggatcaccctgcaaagtaacttgtttccccttatacataaactgccataccgtgacttcaagtcaacttcacaagtacccaaagtttccaaccaagcgatgcctaatatcacatccacaccacccaaatccaacaccataaagtcactctgaaattccacaccacccaaagcaaatttcacctctctgccaatgcctgaaccatgaacagacaccccagttcatagcattacttccataccagtatcctgtgacaacttcaacttatgagcagctgcaatccgtggaataacaaaattatgtgaagctctagaatcgatcaaaacaaccacacaacctttccccaaagtagcctgcatcttagtggtctgtggagagtgtctacctagataagaattc

SEQ ID NO: 1340 - DNA, 79677 bp, Arabidopsis thaliana
aagcttctcccaagctcaatatacaagtcctgtaaggtttttttgttcacaaagtttaaatttcatctgtgagttattatatgttcaaaattcaaaatagtaaagaatattatttatttattgttcggttttatgatttttgagttattttgctacatataagctagacaagaaaaccaaaaaaaactcaactaatttttatttggacgtttaatacccatatgtttatggtttgaagaaaaatacacgaaataataaaactgtgcaatttaagctatggcttcttgaacaattgtggttccttttatgagataattacgttgagctgctccaaatcttagcttagatctagataaaacttgcatatcaccaagaaaatattcataggtccatggagatcttaactattgaaaagttcaaatacttcaacattttaatagacaaaactgctaattgtttattttaaaaattatgaaatcatttaggtaaatatcttatttgatcttctttttttgcaaccatcatatattagaccgagcaggacaaggtttttgttagtgggatggggtatgtctctatggtttaaatggattgtcttcctgatgatcttcttgtccaaatgttgtcctttcttcccacgaaacaagccgtgtcaacctctcttctctccaagaggtggaggactatgtttactttaacacataatcttgtggttgacacctccatctttttgcacaccaaacggaagagtttcatggatttcgtggatagaacattggctttgcaaagctgtaaccatataaagaagttctcacgtaatcttagagtaagatgtgaagataaacatgacttgcaccactggatacgtagttccctgaaacatggtgtctctgagcttcatctagccacaaactctgtgtggctttttgttctcccatccaaagtcttctccagcacaacactggttaaactgtcattgggaacaagttcttgcttccttagtgttccttcggatacatatcttccagcacttaaggttctcttccttgactcagtgtggtttgactttcatcaattcgctaatgtttttttccctgcttgtcctgcacttgaggactttgcaatacatatcaagtcattcaggaggaaagcaagttattatatccagcaaaaccaaatagcgttgtccaaacctaaaaattatggttctcttgatatgaagcaaacttactttatatgtatgactgatgcatgaatattaaaattagtctcgttcctcttgatgcttcaggatttagattgttacacatttaggaccatccgtttgtagggattcgaattccctcaaataaccaaataaagatgttatgtgtcatgcagtgcagaggaagtgaaaacgagcttgaacatataagccatttctcactgaaaatggagtttcttgaagtgctaaaagtttacgttgcacttacaatggatgacaccaaaaaggtggaactcacaaaggaactgttgaagcttcccatatcctcatccaagctcattatacaagtcatgtgatcattatcttccataaattattatgttattccaaaattcaaatagtaaggtttcttgttttagtgatttataatttattatttgggtgaatcaaatagtaagttaattttctgattttttcatagttgtttcgttaggtctttttaaactccacatagttcatcaacaaaatccttctcagttttcagccaaaaacaactatgtttattttcttataatgagaagtatcaagactaaacttgggtttctctgaattttgagcccttaaaaaacagtgaaaaagtttttatgggaaaaaacctggacccaaaaacccgaaccaaaaccgacccaaaaaccggttcagggcgggtacggacattatacatataaaaggttattttatatttaatatttgaactaaatacatttatatccaaatatctaaggataattaccaaaaactaaatgcacttgtatttaaatacttctaagtatttttatactcaagatacttataagttttttggataattggacaaaattccagttatttggataaaatttgggtatttggataaaattttcggatattttggtgaattttctgctatttgggtaaaaatgtgggttatttgggtataaaatacccgaaaccaaaggatacccgattttttcggaaatttagcagttctgaaaaccgaaacccgaaccaatattttagatttttctacccaaaagaccagtacacgatcgagttttatccgagcccatcctgtatacccgaatgcccagccctaaaaggctgaaaattaaccgattagtgtgtgctaagaattaagttaaatctgacattcaatgaccataatgattcctattacctaaacccaaaaacatttgcacttccccaagaggcaagacgacataagtttgaatacatgtctcaagagtctaaatattctatctttaagtcaaataatccctttaaagtgcatcgattaagatgaaacagcccaattactttcattaattttagactatgactctcctttaaccaatgaatgttatatccctttataaaccaacaaaatctaccaagaataaccattgtttactgcattatgttttgtattgagaattgatatcaagcatgtgctctgacactggaaagagtatgatggaggccatcgaagcaaaggaggcagagcccgtgctgatcgctggaaaagaactttttcccagatctttccttatgggcataaacatcatgggtgagaatctgagtgagccagccttaagtaggacctggtactggtctccaatagaaggtcttaagcctgggggagcaattaggaagacgaatgacttcataaggcaggagattgcaaggatgaacatccatcttgaaaccggtatcaactctaccttgaggcgcaagaaaggtattgtcattggggtggcaagggctgtatccactgaaatgtatcgcatagtccccggaaacctcacaactgaagagatggacactgcaaaactggtggtgggagatgatgggaagatcatagtgatcaaattcgacgtggactctgttaagttgttgctactcttagctcagattcacacaaggaaaagtataaacccaaacttagagaattatgatcgaaagagagattcaaattgattatcaaagcaataaccaaatcaaattcgaatatcaaagatcgctcgctaaatgtttgctcacgatctacaagtaatcaacatagactactcactggaacatctccaggattattcgccctctctcaacaactcagataaaagacataatgaaagagaaggccaccaacgactatttaagcatcttcagtcgtaacagcaaagcctccctctggaatagagtctttctcttccttctcttcttcagcaaagactctaattccttcagtgtctttctcatctgttgactggatccaacgtggcattgaccgcttcctgtagtaagtctgatgaaccgtatcaatactctctttgtcgaaaatcagcttgtcctcaagcttgaaagttggaaacgcgagaacaaagtctttggataacatccaagagttgtcagtctccggatgatcctgccattgaaccaaaaattcacggctcccagtggcggtataacgaacctgtaaaacacgttcaggaaacagaaaaacatcctctacagactcggaagctctgtaatctgaatctgttgatgaggtcccagtactgccttgagttgagacacatggaaaacatcatgaattttagatccccctggtaattgtaaacgatagaccactgcttcaatcttctcaataacacggaatggaccaaagaatttagctacgagtttgtgacagctgcgacgcatcaccgtgttctgacgataaggctgaagctttaagtaaacctagtcgtctacttgaaacaccacatcacggtgtttcttatccgcattcttcttcatcttcctgagcacgaaaaagatttccccgaatacgtgataacattaaatctctttcccttagttgaacttccaaatcccaattgttattggagccagcttcaaaaggaacgacctgcggtggctccttaccatacaccatcataaacggagtagtcttgatggctgaatgataagatgagttgtaagaaaactcagcccaggccaagaatcggtaccaagtcttcgggtggctagaggcaaaacaacgcagataagtctccaaacagcggttcaagacctccgtttgaccgtctgtttggggatgatatgctgtgctgtacttcaacttcgtgcctgccaaccgaaatatatcggaccatacttcacccaaaaagattttgtttctgtctgagacaatggtcttgggaaaaccatgaagtttaacaacttcagtgatgaaattttgagccacatctatagctttgaagggatgtttcaagccaatgaagtgcgctgctttactcaaacgatcaaccacaacaagaatgacattaacaccaccagaagtaggaagaccatcgataaagtccaaagagatatcctcccaaatcccagtaggtataggtaagggttgtagtaaaccagctggagataatgtagaatatttttgtgtctgacaaaccacacactctgtcacatacttctgaatgtctttatacatgccttcccaatgaaaacaagcctgaatccgtttcaatgtcttcaaaataccaccatgaccacccaacttactgtcatgaaactcgtgtaaaagcaaagaaatgaatttagactgttttggaataaccaaccttcttttataccacaacttatcattcaccacagtataatgacctacagaatctggagatgccttagtttgagctaataaggtttgtatgctcgcatcttcagcaatctccttgtaaagctcctgtaactgaatcacagaaggtactgtcaaggccattaaaagagcagaaacaggatgaggaatgcgagataacccatatgttgccttgttctcaatacccgacttgtaaatgatatccatatcaaaacccaacaatttcaccaaccacctctgatactccatattcacttctttttgttcaaggagaaattttaaactgcgttgatctgtgtgtacctcaaatttcctgcctagcaagtagtgcttcctcttgagaactgccatcacaatggccatcaattccctctcataagccggtttaagctgttctctagaagtcaaaccatgactgaaataagcgataggtcttttattctgcaacaacacagcccccactcctgcgcctgaagcatctgtctccaacacaaacactttggaaaaatcaggaagacctaaaacaggaacatcaatcatagcttccttcaactgatcaaacgcttgctgagctgaatcagaccaaacaaattgattttttttaagtaactcagtcaaaggcttggcaattgacccataaccttggacaaacttcctgtaatatccagcaaggccaagaaaacctcgcaactgcttgatattgactggagtaggccaagtacgcatagcctcagtctttgccttatctgttgccaccccttcagaggaaataacatgacctaaatactcaatctgtggcacaccaaacatacacttcttcttgttagcaaaaagtttgttatcgtgcaataactgcaacaccaattgcaagtgaaccacatgttcagccacactggaactgtataccaaaatatcgtcaaaaaaacactaccacgaacttgcgtaaatatggtttaaacacattgttcatggcagcctgaaaagtggctggagcatttgtgagcccaaagggcattacaaagaattcataatggccctccaatgttctaaacacagtttttatgatatcttccttcttcatcaatatctgatgatagcccgagcgcagatcaatcttagaaaaaataactgctccatgtaattcatctaagagttgctcaatcactggaatagggaacttatctggaatagtaaccctatttaaagccctgtaatcaacacagaatctccaagacatgtccttcttcttcaccaacaagacaggacttgaaaaaggactagtactgtgttgaataattccagatgctaacatatcagctaccatcttttccatcacttcctttgtcgaatgcgggtatctataaggtctcaccgttatagattacacccctggcaacagagtaatcgaatgctccattccgcggactggaggtaatccaacaggaacctcaaacacagactcaaaagctggaagaactgctgaaacagccggatccatctgccctacatcatcctccaactgaaccttctttggaagcaccaattgggagggagaaacatccatttttttaagggacaaagctggataatgtaatgatggatcaccctgcaaagtaacttgtttccccttatacataaactgccataccgtgacttcaagtcaacttcacaagtacccaaagtttccaaccaagcgatgcctaatatcacatccacaccacccaaatccaacaccataaagtcactctgaaattccacaccacccaaagcaaatttcacctctctgccaatgcctgaaccatgaacagacaccccagttcatagcattacttccataccagtatcctgtgacaacttcaacttatgagcagctgcaatccgtggaataacaaaattatgtgaagctctagaatcgatcaaaacaaccacacaacctttccccaaagtagcctgcatcttagtggtctgtggagagtgtctacctagataagaattcatagataaacaacacaacacaggtgccacttcttcaataatctccactccctgcgcaaactcttcttccaacacctctaactccaacccattcaccacggtaagaatctgtaactctttaagagggcaagcatgtcctctaaaatacttacccttacacttgaaacagatacccttactcctcatagcatccaactcttcagctgtatgaccttgcctcggagatactaactgacgttcttgagctgctggtccaggtaacaccacttgacaattgtgaaccaccggagccacagctcgactcacatatggtttatgcaccactcctttggcataacgttctccattcatgtgacaaaaagaacttgattccatctgtaacaccgccgctttctgatttggcaaaccttgaagttctttcatcttcaacacctctttcatctcctgtttcaaaccattatagaaaatcttctccaaatgagttctgtctaaccccgtcacctgtgcagacaaatcctcaaattcaataacataagcagccacagaacctgtctgtttaattgcaaacaatttgttcccaggatcctcatccacagaagcaccaaacctcaaaaacaatcgttgacgaaacccaggccaagaacgaaattcattccactgcatctcccaattaaaccatttcaacacatctccctcaagactcaacgctaccagatccaacttatctggatcctaataacgaccaacgcaaaagaagcgttccacccttgaaaaccattcataaactccagatctatcaaacataggcatctctatacgtcttagtaagctagatcgattatccaataagatctgagactcaccagaacctctaggaggagccgatgaagaaaacgagtgacgtggtgattgataagagtgttcaccatgctcgacccgcttagcttcacggatctccatcttctccagtgttgcaaccacctgtccaaacctttgaacctatctgaaactgaaaagaaggtgattccaaagctccaccttcttgccactggaatgattcctttacaaggatactctctgatcacgtctttataccagtacaatttccagtccgaggaggtattcatggctatggaggaacgagtatggactggttgtgatcaattgtcccggtggtggaaggaagacctgaacgctctaagggacgccatgtggtttaacgctggacatccggtgaagatatcctttaagaaggagactgcctgcagcaacactgttaagcagcttcttgtcaagtcaggtcttgggagcgccgcggcaatgctcccgtaccttgagccagaagtaaggaaggctaaaacctacatatcccatttggaaactgtttctccaatgattaacaaagtaggaggaggtagatacaaatgggagactcttttcgagatgatggcctatctagagaacttcccaatttggatgtcaaaagagatagtcactgtcaacaacgcgcctactcatcttaggagcttagatactagggagaaggtcgtggcctcgatcaaagagtattgtatgcgtaacgcatgcaatatagctttgtatttcggcttctacatggttatggtggagaaaggtgaccagtttgatggtgcgaagaacctaaagaaggtctactcgctcatggcactcaagaagagccactttggctgctacttaacggggacagagcttttccttgattactgtgcttacaaggcgaagcagagtgatacgactggtgtatcaagaagaatgagaatgagagataaagcagaagaagaaacgtgcaagtgaggaggcacgtgagaaggaagaataagatatttttaggatctaaaaatatctttaaaaaactctgttctagtataaatactgcctctgaatgtttgttgttcgttataaatctgtggtgtatgagtctcgcatgagagacttgagagctaagctagttatgtgctagtctctctcgtatggtgtattgggagctgacctagtgatgtgctagtctctctcgtgtatggtgtgttagtgtgtactgatttggttaaggaataaaggtatcgatattgaaaacttacgcagagtcaagtcgtgagagaccgggcatagtgaattagtgatccgtgttcatctcttctctttctattttgtgctctcaagtgttggctttcctttctaaatttgtttgcttcaagacttcttgttattgttttttgtttgttttcatgtgtccgaaatgtttatgttttattttgaatttactataaaatgtgtcaagattttgttgatgtgatcttcagtttcgttacactcccaattgagagttgagactattgctagattgctagagaagcatcacaagttacctcaggttctgagaaccctaacataattgttccagatagggttagtgatgatttcgagacttctagagtatattgctgtatccgaattaagaattgttatgtttcctcttggtttgaagctaaccacaaattcagttaaagagtttccttttttttctcagttgcaaaatcaaaccaattatacagagaaataggcccaagctgttatggccaataacgagctaaaagactagccaaataaagacagatcgagggtagtgagagttgtcactacaggctattctctacaatacaacatttttaagctcgagctcttttgttgctgcatgaagggcacttgtattgtttgatatgctcagctctagctggagtgatcttcacacacttgccatggaaccacttctcacaaaggtcacagcagatccagaattcatcagcaccatcactgtctccacaggctccacaaagggtttccccgtggtcatcctcatcatcttcatctatttcttcgtcctcctcttttggctgcttggtctttgagctttttccctctgaagttctctgcattcccaaaacaaagcaaaggaaatattaaactacacagatgaaaaaaactacagatatactcaaaaccaatccaaccaaagcagcgttttcggtgaagcattgtctctttgttttatccaccctactaagaaactacaatagtctggatgtggtattcaagattatgaattaatcgtgtttccgtcagctagtacatgattaagtgttgaaccatgaacatctttagtgatacaagtttccgaaaactgcaaaagcaaagagttaaaaaggatatagcaagagtcttacaactttagagttagacttggatttgtttccgttttgatttgcagcagatgacttgtcctttgctttagccattccagtcactacttcaaatatagtaggaacatcattgatcatgttgaacaaacgcttcctgaaaaaattacacaagttagcatgtacatatatacctgtgaagagtaggagaccaaaagagaaaccatccattacctctcttccttgtggaaagaaaaccttgagccaaagtaaaacgagacagacagtaaccaagcgtcactgtgaatagcaacaagcgaaagccattccttttcagagagcccatccctagcaaagttaataccaagagctggctctggtaactcaggaggcacttcttcagctggtaaattcacttcccattcttcattcggtaacccatacaagcaaagattctccttctctgaaaacccaaatcgtaacaatacaaaacacacaactttaatcaattaaccacacaaagagactaagtataaatcatattgtacaataccaataaccacaccatagactaagtataaatcatattgcagatttgtacaatacaataacacacaataagtctaaaacagatttgatctatacacagagaaaacccaagagaggatatgagtaaaagagaagaaaagaatcaaaattgggaagaaaagagagaaaccctaaccagggtcacattgttggtaaaactcttgaacatctgcaagaaaagcaaaaactcaaatcaattaggaaattgaacatagatcggagaagataacaatcactagaagcagaaagatctgagaagatagtgaaatttttaccggtggtgagagctttgacaatggcagtacgacgacctttgaaatccttgaaaacttcttcgacagttcgaggattgtagagagcagctccaccttccatgatctctcgcttcgctcgctcgatctaagaaacgcagagagaatctctcagagggaatagaataattgaagaagacgaagaaaaagctgcgccgtggaccgtgacgagacccgatcttgtttttcttctaagtctttggattattttttggtcaaagagaattgggtgtttttggttcgggtcgggtcataaatataatccaatatgaagcccaaaagcccaaatcaattagaattaggatttactctacttttttttggtaatctttaatatcaagtatcaatttgatttctttcgatatcaatttttcatctccagcttaggaaagtatagatttggtcaaatattcttaattgttgtatatattcgacattctttcagtcaatatcaattttgtggctagaaattttaagaccgtagacgggaaattttttgtttaacatatgaaattatgaataatctataataaattggatacaaaaattgtttaacatatgaataatcacatgttttttaacatgtgatatagtaacttgtgttattttcgttgttgtgttattatccaaattcaaatcagtataaaacttgttaacaaataaagaaaacaaatattttggtgattaatataaattttatataaaaactgtgagatacaaaatgaagtattcaatatataaatatcattaaaaaataaacaactatatatatatatattgaataaaaatgattaatacaagaaaaagttagataattattaattgttgtgtttatctatttatttctggaaacccacgtgacttgttgtctaagtttttggtacatccaaagagttcacctttcctatatatatgtttcatttgtgaagaaaaaaatatgagtaagagattcttttttattattctaaaataatataatatataatatttaatacgttatcagcacgaacgactcttgattcgctagcacgagtgactctctgagcgactctaaatatatcatcgctttgaggtaatatttaaattatattaaaaaacttaatttatttaaaattagaaatttatatatagagtaataggctatgccctcttcccaatcataatagtaggatttgcctcttaatcgtataataagatctacatccttgatcataacggtaggctctgcctgctcgatcatatgttcagatctatattttggatcaaatggtaagctctatctccttgatcctatgaaaggttatgcctattctacaatcatatggaaggttatacctcctaaaaagattgttttaatttatgtttatatttttcttataatatataaattatttttagagagatttactaagatgttatataaattaggtttattcaccagaaccaaacaaaatatttttttattactatcatattttcgtctttttgtatactcagtgtgtctataccaaacgttacaagaaaaaacgtaatacaaggaataccactgccacgtcagaaatcgctaacgtggattaatgaactcagccgtaaggcgatatagcggccgttacgactgagttacggtatgttgcggctgacttacgacaaaagtatttgagtcatgagaaaacggtggaattatgagtataacttggcatacgttacgactgatttaaaaattatgtctgagttatgcgataatccagcctacatgacagttgagttaaggaattttgtctgagttataagaatttcgagcataacccagacaacgttatggctaagttattagaaaatatcagacttatttcctcgacacgactgagttatctttttcggctggctgggttatgaaggacgggttagttatgggatgttgttacggctgagttatgatcaagtgttataaatcaaccataaagagctggattaccggataactcagcctagttacggctgacttagttgcaaaagattaattactataatagcatgcagttacggccgagttatcaaacgttatggttgagttatttattgtcggttaagttacgatattacacggctgaattaacttggcgttttttcattttttaattactataatagtattcatgttgcgactggcttatagctttgtttgatggctaagttatttaggcaaatttacatgttcgtttggtggcttacttgccacctcatcaattcaaaacgacgtcggctgcaatattccatgtaaatagagccaaaatttttcaactcgtcttcttcacctgagtttttcacatcaccggaacttacaattcctcattgtcttcttcattcttcttcaatttctttcatccttcttccgatatggttgatccggttccggttgttgttgtgtccggtaattgagtatcgaaacacaaatacgtatttacactgattaagagggtgtacagttgtgcagatagatgcagaaataatgcacgacaagcttgtgaagttggtgctcgatgataaagttagacgaaatgttgcgtctcttattgttttgcggcaaatttacatgtcatgactgagttatatgcttaagagaagacgaaaagtttggttaatttacatgttacggctgagttaaatattctagggaagacaaaaagttcggtaaaattatattacggctgagttatatgcttaagggaaaacgaaaggtttggtcaatttacatgtcacggctgagttatatgttccagggaagacgaaaggttcggtaaaattacattacagctgagttatatgcttaaggacagacgaaaggtttggtaaatttacatgtctcgactgagttatatgctcaagggaagacgaaagatgggtgtaaattatatgcttcagggaagacaaaaagttcggtacggctgagttatcattcagggaagatgaaaggttgtgaaaaatatatgttactgctaaattacatcacgttacagctgagttacatcactttacggctgatttataatacagatcggaaagcaacatttttctggggaagacaatatgaaatttcttggccaaataacaataatcaaattaagaaacgtaagaatatgtttgagggatatatagaaggaagactaatccgtatgaatcaaaacatagatagaagtagaagtgtctccaaatagatcgattgagaggaagacgtaacaagagacatgtaaaatcaaagtgaaaaagtagctattattgatttaaactcaaacatgtaaccaatcatgtagaattccatagatctctttgatttgggttttgatttttgatgacttcaaattcgacaccactgaaagagttttggctggaagagacgagataaatagagaatgacaacgaaattagggttccgtctactgaacgagagaagagagcgacaattttttttcttttttcttttttgtttttttgcgcggatgaacagtgaaatgtcattgaaaaaggagaaaccgaaagcattaagggaatcttttatttcgggtgacatggattcgggtaataacgtggattagggtaaatgatgtggaattgtgatgtggataataattgtatttctatatttcttaattgaaaaacaaaactagtaatattaataaataaaaactaatcaagagtgttaattgtaattacactaatgctcaaaacatatgagtaattaaaaaaagatgtatgatattctgggaataaacatacttttctatgctatttgagtaattaattcttatttttatgttactttattcttaaaacaagattttgcaaaactattttataataaaatttatatataacaaactgttatattatttatataattatcatgtcaaacttggcaaagcttgatatcgctgcctttgatgtttctggaaacaattgtataacttgggcattagatgcaaaaatgtatctaaaagtgaatgggcttcttaaaaccctcgatctgtgtgaaacgacgttagaagaggaaaagccaaaagccatgatgtgtttgcgtcaccagctccacgatagtttcaaagatgaatatatcacgagagaaaatcccgcagatctcttggtctctctcaatgataggtttgatcaccaaaaatacgtgatcttaccaaaagccaaacatgaatggctaaatctgcggtttcaggattacttaagtgtaagtgaatacaattctgctttgttcgaaattacttccaggatgattttatgtggagagaatgttttcgattatgatatgatcgagaaaacttttcaacatttcatcctacaaatgtaatcatgcaacaaactatcgaggtagaggctatacttgatattctgacttgatggaggtccttcttgttgctgaacaaaacaatgaactcatgatgatgaatcatcttccaactggatcagctccactttcagaagtaaatgttgcttccagagccgtgcgagcgctatcgagtatcagaagcaaataaaaataaaatgcccttataaaaaaaatcgtctacaaaacataaacatcattgtcatctaataaaaaaaaaactaacaaaccaaatattagttcttaaacatttgttggcatttcctctctacaaactcgttaaccaagctttcaaaatcaatgtctctaaccaattctctttcgatcgataaaatagccaagtcagtcaatctttcttgtgacatagtcgaacgaagatacgatttgatcaacttcaactctttcgatcaaaatcaatgtcagatacgatttgatcttgaccaacaacatctaattgcttttcatgggttagagaaacttcaagattgacacaagaagccatcaaactatcatcactcgctgattgcaattttttcaaatcaaacgaaaaaccaaatatttattcatacctctgaaattgctcaaaccttgtctcaagtgggtaaagagcttgatccatgatttggataaagtagtcaatcctaaagctctcctcgggtgataatatcacacttccctccatattttctgattcttcgccataatgtctttttcttttaatcacccgctttgcttttctggcaaatataggatcaatctccaaaggaactacaatttctttagcttccacttttgctttcttgaagcctgactctctatattttctaaaatatgaaaccaaccccttgagttgagaaatcgctacatcgatgttcatgtcttctgactgtaaactcttagtcatgatgttaacaacagatagaagattgtaccaaataaccatggaaactaggaactcaaaacttccaattccctgtgtttcacttgttgcaagacattcagcgtcgctctgctctttcggatcatcactattttcagctatgtacattaacgcattcatgattttagaagcctgaaatcgtattgcctttacactttcaacatggctctcccaatgagtctgtgataaaggcttaagagttaggccacccacatgatcctcaaatagtttccatcgcttaactgaagatgaaaagaagcaataagtacaatgaataatccccaaaaatgatatagcctttgaagaagtggttgccatatcacaaagtgcaagattcaaactgtgacaactacatggtgtataaaacgtcctaggacttatctcaagaaatcttttttgtactcccttatgctttcccttcatattagagccattatcataaccttgtcccctcacattgttaatttttaaatcaaaagcagtcaaaacatcttgaagctcacgaaaaagttcttcacctgatgtatcatcaactttcaagaacgttaagaaaaattctttgacctttgttgaagttgttgaaacatctacacacctaatgatgacagtcatttgttcatgatgactaatatctggagtgcaatcaagaatcaaagagaagtactttgcagcttggattttcttgacaatcatagcttttacttcattagctaacaaagctattaactcattctgaattctgttgctgagataatgggaacgagatataccctctctatatcttctaagatgttctatcatcacatgatcaaaatcgtctatcatctctgataaagcttaaaaaaatcccacaaccttcttctccaattttctctttgcttccacgaaaggctaaattttgtttagcaagagtttttaccacataaataatcctaagcaacacctgcctccaatgaattttctctttgcagatttcatcttgagcatatttgtcaatagtttgattcttctgcaacctgagatctagttctgcccactgtttcatacacaaattatgctcacgactagattcgtgttctttaagccttttcaaaacattcctccaatcactaaaccctgtagatgtcaattgactattgtcaccttgattgaacagtttacaacgaaaacaaaagatcttgttcaatacctttgagtaaactagccaacgtcgatcttgttttgctccatcacccatctctcttgtataatacaaatgtgaaaaatgtcttttaacactgttcttagaaaagttataaccaagcgacagtctttttggtggaccttgtactaccatgaaatgcctccattcattccatcctattttgatattttcccaatttcaaggatcatacatatcaaaaattgcacaagtctccttcagatcatcactcttctcatgttcatttgtattcacatcatctttaacattcatctcttctccatccactacattcacgttttctgattcaacacccgcttcttctctttcacactcatttatatcctcatccactccattatctccaagagtttcatctcctttattttccacagattcatcaaaaatttcaggttttttgaagaacctgaacaaagcgttctcttgagattttgcttgttcatcttttagttttctctttttctgtttttacatccagatgattgatctttcttcgttgatgacatttttctgtaataggaaaaataaagttacaatgattaattgcaattttttaattttagaaaaaatagaatggagcatgagtaattagatttaataaacatgatttggtgacaaaatatttaaagaaaatatttgcctttgtattaccttgatcaaaagcttgaccaaagagtcaaaaacaaaagcttgccgacgaggcgacgaagaagatgaaagtgcaaaccaacgaaaaaaattataaccctaattgttaagtaataaatcgtaagtgtctattttgtttctttaattaactaatgaattataagcacatgtttgaaataagcttatacaagtccattattaaattttctttatagtttgagtttcaacattatataacactaacatttttatttttttaacaccaaatcaaatatattaaattataagagtattacataatacatgatacatgaaaccactcaaatacaaccattgaataaaataaaggaaattgtacacaatttcgatgaaaaggtggaagtgaccttgctttccaaacggaagccttacaggcaacagatgaaatatgttaagtcccctcgtcatatactcgtaaaaggctaacatcttatagatgaaactcccaaatgctttctgcattactttgattaaacgaacacacggatatgttgcttgaaatgaatctcgatcatgtcttttataacactctacccatcgtcgccggttagtgaccatgattatttttcccatagaacccgaataaatagatcgttggacagtgagtacatcaccatcattagaccatgaacatgaataaacggatcgttggactgcgagcacatcaccatcatcggaccatgtctttgggaagaggaaattattgccgatgccaattccttcactcaaaagaatttgtctattgattcttggatcaaatacccaaatgacttctccaaaccatagatttgaaaaaacttcatcggttgaaaaccggagatcacatcggtgagagaaaccaccgaaaataaactttagataagggaatacaccacgattcaaatgaatcgacatgacatgggtaaagagacattggtgggatgaatattctgatttcgaatatagcaacgggtttacatgaaactggtaactgtttgtctctgttctaaacatgacaataaacaccgtcaccattcgaaaggagaaagtaggatgaacagaaatccaattaaagagaatacctcccatcaaattattaaaaataaaagaagaaagaagtagaaaagcaaaaaaaactaccggcaaatgccggcagcctgtaaaaaaatgaaacagaaaactggttttgttggtcgcctctgtagtcgccaagggagagagggaagttgggttaaattaatataacagtaacatttatataataatttaactacatataaactatatagcattaataaatttatgccccttaatttttttccaaaatcagaggccctaggccaatgtttcttttcctctcacattggcacaactctggttgcttcatccagctataataattggcaaggacaaggacgaggatgcggacgcggtcaagaagtggtcacggtcgtggaggaggttgtggacgtggaaaaggaaggggtttccctcccaaaaaattcaatgccaagaaaaccaacaaaaatcttcaagtgaatgattttagtcgtgtttcaaagaaataagatgaaagtacttgttacagatgtgacatgaaaggacattggtaccagacatgtcatatcccaaaatatttagccgatctgtatcaagcatctcaaaatgcaaaagaaagggatgttgagaccaatctcatctctaatgaagctggaccttccttccatgcttaactgatgaaacccatcttgatatcgctaattttctcgttgatcacaaaaacggaaaatcatgcgaataagatcgatataacatgatatagttgtagtagtattatatgtacttttgatttaaacatattttctggttttaaaagatttttgaataatggtttcattgtaatatataataatgttttttagtaagttttgtgttattttgaggatagagatatatgtctggtataaagtgttacgatgcacacgatacttaaagatcaaaaatatttctcctttctcaaaataaaagactttgcttgaagcgtgagtactatatctcgccatgcaaaaattattattggctttggtgaagccaattttacaatgctaaagagaattttacaatgctaaagagaactcatttaaaagtaaatgatgtattatatccccctaagtctcagagaaacttgataagtttcaaaaatatctgaagtaatgaatatcatatagagactatgaataagaatgatgttgaatatctttgcattacatccgaggggaaacatattttggaagaattgtcaatgttatcctctggattatattgcacaaaaataaatatgttcgcatcatatattacagtaaactgaaaatttactagtacatttaagatttggcctgaaagacttggacatcctagttcagtcatgatgcgaaaaattgtacaaaattctagtggccatccactaaaaaatcaaaagttttttcaatctaatgaatttttatctgatgcatgttctgaaggaaaactcatagttcggccatcgccagccaaagttgggaatgaatcactattatttttaaagagattacatggtgacatatgttgccctatccaccctctatatgggccatttcgttactttatggtaatgattgacgcatctagtggatggtcacatgtgtctatgttgacaacacgaaattcggctttcgcaaaattcatttcccaaataatcaggttgaaagcacaattccctgattatgcaataaagaaagttaggcttgataacgttggtgaatttttttcacaagcctttaatgattattgtatgtcaataggaatcgatgttgagcatctggtctgtcatgttcatacacaaaatgacatgactgaatctttaattgaacggctgcaactcattgcaagaccattaatattgagaacaaaactcccaatttctgtatggggtcatgctatattgcatgttgcggttttggtacagattcgaccaagcgcatataataaatattctcttttacgattaacgactggccaagagccaaatgtaggctatctctgtgtttttgggtgtgcggtttatgttcctatagcactattgcaaagaaaaaatataggaccaagtcctcacaaatataaaaagagtgacaaaatcatatatctctgatgcaaaaaccaagtcctcgggacgatagagaaaagtatgagatttccattaattatgtccatgatggtatcataggggatagagatgatattgatgacgaaaatgaaatattctccttttctttatataaagagatcgatcatgagaatgatgatccggatccaaagacattatgtgaatgccaaaaaaggccagattaggagaaatagaaaaatgccattcaaattgagttgcactcccttcacaaaagaaatgtctttggacttattttcacagcttctgagatgttttttgttgggcacaagtgggtattcatgcggaaagaaatgagaaagatgagatcaaacgatataaagcccgacttgttgcacaaggtttctctcaaaggccaggagttgaatatgaagaaacatatccttcggtcatggatgcaactacattcatgtacttaatgactctttcggtatccaataatctaaatatgtaccttatggatgtagtgacaacttatttatatggatctcttgataatgatatatatatatggaaatcctggaagaattaaaagttcttgaggcattacacaaataaaagtctaaagatatatatatatatggtcaacttacagtgatcactttacggattaaaacaatctggacgcatgtggtacactcatttaagtgatatctacttaagaaagggtatgtgaataatgaaatctgcccttgcgtctttattaagaaatccatttgtgatcattgctgtttatgttgatgacctaaatataattggaagcccaaaagagattgatgatgcacaaaaacatatgaaagaagagtttgaaatgaaagatcttgaaaagacaaaattttgtctcggactccaaattgagcatttcctagaaggtatttctgtgcatcaatccaaaaggatttttaagcgatttaatatggataaaacaaattatttaagcactccaattgtcaatagatctttaaatgttgaaaaggatccatttagaccttgtgaggatgacgaagatttacttggtcccgaaataccttacatgagtgttattggtggacttatgtatcttgcaaattatacaagaccagatattgcttttactactaatttccttgcaaagtacaattcatctcttactcgaagacattggaatgggacaaaacacatcttccgttatcggaaaaagggatttttcaatctagactattcaaaaagtgcatttttgagcctgaacaaatgactagtgctgtttacatctaaacacacaaaaacaaaattaaaaaccttcctgaactaataatatggtacataattagaagtcaacgttaacaaatgttagtcaacgttaacgattgctgactcagctgacacgtgtataatgatgtggcagatgttattcattttttaaaataaatttataaaagtggagtctcgtacacaattaatccaacttttaccactaagccgcatacattattgaaacaattactagtggaacgttttatatacaaataaaactcatgggattggatttaataaaacggcaacgtctacaattaggggaaatcatcaagtctatgaatttcgtattttgctttcatttcttcttcttcttcatacgagagccaaaaacaaaaaagaagattaattgtggagaaatcgaagatgtctttagcgtaagtggagaagatttaagccaatttttgaagaagtctagtagattctatattgtaagctactaaaatctgcgatgacgaggtaagattctacaaaactaagtaatgtttattaagtttttgtttggttttctacccaaaagttgtgtatttgttttgttttcgattcattgtactaagttagctcattttcatgatttgagagtcaaaattctttttgttcaccaactgtttgatgaaatgtctgagagagtgcaagttttaaacataacttttttatgcttgaagctatactgaagtagtgttccatgtctaccatggtggatattgggtgaagcattatactggggatttatcttatcttgatggtcatgaaatgaagagtataacatgtaaattggaggagttttttacagttatgtcaacggagatgagcgaggagttagatgggcagaagatttggtataagttgccattcgaagaagctaagcaacagaagagcttgagtaatgtggatataagttttaagaacatgtgtgaagcgggaaaatgggtcggatttctggatgtgtatctcgttaattcaatagagcatcctcatgacatggacgtgaatgacccatttgaagaagagattagagttgaaaggaatatggcttcttttgttgatgaagatccaaattttgactaccatgatacaccacctaactctaatgatgaagatagaggggagcagtttgtaagattcagaatgggtatacaatgattatcacagttgtgtctcggatgggtattgtaagctactaaaagccaatgtgactgcaaaattgttcatggatgagataagaactcattttgattataaccgaatgccattcaagatgaaattcaaaggtggtaccatttgatggcaagcagtgacaagtgtaagaaggcaaagaggaaagtaatagacatcattcatcgtgaacatgtggagcagttctcaagactcaaagattataaagctgtaatcattacgtaagtggctttctatgtttgtattctctattttttgttaattctctgtttgttaaccatcttaacttgcattgctttctttcaaggactaatcccaactcaactgttgagttaaacattgttcttaatgatgatggagcagaattattccatagattctacgtatgcttcgatgtaatccgcagattatggtcaatgtggtgtggacaatgatctcagaagctctctactctccaaaaataagtctaaatactctcatataatctgacatactcttatactcttaatgaattttaaaaatccttatttacccttacccaacgaaccggaaccggacgaaccaaaccaaccaattacggtttagtctccaaaccaataccatttaattcataaaatattaacctatcagaaattcccagaattttttttcctccctcacaaaatcaaaatcgacgactgcaactatcgtcgaatcctccgacgttgaatccaatcgaccaagctcgccgtcgttttgcttctgttattcacagtgagctttaccattcttttcttatactttggacatcttaattcatcaagtattgtgttgttgtgtttgtattttgtagatttcaattagatttgatagacttgaaattggtgttggaaattaatggacattatgttggtaactatatattctgggtctattaagacattttaatgtactgtaatggttgattcgtagttaatcttagccagattaatgtttttggtccgaaaatctttgctagaacagaataatctaagtataactaagaaacgtggtatagctgtttgaagtactatttatggtataattggtatttctgaaaatgagcgtggtatacctgttcgaagtacaatttgctagaacaggaaaatctaggtatagctaacgttttttttttgtttttttcaggagaatggacataattatatattttgattatatgatggatattattcaaaaaccggagaagcatatcaatgaaatccaaaagtagttgttttagaccctttagagcctttgtagcctttggagcctttagagccttttgtactctctggttttgtaaaacttgattaaacttggttttgtaaaggtacaactatgacaaatgtaacaaatgtgcttaatttgcaacaaaatttgaggtaatgttatttcttatacaaattataccacttatgttgagtactaaaactactgattgataaaatcataatttaatgaaacttcaaaaaattagtagttaccaaattcatttgttatagaagaaacaccttacactttcaagatgactttataattattatcatcataacattgcaaaacacacaaaattgaatttttcagacatatttttctatgaaaatatatggaatgtttataaaacatcaaaactctttggtataactaaatttatttagtttaaatttaagtatatctaataaaattaaaaaacctcctaaagtcaaactgtgtatatacaggttcaacctgttaacttagaatatctgtgtgcaaatttatttgcgggccccaccttttttgttccgaacaactcgtatgcgggtcccacggttaattccttttcacactataattcattttcacactataggactcatagggaagactcatagacacaacgatagaccctatctttgactcacgtgctttgaaccacttgcaatttaacccacgtttttaaggttttgaaattttaaaatttttgattttttttttatttttctactaaaaaaaagaaaaaaagattagagaacaaaatttgggtagtacaactatgtaccaagttatacctagttaaacaaatacttcaaataactatactaaccaagttgtactgagtttaacaaactgcgtagttataccaaaataaaaaataacaaccaaatcatgttgacaaaaatcaaaacaatacatgaagttttcataaacttactcataaagtacttaaatcttcttctgcctcatcaaaataggactcatagtcacaacgatagaccctaactttgcgtttttgcttctacatttcaccatttcacttgttcttctacatcgtcacgagcttctactataactttttctccttctcgttctttttcttttcttctctttcgggttctctgtttattgtatatccttgtcatgttgttcttctcctctttcttgcatatctaaatttgagctacacatatcaaaaagaatcaactcgactccttccaacacattaacttactgatagtggagccaagcaactacaaatttatgaacggttgatatacacacttttaaagctttatcaaacttgatatatagcatttagaagaacagttcatgacgctaaatgtgtaaatgtacttagagcatctgaccaaattttgcttagttttactttttagtatcagaaatttcttagttaagaaagaaacatagttatactaagttctacttgttttccgaagattatagattatgttattgaatctgtgcgagagattcgatatgttgcttcaaatccacttctggtggggcttcttctttttcaaggattttctttgggtctgtaggattcgatacaattgggttctttgttcgagtcattattcccttacataaatctacaaacaaatttctctaatttcaatctaattctatctaaaattgaaaataaaacaatatactagaccaagttagattgggatcaacaaaaagggataaaagtgaaacgtgaagaacgtaattaaccaaattgaagaagaagtagattgacacgaattttactaatttatgcaaataaggaaattatatatgtagttataccaagtttaatgaagacgaaaaaacattgattaaaaatggtaaaaagaatttatcgattaaattatttaaaggtttgacccattacgtaaaagtcggaatttttttacccattttacttggttgggttagtaatagattcagtttttaaggggtttcaaagtctttcactcatttttcgatttaaagaaaatgaaaattaatcttatttttataagaggagtatttgagaattctattactccttcgagagcccctgagaatttcttccatgtggtgtcgaccaatttttggtattaatggttgcttcctcaaatgtacatttaaaggacaattattagcagctgtggaagagacgcaaacaatggtatgtaccatattgcttgggttgtagttgatgtggagaacgaggataactagatttggttcttaaagaagctttgagtagattttatttgcaagagggtcaaggatatactataatatctgatagacaaaaggtatgcaatctcagtattttttgtattctaaatgtttttttaatatttgatattttttttttatatattttcattctctgtatttagggcttgttgaatgcagcatccatcgtgttgcctaatgttgaacctcggatgtgtcctagatacatctacaaaaacttgaagaaggtttttccgcatcaaagtgaaatgaagagtctgttttggaaagtagcagagagttacacgatcgctgagtatgaggaaaatatggagaatgtcaaaagctatgatatctgcctatatgaagcaatcgtggagagaaaacaaagaactgcaatttagctttcttttcacccacatctcaatgtgttgatgttcacaacaacatatccgagtctttcaacaatgctatagatccaacaagatacatgccaatggttgagatgttggagacgattaggagaacaaccagccacgtattgatctgagggagactacagcagggaaaaggggattttcatacctatacttttgaatctaaagttcaatatattttgaatctcatacctaatctttataaaacgtgaaaaaataatagttaatctaacggacattagtcaacattgttacggtgctgagtcatcgtacatgtatatgatgacgtgttccaaacgaagtcgttttgatgtgtcgtcttaatgttaaaataattttttgcaaaattggggattcaaacccgcaaccttttgcatctctaggaagcatagaataccaattgatcccacaacactcatcgaacatatgtcaaacgtttcaagttataaacccgcaagcatgtgtgttttaaaattaaacaaacgatgtcgtttttaattggggaaaaataagaatactagggcttcgtattgagaaatcggtttctcatttcttcttctttttctccaaaaatagatgaaatggatcgaccaaaaagattccctaagaagtgtcggtgtggagaacctattgtgatgaagacgttaaacactaatagaaatcctggaaaactgtttcatgcttgtccattcgaagataatgtaagtggctcaattctgggaatttttgtgtttttgtgtcatagaagatatgcatttaccttggcgtgacaggataataggtatcatgtgtgcaaatggatggataattgtatggtgcaagagatagaagacttgatagaaaaagttaataacttagaaggaacttcgattacaattcaaaaaacttcaatgcttgtgaatcagagattgataatctgatgatgaagacgcgtgtgtgtgaggctgtggtagaaaaggaagttgcagagattaaaattcagcttcatagcttgaagaacattgtggtgtttgctttggtgttgattttcttttcaggtttatattttgagtatgagaatctatgtgtattgtactgaatgatgtgtaacgtctaatgggtatgaatgatgtgtaatgtttaatggtatgaatgatgtgtaatgtttgatggtatgaatgatgtatttttgtactaaaagtatgatgtgttttgaattatacccatatgatgtgtttgtggttgtttgatgtattagcaggaaaaaaaaatctgaagaagagatgaaaacaaatcatattgtcttccaaaagcatacaaagtaaacagatcagaatgtcttgacaaaaaatacatagtaaacataaactatatgattcgattaaacataaacttcataatcccatcagcctaaacagaacctactttaaccaaaagtcttgtgttgcttgatttccttatattgcttgacttacttgtagaagaatctgaattccactcattctcaattgtagaagcttacctcagttttgcagattgtgtagatttctacttgatttcttctctaattggcttgattcgtctctcccataattacaccatacacatcattgctctatgttttccaatttctcctctttcgtcactctatttcggagaagaagaagaagaaagagaaatcgctttctcgataattcaaaccctattactcttaatttctcccatttgaaaatacagatgcttgcaggtttataagttaaaacatttgagatatgttctatgaacgttgtgggatcagttggtaatcgatgcttcccataaactaaaagattgcgggttcgaatccccacttttgcaaaataaaattttaacatcaaaacgatatatcaaaacgacgtcgtttggagacacgtcatcatacacgtgtacgatgactcagcatcataacggtgttgactaacatccgttagattgactatgatttttgcacgttttataaagattaggtatgagattcaaaatatattgaagtttaggttgtaaaacaccctacaattttgtttaggtatgaaaatacactttggaaaaagtacaggtatgaaaatcctcttttcctcactacatcaaggaatcatacaggtagattcactcttagaacaacagagttcattgcaaaagaacaaaaaaagctaaagtactgtaaattcgtcccaggtggacaaggtatatatgatgttcgtgaggatggtgttagttatactgtcaacattagattgagaatatgtgtatgtcggagatgggatatgagtggaatcccatgtcatcatgttctacgtgtgatcacagagaaaaagctcaatcgtgaagattacatatcagattggtacttgaattctaggaagcagagtattacagtgactcaatccacaatgtcaatgtgatgttattttggaataaatcaggttctcttgtgctgccacctcttactctagttgagcagattgaaaacaggaaagggagaaaatcaaaaccaaagaggaaaaaaggcaagaatgagtcaccttcaaagaagaagaaactcagtaaagagaaaagaattatgcattgtcgtcaatgtgggcattctaatcacaatgaatcaaagtgtcgtaatattagagtagagaagtatatgacaccaaggaaaaagaagacttcaaacacaaacgcaggagaaggatcaagtcaagcaacacaagcaagtcaaccaacacaagattgatctattttcaggtttgaggataaggcaacaaaacatccgactctttcaggtttggtataaggtttttcagaattttttgggacaagtaacaacccttacaatagtctgttttttttaatgtttttttagtatgtataactcttatgatggttatgttgtgtctacggatttaaattagtataactcttatgttgggaagttttaaaaaaactcttatgttggatgtgttgtgtctttggatttaaattttgtttccttcaattcatgtcctttttatgttatcttgtgtcctctttatgatttaatgacttatccttatgatttattgatttatataaagtgttagggttacaaagttaatgaacaagttagtgtctcaatggtaacgataattagaaaatttggaagggtctacggttcgaatccccaattatacaaaaaaagtttcaataaaatttgaaatcaaatagcaaaaatgacgtcgttttctataatatgccacgtcaatatacacgtgtcagctgctcagcaatcgttaacattgactaacaacctgttaacgttgacttctaattatgcactatgttatgagttcaggtaggtttttaaattgttttgtgtttaggtataaaacatcactagtcatttattcaggctgaaaaaggtactttttgaatagtccagattgaaaaatgcccatttagaccctgtgaggatgacgaagatatacttgatcccgaagtaccttacatgagtgctattggtggacttatgtatcttgcaaattgtacaagaccagatattgcttttactactaatttgcttgcaaggtacaattcttccccaactcgaagacattggaatgggataaagcacatcttccgttatcttcaaggtactattgatttatgattatacttttctagaaacaccgagtttggtatagttggttttgtagatgcagagtatttatcggaccctcataagtatagatcataaaccagatatgtttttaccattggggaactacaatctcgtggcgtcctcaaaagcagaatttaatggccacttcatcaaagcacacataaattatgctcttcatgaagcgtgtagagaatgtgtttggtttagatccatgactaaccatattcaagaagcaagtggattaatcatcaaaaatgagccaacaaaattatatgaagataatgatgcttgtgttgctcaaatcaaagaaggttatatcaagagcgatagaacgaagcatatccctccaagatttttctcctacactctagaacttaagaaaaataaagaagttgatatctagtatacccgctcaagtgacaacacagctgatctgttcacaaaggcgcttcctacatcgacattcagaaagcatattcaccgtatcggaatgcgccatctacgagatctctgaagataagaataaatgatattttttttttagggagagattgtgctactgtactcttttttccttgtcatggtttttatccaatatattttttcatgataagttttgtaacgaggtataacacaataatagtaactaagggagagtgttaaagttagataattatcaattattgtgtttatccatttatcccttgaagcccatgtgacttgttgtccaagtctttggtatgacttatcgaaagagctctacccacccctatatatacgttgcatttgtaaagaagaaaaatatgaataagagaatcacttttataactctcttgtctcttcttcttctttgttattatagaatattataatatatcatattcaatagataagagaaatgaataatcaatataatgactaatgaaacttcacattactaactaaattaagagcctgatactttaattacaaaaaaaaaagtcgtaagccaaagttcctaaattctctacacagacggacctagacctcttatggcttattctatttttaatatgtatctttcatctatttttattaatgaaagtatattcaactgtgtatagtgttcttcctatgagagatcattgaaacgcttcttgagaaaagaaaagagtagcgtcgttcaaaaaagaatgatattgaatgatatcctagaattaggaccatatagcagcttaaatacatatatttcacaaatgtaatacaataaaaacaaagatcttctccgattaacaaacaacttctccgattaccaatgcataacccaacacatcgaatcgatgttcatgaaacattcaaatgatcaaacgctagctctcggcatgaaagaacctaacaacaacaagagattcaaaaaaaaagataacaaacgtttacaaaaaaatttggttattttctgcaattgatcttcattgctatatatctctgcttcttgattcttcctttgacaacttccctcgaccaatcttcacttgccacgtctcacatctattgtctccactcatctactgccacgtgtctctatgatatattagtgcctcatttcatatatcaaatctcccatgtttgtagtcaaggttctaagtttgaaaaatcgtttgcgcaaaacaaaaagaaataacaccattgttgatgcctttgtgttgtctgttagccatcttacaatctctcgagtaatgtcttgtatgcttgaaacttccattcgtttatcataaagaagtaacaatatggtagaagttgccgattttctcactaacaccctcaaagaccacgtaacaacactcttgtcaacatacaccattcgatgtcatttgtcttgttcattcactagtagttggcgaatcaccaaactgttatggaacaacaactttactcttcttagaagctcttgggcaggtgtgatccggacatacgtcttcacattcgaaattatttgaagttgcaagatcttgaactccagcactaagattgtacgaatacgaaatctgcttatttgcatcacagtacgaaatctttttattgtacgaatacgaaatctgcttattgtacgaatacgaaatctgcttattgtacgaatacgaaatctgtttatttgcattacctagtcgattcaaggatatccaaccagaagcggttacttaggcaatcatgacagaaccaaatatcaccatgatgaatttatgaggggaggaccactaacaaacactagagaattgtttaaccgcaagcactctagtttgcgataattgagcaaacatttggagtctagaaggctaagtggaggatattggatcgtaaacaccaaaaatatgagttgaaaaagtgggtgaaacttgtgacaacaactatgactctccataattttattagaaattcatgtcaagaggatgcagattttgcacattgcgaagcgttggaagaatatgaacatcatggtgatgaagtagtagaaaacgatgaagtagtagaaaatgatgaagtagaggacaatgttccaaacactgatcatgtaccgtacgtaccgactggtgctagagcgatggaagatgtacgtgattctatcactgaagagataactagaggatatcgacttccatattagaagttattgtaggcaaaaacaattattgtgttaactataatttatttctgttttatatttctcattgtttttctatgtattttctttcaactttaatttatgaggttttttaacaaataatttatgaattttccaagtttaatatagtaccatattttattctaaaaaaattctagtgttttttaattttgatagaagaataatttacatgtaactgtaatttacatcttaaaaataacactaaaataaatatatgtcattttcagtcattttatacactatgcattgagatgcagatgcacattgttaaaaaaaaaatcaaacgaacacatctgcattcacatgattcatctagatgcaccatcaacttcataaacaaacatcatctaaatggtgtatttgaatggatcttctggatggatcacccaaatgcattacctaactgatcacacgaacaacaccatattgaaaagaaattttttggaaatcgaactcaaaacatggttgcattatatgttcaactagaatgtgacccgtggtacactacgagtttagtactttttgtttattttttatttttataaatgaagaatttgttatgtattatgtgtataagtgtttgtgttaagtaataaatttttcgataagtttatatatagtttttatgaagtcgtaagtttatgatattaataagtttaatattattttatcttctatgatttgatccgtgatacactataaggtaataaaatatgttttattttataaaattttgtatttaaattacataatttaaactttttgtgttgttaaatttagcccgtagaacacatgtaatttaataactttgtattacaattagatatttagatgtgttaaagaagattaacattagaggcgtcaaagaaaattaactcttattttaatattaatgttgatttttaaaataccaacaaaaagtatatttttctaactaaaaaattaaaactaaaattatatttgttaaatgctactattatttgttttgtttagtgttaaagattatatagttgggagcacaacaaataaaacattcgtaccttgtgatcttgtttttttagaggaagcaaactattgagtcaaatttgttcctaacatgagtcaaacttgttcggtcttcaaaaaaatatacattctcatcattccctgaagctataagaaagaaaaagggtcaataaaacagaatataaaatcataattagatagtattattaattatgttagaaacccaagatcaatattttctttacatatcataccttaagctgtaacaaaaaaataaaataaatatatatatatataggtgtcaatttgatgagtagaatctcaaaaaagaaacatgattagttttgtatttgcaagaagtctaaaaacaataatcctcacatttgaattgtcttaaccctaactttggtattaatacacatatataaagcacttgatgaaatttgataatcttaccatttttttctttgtcacgtatgaggttagcagtgtcttgcttacatttgcaatccctcaaataagtaaatgatgcggtcactgatgttggtagggttttggagctttgctatatatcaaaatggtattggtgttttgtgtatttaggtggttgggtatttatagtgttttgttatgttaataggtttttgattagaaaatataaaaaatattaatgagcaagtatttgatatctttgaaaatctttaaatcgtcacaaactaagaatatgctacgtagatgcttaatcaaatattgatgaaatcttttagttatgagaaatttcttattctattagttgaattgaatatttaattaatatggttcaattttgttaggaaacaaatgctaaatgtaatataatttctagcattataataggaaacaatttcctgtggaaaaatctgtttgttataaatttaatgattaaatgtcgtttagattttatttaggaaaatctcaaattaggtaggaaaatctatcttaggaagatgcttgagtatgaatcaagactattctgaaaatgtattttgattaccggatttattgttgaaactaattagagaagaataaattttgctaagatttgatgacatttaaattagcatttaaaactaaaatcgttttaaaatcaaataattctagatatggttagttaggattgattttcgaattttgctaattaggaaataatcattcattaattccgtagagttttagggattgatttgtgcaatttattagggtagtagttaacaatatctatgtttaggcaagtaattagtgcaatatcttaattgttaataaaaaatttggtcattgttctaaagaaaatatcttgtctgattgattttgtagggactaaacatacaatatcaaaattgaaaaaagatttttcgacacaaatcgtctccaaaaatgtatatgtagatagatttataagtgtcatcaaccgcttgagttacttatgaaatcctattttgtttgaatttttttttttgatatatttaagataaaaaaagtaaaataagattacatttttcagtggatttaataaacaaatggttagaactaaaacaagaaatatgagatctaaaaaagaaaggaagctaagtaaatctcatagagatagagatctaatgaggatgtctacaaggatattactgatagaaaaaaacaaaaaaacaaaaacaaaagagtgtaaacatagtagcacacactccctaatgcatctaataattacccgcacgcattaacatctctcacatgagtctaatgagaaagtctcttagaaacaaaacacccaaagcatgtctcatcacttgaccagcttttgtcttcgtcccacagacatctccactctcttttgtcttctctccacaaaccctaatcactattaacacacaaatcacagcttttcaaaactatatattatatccaaatatcaatatatcctttttctaactctcatcaatatgtcttggcagcttttgatattttcttagcagacaaacacacttgagctgtttttttttaatctataaatactctttttttgttgatagctttgagatctctctcatggcttttcctcagagaaaacgaacaccttctttctcttcttctgttcttgactctgtttaccgttctatcgacgaatctgacggtctccaaagtgacctaaaaggatccatcaacgaaaatgtatcttcatcatcatcctcaccatcaccaaacaagaaagacgacaagcttacaactctaaggcgagcaatcatggacgaagaacactggctttacgcccgaagcagcaccactaccactaactcctctgattcctcttctttttcctcttccgaggcagagtcatatcgaacaaagagaaggttgagaaagcttgcggaacaaggtaaaagatcaggtgatgagagacagagaacaaagagaacggtaatggacaacgatagtagattgttttccaagtccgatgatgataagaagcctaaagccgtgaagataattgaggagctaaagagatcgaagcagccagtgtctcctggagcgcgtctcactagcttcctcaactcgatcttccaatctaacgccaagaaagtgaagctttgttctgtcggtaagacaacagacgttaagtcctcatcctcaaagtcttgcttcagtcgaacaagaaataaaaccgacaacaacaacaacaactgcaagaagttggaaaggtctataagattctatccggttagagtaaccattgatggagactgcagagactatgctcaaaaacacattactcgcgtgaggaaaccaattccagaatttaccgctaagaagagtgtcaaagaggagattaagaccaacgatcatcacactgagtttacttgcatcacaagaaatataggtttgaaggattttgtgagaagtaacaaatatgaaggtaaagaagaggaggaggatgcttggagtcactcaagttcggatctgtttgagcttgatagttaccggatcggtatggggcggtacttaaaagaacttccagtctatgaaactactgatttcaagactaatcaagccattgctagaagcttgcttttgtagtgttttgttttgttcctataacttttttccttatcattgaaattaatttactacttacgccaaagaagatatcaatttactaattacatttatttggtcttgagtcattgtcacgtgcctggtttcgtggattactaacagcaggtccggctcattaaaacattagaccctgcacaaatatatattcttaaaaaaaatctaattctcaaattgtaccaaaatgtggacccttaaatataaagatattttgttaaaatattggagatcttgtgtttttcctcttaggtacatgccaaaaactatgcttaactatgattacattcgggctcatctaaattgttatcacctagctacaaatggctaaatattttttttagaatatggtcatgtatgattagtatgtggctacataacggtttaaataatttgtaaccgatctttaaatatatattgcaatacatccacgatgtgctagtttagttgagaatcgaaaatcataaaattatcttgtttacggttttaatggagattccaatgtgggttgcttttggtgaaagtgttctttcgaaattgacatttagaaaactatattctgtgaatatatcacatgaaaaattgagtgatttgactatcttatctatcgaaagaaacactgataaaatattgaccaaaaatttaattagatattttatgaagaaaaaaagaaaacaatatactgtctgttgaacaaatatatttagttattcttttcaaatttttcaaatttttttaatatcaccatgatgtgtttgatgagacatactgtatatatcattaaatcatccataagatcttacaagccaacgatgcatttcaaatttgtggtacgtattgtacaaaaatagatacatgtaattcatatttttttcttttttaatttatgtaatcagtgacccataagtattattacatggacagatgcatgtgcattaaaacaagttctcttatcccccaaagaggactcttcacaatacagcttgttttggttgtgatattgattacatctacttctttcttttattttgtaacatccggttttaggaatatggtaatgcatgcgtaaagattcaaaagaattgatttgatcatttatttaaccaaaatgtacatattttttcggtcaaacgttctgcgagagttccataattaagcatgtttgggctggaacaattttaggatggtgactttcagggaagtgattgtcggaaccatgtgagtgaggagtaaacacgggaaaaatcatgtggtgatttataggatcgataaacaagtctttaaagcttttcgaatgtagcaaactgaccatcggacatgagtggactcatagacccaaaaaaagatgtggatgctcactagtaagggtgatcgagacgttacattctactgtttatatgttttatctttgtctttagaaaaatcagtgtagtttaatgggtctaactcctacaaatactctttttaatttaataatctttgtgctcactaaagcaatgtcgtttgtaggagttaaacttattagactccaataaaaatgagagataaaataaaatgaagtgataaattttatttgtctaaaaaaaaaaaaaaatctgagtatttttattagtattgtagaacactaaaaaaactttaacaaaaaaaaaaaacactagaagaattaatctgcgccatgcatgatgaatgaaagaagtaaatccaagtattttcgtaataatcaaatcctcctactctcaagatcaataaataggattttggccaacaaaagagtctacacgtggacactctgagggcggtcttggctttagaacgttggaagaatttaatttagctcttttagctaaacagttgtggcgtcttatccgctttccaaactctctcttgagtagggtcttgaggggagatactttcgttatagtgatccattacatataggagcatctactcgtccgtcttttggatggagaagcatcatggctgccaaaccttttatctatcgggacttcggaggaccataggttctggaatgctaacccgtgtatgggaagatccatggattcccaccatcccagcgcggccagcgaagagcattcttgacataagagatcccctactctatgtcaatgatttaattgaccaaaacataaatttatgaaaattggaccgtctccaaacactgatcgatcccgttgatattccacttatattagggattcgcccaagtcgtacctacttgagtgatggttttagctggtcttatactaaattcggtaactatactgttaagtcaggatattgggccgcgagagacctatcccgtcctacttgtaaacccccttttcagggacgaggtgtttcggcacttcaggcacaagtatgaaagcttaaaactatgcggaaacttatgcattttgcgtggcaactgtatctctagctgtctagccacttgtcaaaaattgacatatcgtcacataggtgcggttaaaggttgtccccattgcggagaagtagaagagacaatcaaccatctcttgtttcactgtctaccctcgagacagacttgggctttatcgcttattcccaccttagggaatattttccctagaaactctctcttctataattttgatttccttttttggcgtggccgaaaatttggaattggagaggaggtattgtaactctttccatggatactttggtatatttgaaaaagtagaaatcggtttgtttttgaaaacttcagggaacctacccctgagactttggcattggcacttcaagaggcagctgtttggaaaaaagcaaccctaaaagaagatgatcccacctgtccaatcccgttcgtaggttcttctcagacctcgtccaccttgctcccttaatgtcaactcgatgcttcatggcatgtagatgacaccttgagcgggcatgattgggtacttgttcgtcaagacttggtcatccaccttggccttaagagctctcgtcgaatttatcaccgcttcatgcggagtttgactatttgttatgggcaatgaagtgcatgatctctattggtgatacttctggtactttttcttcgtattgctcagacttgattgctatccttgataaccaagacgattggccgacttttgcagcggaattggcttcatatcgtttttagtttgttttttcccttcttttcgtattagatttcttcctcgttgttctaatactcaagcagattgtttagctaagaaagctcgggttcgtaatagcctttttcccatgtaagcacatcgaatcctgaatgactctctctagcggagagtttctttccgataatttaatataaatgatgtttaacggaaaaaaaaagagtctacacgtggcaaagaatgattattcaattacgcattacaaaattgtcataaaaaaaatctttcgttattcaattaagattttataaaactctgttaaagtttaggattttgatttgtaaaacgtaatctaaggaggtgttattagtttgtgatttatatgcacttttagtgacttgaatagtgacttgaaatgtcatgaaaaatcttttattattcagttaaattttataaaactctattaaaatttggtgttattagattttgatttgtaaaaagtaatctaaagtcttcataaatctgaagttattggattcatactttaataaagtcattaatttttttgtgttattcaacttaaacaacaatttccattattattaatgatttagagtgaatccttccagagccggcaataagaacaagcgggccaaacccaagtttgcggtcgtaaatactataaaacaaattttaatctcaaaaatttatatttgttaggtagtctagtggtaaagacttgtctagagtaaacttcagcattcagttttgagtctctaaaaacgctattttcatataaaaaagcggcattttttttagtatgttaaaataatatccagttttatatttagtttaataaaatatttttattatcaatatgtataagggaatcttacaaaatctaccactttttgcaatgtgtcatacaatttataccacatttcactcaggtttacagaatctaccacatttcattgtcacatgcacatttgtggacgaaattgcccttgatagtgacagactgatgtgtcagataaaggacaattggtgatagacttttttttgtctccagatcttatccccgattagaaattctctgttgtgtctacgtcttttcctcgatttcatcatcttgctctattattatgaatcccacatcttgtccaccaattgttctcatttaaggattttaaattttctttagattttttgccatctattttggtccacagattagttaaacattattgtcttcacctacacgtttacaattgcatataattttattttaataatatgttatatcggggacaagttcatatcgaatgagtgatagaattatatcgataacaaattcagatcgaatgatagaaaagataatatgttataacatgatcttttttgttattttgcaatagaaggaaaaaaattaataatctcggtcgatgaagacaataatgttcaactaatctatggaccaaaatagatggtgaaaaatctaaataaaattcgaaacccttaaatgtaacaattagtggataagatgtgggattcatgataatattgaaagatgatgaaatcgaggacaagatctattcacaacagagaatttccaatcggggacaagatctggaggcaaaaacgaaagttatttgttcagatataatgtttattggttaaagtgcacgtgtttcgagagaatagagataaatagaaggggttgtgttatgatggggcactttacaagtttgtaagcctatttagagcactttggaggcagtaggccctttttggaggttatctactgttcgaaaaaaatcaatacaattctacccctgatgacgtcagctgttgcgctaacatggtaaacaaatttgaatcacagccgttcgtttgttttggagagagaatcgatctaacggttattattaagagaagagttaaagttttcacggaatgatctcctccgtcggattgaaatgtctcttttaattttgaccatcaaattaaaattaataaactatatctaataattattttctctctcttcctttttgttatttaatttctttttaatttgtcacattctctattttattaaaaatctttaaccatttttttgtaaaatatataataataacattttttccttcattttgaaatctatattactatatttatttatattattattaattatattcacttaaacataaatagattcagaaaaaaacaaatccatatgatctaatccatatggataacaatgaaatatataatttttaatcagaaccatgtaactataaactctaaaatcattgtaaacaatcatagttccttaacactaaatcgtaaaccctaaacattagatactaaactctaaacattaaaccctaactcctaaatttaaaccttaaatattagatactaaactctaaaacattaaaccctaattcctaaatttaaaccctaaaccctaaactttaacacatagacactaagccgttaaccatatacatataccctacaccatctaccataaacactaagccattggccataaatgttaagcataaatcccttaaccctaaactctaaatcttaaaccctaaaccctgaaccctaaactttaactcgtagacattaaccctaaactatatacatataccctaaaccctaaacccatatgacaataaacccaaaaataattatagaacttgtttcatcatattttatcaacatcttctacataacgtaacacttgttttatggatagtattatcaaactacaatcatttagaattatcgaccatcaacacacatccaccaaactatgaccatgtggtcatttcaatcatttcaaattatcgaccattcatgcacattcaccaaacttcgatcgcgtggtttgtaggacaaaatagtaatttgtatacatatcattctttccttgaaaccctagccacctatcactctgctatcatctttttcctccgacctattcaaccaccatgtcttctttgattcatcaagaccatcaccattattattgttgcccataaatgtaaacccttccctaaaccctaagccctaaaatttaaaccttcttattgttgcccataaatgttaagcataaattccttaaccctaaaccctaaaccctaaatccctaaactcctaaaccctaaatccctaaactcctaaaccctaaactttaacccatagacactaagcctttaaccatatacatataccctaaaccctaaactttaacccatagacacttaatactttaacctcgagggtaaattggtaatttcaataataaatgtggtaggagttgtaaagaaattagaaatatggtagattttataaaaaattagaaaaatggtaattgttataattttctctatgtgtaaagtgcccttttgttttgggctatattaattggtatgctcagacgatgagaaattaagaaagtatgcatgacaacatactaattagtctctctcttcagcgacatatttatttcccgaaaatacccctattaaccgaaataaacgataattgtttctagtgtagctgcagaagcatttaatgttgaggatacactcgaagatacacccgctggcattagaaacataacaaggatattgataatcattgctgatatttttgaggttgcggatatatcgtttgtatacactgggctatttattagcaatgtattatcttccctttaacaacgaaaaaactacaagactaaagaccttagcttccgacaactttaatgcaagagggagctaaagaaacagagaaatcaaagcagaaaggtaaaagtaaaagatttgagtatttcgttacttagagttaaatttttggaatttcttttttaacttagggtttgggaaactaaacttcatatcggtaacgaatttgttatttctaaaaattctgcagttacgcatggcgtttgtggtgagattggtacctggggagtggaaaagagatgaacagggattcttcgaacacgtctcgcatgtggatgagtttgaactaggagtccggctgcgtgagcgtgatgggtttgcgaaagttgttatggcggtaaaagataggctagggctgagttcagatgacaatatcgaattaacgtaccagtggccacagtggatgatcaggcctgattggaagcgagcgaacccaatcgatatattggatgacgaagacatcacgcagttcatggcgataagggcatatctagatgaagtgcatcttcgagtgaagattatacgaggtggaaatgttcgaaatgttaacagttaccgtagtaacctggatctaggcggtttgagttcaaaagaaatatctgataagtactagaattacgcagaaacaagagccgtgtggggtaccgcgctaacaagaatgctgttgcggaacatttcaggttaaacttttagcaacattagtgataattggttgggctatggatatatgatatgtctgataacaaattaattttcaggtgacgcagaggatattgcgaccatggcggctaacaacgacgtatacatgcgcaaagacaaggagcaacgcaacacctcttgaggtgttaccataagggaaaacgtggatattacagttggggctagcaggccgcatccgaaagtaacacagccagggtcaattgcaagcgtaaaaggcaaagagaaagttatagatgacgaagagagggaaagagatcgtttattcgaagagtggagaaaaaatcagcaagaagcaatgttgagagaaatgtgtgctagagaggagtcactaagagtaagtcaaccgagtgcaacaaacgtactcgacaaagaaaaacagcgagagccttagatttcggaagctcatgtcatggagatgaccatgcaacaacaaatttgcaattgagtcttgcaagggcagaaacacagtctattaagccacaaatagtcgtgctgtcctcaagtgattcaaccttcgaaacgccaacttcaatctccacaagtgtttctttctgtagcgaagacctaatggatgatactgacacgtccaacagcccatccctatgggtgataggtatgttacagagaaactaatatattgtccttatggattgataactaatatgttaccggctattatttaggctactattagaaattattcactatttttttgtttcgtactgtaggtgatgagacacttgcccacttttattccgatgctgatggcccactcattaatgatcctcaacccatcacaatgatagatagagggaaaggtataatgatagaggatggtttaaccactaaagaggttggatcaggttcagataacacaagagtgttggagttacagagatatgcaatgttcgtgaaggagacaccggttgcaacggtcttgtatgaccgagatgcaccaccgtatttcgacgatccaggggaggaaggtaaatatttgaacaatatgctaataatatgttagtgtgactctaagtattgactatatctatataagcatgtcattattagatatatttaataatatgctaataatgatgttagcgtcacactaagtattgtatctaaaaccaataagtaattagttatctgtgtattgactatatctatataagcatgtcatttatcagatatatttaacattgtttcttacttggtttgtcggactgtcagatgctctacaacgagccctgaaggatgctgattacgaagggaatgacatttacattgggcggatttttaaaaacaaagaggattgttcaaccaagctagctattcatgcgattcgcccgaagtttcatttcatttatgcgaaatccggacctaatgttgtggcggctgtctgcgtcagccatacatgtccgtggagggcttacgcaactaagctgcccgattgcgataggttcgaggttaggaccacaacttcaacccacatatgtagcgtggatgcgagaggggacttccacaagcaagcatcaacggctgtgaatggaaagttgatacgaacgaaatacataggaataggccggggacctcgacctaatgagcttagacggatgttgcgccaggaattcagccttaacgtctcgtactggaaagcatggcgagcaagagaaatagcaatggacaatgcaatggggtctgctatggggagttacgctctaatccaaccgtacttcaagctacttttagaaacgaatccaaactcgcttgtggcaatggagactgaaaaagatacgtcaggtgtcgagagattcaagtacttgttctttgcgctccatgcgtgtgttttgggttaccctttcatgacgaaagtcatagttattgatggaacaaaactaaggaggcgatatgggggatgcttaattgcagctagtgcacaagacgcaaatttccaagtgttttccattgcatttgggatagtaaacagcaagaacgatgaggcgtggacttggttcatgactaagctgacagaagctataccagatgatcccgagttggtgtttgtgtctaataggcattcctcaatttatgccagtatccgcaaggtattgggttatcataaatcttatcagttacgttttacattagttgtatgcgtttttttgttagactaagccttttataactcttggaggtttacctaatgtcatctcatgctgtttgcatcgtccacctgaaaagaaacattgaagcttactttaaatctgatcaattaggcgccttggtatcgagtgcagttaaggcttatcggctaatcgacttcaacaagatttttgctgaaattaaggctaaacatgggccgtgcactgattacttggctagttgtaacacccctattttacaattagaccatgaggcccaagtccagcccgctaatgatttgaacccaagtgaaaacctaatgatcccacatgattataaaaggagaacgcaaactccaaatcaagtcacaaaaaccctaagtcggcaacctcggtaagtctcgcctcctcttcttttgggaattgatttggctcttccctaacctaaatctcctttgtgaaccatcgtagcaccactcagaccaccggagatcgttgtggtgttgagccggagtcaccgcgtgaatcatcctcaccggagaggtaacgcacgagaatcgattctggttttgatctcttagtttctttaggattgttgaaccaatctaactagtgaatggaaccatcgtagatctgtgccactccgccgttccaaccgccaagcaaaccgtaagggagactcgtcgagaaaagccaccgagaaaggtaatcgggaatcttctcgtgttgttatgtgattgtgttatttgattattaaaccatgatctaaataaaaccagttaaaaccaatgaatgtttgtttagttagaggttacgtgaaattgtgtcgtgaggaagaagaagatgacttcattcattggtttagttgttagagtaccggttaattgccaaaccggaagctatctttcacgtgaatgcatggatccaattgtggacgtagtgttacgtgtagtaattgaatcaatatttaattattagatttggttggattaatttattaaattaagtctagttaatttattgaaggatatatagtttgggttgattatgaaattaattatagattagtaatggaaaataatctttgatcgattatttaacccgtcgcagattgagatcgttattggaccttttcccgttgctgttatttcgaaaccgtgttatccaaccgagttggtaaggtgagggcgggatctgtggaaacatagtatcacctttctacttttgtacttttgaagttcatttgtataggcattagacattgggtgttgattgttaattattaggaattaattgttaaaatattataagatgtgttgtgtgatgttatgcgttaggttgttagcgtgatatacatgttgatttgcttgacgtctttaagacgtatttttaaataaaaatataaagataaataaaagagaataatgatattaaagaaaggttaagattgaggatgttggactgtaatggaactgacgggttcattacaggtcattaatcgttgacgagcaatgagaggaaggatcgagccacgggccgtggtcttccataattaggcttgaggagccataagttaacgtatgttaaaaactaagaaaagaaagtaaaagatcttgcggtgagcaagacggaagcttgtctgttatagtttactacgaaagtttaagctatttgcttgttgtttgagtctatacttatgaaatggaaattgtgtgaaagtataatcgtgttattgtgattcggtggacagttttgactgccttcactgagtaattaattactcactcctttttcttttccctcaggtgaggaagagaatgttgagtagcgctcgcttggtgttattttggggactttgggttttatttgatttatcgatatttcttatatttctaaacacggtttatttatacatttttatccaacgattttaatttatttatgctattattttgagacaatttatttttgattcttaataaaagaaagtttcccgaaattatgatattttatttcaagatttgttttgaagaagttgaataaatgaatggaaaagatgaaagtacgccgtctcaaggttaagagagacgggtattataaatggtatcagagcggaggttaaagtcaagccggtgctgacccggaagactaactatatctgtatttatttttaaaaaaaacaaaaaaaggtttttccgataatatatatttttagaaagcggtttaaaaaaaaacaaaaaaaaaaagttttcagtattcaaatggggaaggggatttaaaaaaaaaaaaaaaaaaaaaaacacgatgtaaaattatcggaatccatccaactttcatgaagaaatgttagatataatggcgatgtgttgaggatattttttttttgtgtaactagaagttaatctattacttctagctggtaagactaatatcacgatgtcaaaaatatcggcaaacaatgaaacacaacgttttgttaactcgcgatattaatgttaactaatagacacgagttgtctaccccatttaatcggaaaacaaatatcctccgttggtaaatttgtcgctaactaatagcggataacaaacgttgccaattagtgctttgtcacgttatctgattgtcctcaaatcgagtaacataaacaagtaaatcgctttagtaagatgaaacgggataatcatacatttgataatccgatatctgattgtcttagaatatcgtgatatgagcctaactgatataattaatatcgcgatatcgcgatatttgattatcctcaaaccggggttccttcatttatggacataaacccgaagcagataatgaacccgtccacctctaccaaataaaccaatattgttttacaaaaaatccgaccaatctcgctaatatcccgaagaagtaatcctctaaaacccccaaattgaaaactaaagaaccctaaaatcagatccaacgatcttcgatcttcgcattaaggatgagcaatcaatcaacaagttcgtttgggtctacgggacctcggggtagagggaaagttgttggggtgccaaaaagatgttggtgcggggaaggagtcgtggcactcatttcaaaatcggatatgaatccttgccggagatactatcgttgtggtttcactgcaaaacatagggtaatgttactcatcaagttcatctatatcttcgattttttcaatcttcctgtttagcttgttcttaattatgaagattaatgttcatatgtagctaaggaacgatgaacacacttttaaatgggttgatgaagctttgctcaatgagatagaaacattgatagacaaaacacgtgaaattgagcaagagctgaaagagcttagaacagagaggatggtgtttgaaaggatggtttcagagaaactcgaaatcaagatagagaatgaggtgcttgagaaagttgaagaagctttgtctgaagcgaaagcaagcagtaagaaaatgatgattgtcatggttatcggatgtatgatcttacttggaatcaccaaatttgtagggtgaatgttttagatttagaattatgatttggttatgtgtctgaaaccgagtagacgcttaattaaattaatattcgatactattgtatctactaactcgaatattgtacgattcttaattaaattagcttgttctaaattaaattatgattgtcatggttattaggataaattcgaagtgggctataaaaaactctaattactatactctaattactaagctagtctataagcagccccatcagcaagaccgaaagatacaaaatgtaacaacgtacttaataaaactggtaacaatgataccaggaccagatacgaacaatataaacagttataacaataacaataccgttacattaacggataacaagacgatggattcggtaatacgataacacagtaaaacacgataacgctaacgctaaaaggtaatgtcagttatctaacacacacgtactaaatgctaaaaacactataatattaacagctaacacgccggtggattcggttatgcgataacacagacaaaacacgataatgctaacgcaaaaaaggcagagtcagttatctgacacatacgtactaaatgctcaaaacacaataatgtttttagttagtcaaaactatttacattacatgctgaaacacgtaatatcgataatcatgctaataaagaaaaatggtacaataagaacagtttagtcacaacgtcataaaggagagggcacgcataaaaacatagtcatacatcagaaaaagaggggggccaagatccttaagagaacataaagaaaagatacaatgtaggggttacttaatagttagctagtaaccaccagcaagtatcaaagccgagacaaactttttcacttcactctgaagaccgcccacctcaaaatccacacattcagctaaagctacccaatgctttttgtcgaagttaaatggcaggtaaagataatcagcctctgaaaataactggacatggtcatcttccccaattccagaaagaagatcaatcagcggagctggaaattgaaactccagtttcgaggtgcatcgagaaaacttagtgaattgtcggcagaataaagacacgaactttgaatcaaggacttcgacacgaagtttctcaccatcaacatcttcagtcctcaacaaatgacgactaaacttgatgagtgcatccattacctgagtgaatacgaaatacaaaaaataatttaattacaaatactaatatgttactcgttaattttgttaagacaaaaagtaccttgcttgtaagatttttcttccgttcaattaaatccaaaatatctttattagacagagcaacacccccgcatatgctaataaaactgtaccgataacgaaaataacatagggaatatgttatctatctatatctaaaataatagtcattgtatggggtaacgtaatagaaaacggaataagtaataccttatcgacttaagtttcttcattgatttttggaatcgctcctccgggtcaacataagcgttgagttgcttgataccaggagatggatgaccaactaatactttggttttcttatcatactggtatcgcctatccaacttgttagaaagagtacagagccgtttacttcttcttccacaaattccatccacattattagcattaccattctcctgtatcgaaaaaaatatattgagaaagagggcaaaataattatttaacctacgacaaaaactataaatttagctaaatatgcatgaaggggagccttgacttctttggactgcgggggcggagtggtgaaatcctggaaaagtaaaagttttgttataaaatgtcgtatagcaaaaagtatagcatgtaaacattttcagaatacctcatccgaatcctgaacaccacccagaaacacgagcgagaaacaaatgggaagttagaaagataatatattagtgaataatttaattattgaaaactaaaaatacaaactttaacctcccgggcagatgaaacaatagaagacgctcccctgctaacatcctacaaatacagaggtaactataaagtttacaagttagtaacttaagaaaatcaaataatgtgtcaactacggcgttaacctgattatgataatcttgaattggttgattgtcctggccggtaaaaacatcattataggcacatccttgacatattttcactgtgtaatgagacgacaatgaatatgacataaacatctaatacaaattttttttaatattattaacaaacttgccaattcgttggttcctgacaagtccatatattcaccctcaggaataccaaccgccttcccttcgcatgcagctccgccatgaacattgaccgcagcttaatgcatagttttttaaataaaaaggtgcatatacggtaaacatgaatttgaacaaattaaaattgtatcaccctaacaaggagataggttttcagaaatatccatataggcacgttgaaaaattgacggtgaaaaacaaaaataactaccaaccaccatcataaccacaatcaaatatacttccagtgtatacttaaaaaataaaaaatctaataaatagttttataaataaaaaggtacacaaacgcccataaacatatatgagtacaacttaaaatgttgtgacggctgaacaagggagatatgttttatgaaatatacttagagaaacggtgaaaaattgcggttggaaagcaaaataacttcaaacaaccatcataacaacaatcaaatgtactttaggcaaaattagacataaaaaataaaaaaaaacagtgtattaattgggcttagtaatatttataaaccacattactccaaaagataatataaaacagcataactatctcactataataaattttaaaacacaaaccgaaaaccatagtaattttaaggcaaaacaaatatgggatatagtttaacgcctaacatcgtaatcatccgaaacttagtcattacaaatagcaaagattatgggtggtaatttagcattatgggtggtaatttagctgctaaccaaattatccttaatctcggcggactcgtctgcgccaaccgtgacatctcccaccgcgcaggcaacctggacacataagagttccaattaatcaagggagaaggaaaacataaactgagaatagcaaaaaaaaagaaaacgttataacgtggtagaacaaaatgtgcatattacctggctttcttcaacgtcatttggggaggagggcacaaccccacctgtcggctgagaacattgaacctggcgtttaaaacaagaaatatgtgttacaccaccggaaaaaaaattacatcaacgacaaacatcgttgtcgatagatccctctggaattgtaactgtatcatttgctgaaacagtctcattgccctttaaaatttaaatcatgaaaataaagactcaacggaattagaagaactcgacaaaataccacgtaacgcaacatacaaatttagctgatattttattttgagaattagtatatttaataactaacctcgtcaccaactagtagagaggggggtcgtctaccacgaagtcattgttagccgtctacaaaaacaaatgaccgcaactatcaataacaaaaaataaaagggaaaaatgcttggtcggtaacgaaaattttaatcactactaatctagatttctaacattgccaaacacaatgatagggacctacaaccaccacgtgattattgttgtcaggacgctgaacgtaaagtgtttatcgttaccaacagcgttagcacgctgaactctaactactaacctctgaattatctttatcaccaatagtggtgttgacatcggcagcagcaaggtgaggggcctacaaaaccaatttttgttatcacgcaaaataaggaaaatcttgctcgttcacaaaaaaaaaacactaatacctagactacttacctctgaattgtcttttccaccagtagtggtgtcgtcatcggcaacagcattgttcgaggtctacacaatcaatgcaaatttttaaatcggaaaattgaacgagcaaagtttatagttaacaaaaaagttagtcctctaaaaacataacttctaacctctgaaatatctttatcaccaatagtggtgtccacatcggcaacaacaatgtcagggccctacacaatgaatgatcacgtcacatgcaatgcaactataacctcaaaaaacacttaattgatttcagggataaactaaccagtatcgaacagtaattaattgagggtcttattttattgaacaacaagtaaaccatcgttacctactagctcacctgtgaatcatgggtaagaacagctccgggtggggaatctacctcaatcgaaacattgtcctcacactgtaactaggaaaaaagaatttatggtaaaacccccgcataaaaataagacagttttagtatctgataacaataaaaagtagttactaacataggagttatcttcagaaacggatttctcttgggggggggggggatatcaactgtgtctccggaggcggactacgaaacaatataacacaatgtttacaatccaataaagaaacacgcgataaaaacaccattattctttagttgaaattacagcgattagcatctattcaggttagcaactaaaactatacagattagcttgtaatattataacaattatcatctacactggtaagcctatataaataacttaatcacatgtgggttaggggcctcaacgcggtcagagcatgtgttttcttccattggaacaactttatcccgctaataaaccaaaacaaaaataataaaatatttaccacaataatttgctaaactgaacataaaactacatgtttacctccgcctctttacaaccaacatcaattggcacctttcccgtgtagtaagataagatctcattcacgctagccttgacgttagaattcccttcaccgcagggaggccggggattggtagatgtgggttaggggcctcaacgcggtccattggaacaactttatcccgctaataaaccaaaacaaaaataagaaaatatttaccacactaatttgctaaactgaacataaaacaacatgtttacctccgcctctttacaaccaacatcaattggcacctttcccgtgtagtaagataagatctcatccacgctagccttgacgttagaattcccttcaccgcagggaggccggggattggtagatgtctgacggagagagtcaaacccaaaataatcgttaccatcactgcaacccatatctttagaaggtgacacacccctagtaccatccgggacatccttcttcggacggcttgtcccattagcaggatctttcgagctaccgccttagataacggtgtttttgataaaccaatcagtaatagctgagatgataaatttcccatgagcatcgagcttggcgtcctacatgcgggaaatagattccatggaaaccacccctgagctactcccttcttctgtgataggtctttgatgtttggtcctaaccccaccagcgttcttggatgctttggctttcctactgcggctaacatttgacttgacaccccgcttttgctttttagatgccaattgcatctgtgatgggaaacacccaccacgaaacatgtcattcttgaaaatgagaccctcagcagccaactttagaatattatcgaccccttcatcttcctcatcttcatacaacgacaaatcttcctccggatccaacacaagatcgggacaaataatggttgcaacacgaatctgcaagagataacgaggatattaacctcctactcggataacttgattaaatcacaaacacttatcggaataaacaaatagatatcgccaaatacggagttagatgataacaattagcatcgataatagtcttaccgagcatttagcatccaactccttggcgttgccaagcttgaaagcgacagactctctcggggcctcatcaacgtcgtcttcagatttagactgaatagtctcaccaatctgaggaccttcttgaatagacggagctgcctgaaatacgaccaattgcaaagcgtacaacaaaccctgaacaacaaaacacgtgctggctaattgatcaatttccctctctttaatcgacttcatcatcatatcgaaagtgaaacgacccatggataagctaaaaatgcgctaaggtcctcagccatttcagcgtgagccttaacaattttaggatagtgagaggtatggacaaggaaaccgtcgacgatagctaagcaagcacatcagatcttcatactgggatccgagacaacccttctcttcaacatcgtaattaccctgtccacggtgacatcatgttcaagcccaaacaacttgctgtaaactgggatcgtcttccccgccgtgcctttcttcttcttcaacttcaaactcggatacttcccacacggtaaatcagtaacgatcttaaactctcgcaaagaaaacgaataggggtacccgcgaatagaacccaaatctcgttaggcttcacgacatccaactgcctatccaatatgaatatcccaaaactcgcggacaaggagggtagtttaggaaactccaacaggcgaccgaaagaagtccgagctatgaactcccgttcaccatcgtcgagtgcattaaagataccacaaagggttttcatcttctgataaacattgaccctctcgccgtgtgattcttccccaaaggcaatcagacgttgaggtagaggaatcggcggcatcgttgctgtaaaaaatcttaaaccctaatgagactactaaaaatgtgaagccaaaatcataaacaaaaaaaaaacattgtcattgcataccagggaaaaaacggcaaaaaaaacccagatctgtagatgaactactgcacgaaaacagaaggaaaaaaggtattttggaggagacggttcttcttttcttccacctcaaaacgccttctctcaccatcttatatccatggaaaaagacgactgttcgataactgagtaatgacaaaaaaaaccgtaaacaaaaaaacacaactccccaaacataatatatacataaaatctattcctatgctatagccataatatcgccctagaccctataacactcgatatcaatattgtaggggtacatgcgtaaatatttttgcaacagtagttatcgaacattgtaaaaggaaggcaatgaattaacgagtatttttagtatatggatttataatatccctttttttagtcgcttaaatcttaaaatatttagggaccgctctgaatccttctaccactgagtcaccattaattaatatttttacgatcgttttcattaggaactttttcactaattttctactagtttggattttcgtcaaaaaatcataggttgaaggaagaaaatatttcttacaaaacttttgtagaaatattcatagtaattcatgttattttcttgtaataaatataactgaaaattacccagattgactcaaaactgggcaataataactaaaatgactctcattagtgatggataactagactaacacaaatttggtgttaaaagaccaattgactctagatatcgatatttaatgttttagaggtaaatatggtaattgctataataagtctgttattacaagaagaaaaaacctgtcactactgtaaatattattataggaaaaaaatatgcaaaaaaaactataattgatttttgaagttatagaattttttatatatttgggttcactatgtatatttacggtatagtttttagttgtaaggttttgttggtgcagaaattggcacctctgacaataccggtttaaaccgagggaaaatgtaaataaaatcgagaattagatttaaccgggataccccggttagcctgttaatgggcctaagttatgagttcgccataagacctaattcgacagctgagattgcccagccgacttcttaaacctcggaaagagaagactttcatttcaagagaagaggatcttatgaagaatagaagtgataaagatttaggtcttagataattagaagtttatcatattttgatatgatcagttcattgtataaatagaggggttttgtcctctattacgatccatctttaacctaatacaagacaccactttttacagagcaaaaccctaactttttactcaagcaaccttgttcttcgtctttgatcattcgcgagctaagagagaagcgaatttgtctaagttcccttagtataaattcattgtttgattacagaatcaacaggtttagtgtttaggatgtagaaattagttttgaatattgaatttagttttagatttgtgatatttttgaaaaataaaattcattatagtattcttttttggaaaaactcattttagtggtatttaaaagaatttctaaaagcaattgacaaaaaaaaatcaaacatgtcatcatatgattttccaaataaaaaattattacaatagttagtattattctattaaaaaaatcatggaaaaagaaaactataaatcggtcaccataaggattttaaattacaaatctgtcgtaacataaaatatttttaaggttattccagcaatttattttattctttattaaacccgccacgaaacgacagatttatggtaatataaatttatctgtcacaacataaaacaactctatcataacacaaaacattatattttagaaaacaaatctgctatcaaacgacagacattctaaatataacacgtaataaatattttataatatatttatcacgatctcttttaaatttggttttaaattttctggacaaaatttgcaatggatagattgataatacatcttactcctatatatcattttcgatttctgatatggaatccctaacattctttgcacaattatcattcaatccttgtaataaagtcatatatgtggaattattagtttcatatgttttttacaactacttacgaacaataactacaactattttttgcttctgcagaaacatggtgaattcagtgtagatgaaataaatttctctttttatatgcaaaatcagtaacaaaaaatagtattcttgaggctaacagtttatttatttattttgataaccgaacaatctgttcggttctaagaccaaagtttggaccccaaaccactggcccaacaacaacgaattgttccacagaaaacattttacttcctcaagatatctacacgtttcgtttcgtttaacacttttagtatatatgaaaagaatggggttaatccatttaataattaaaacttagtttgggtcagagatggtctagtaacaacaaaggtttttaatcaagcacacaattgttaaatctgcatcaaagacatcccaagagaagagccacatgaacccaatgttgcagtatgtagctttagtgaccatatttctggaattcccactcgcagacatctgttaaaaaccaagcaagaagcaaaaacaatgagaagagaaaacattgatgagtaagagagcatgtaagattagatttaaaaaacatacctagtggacacacttgacgagttttgagccatctgctgatacagtggaagtgaaaggcgtggttgcaaacccctacaagtcaaataatggcacgtttcttgagcagtctatggtattatgagttcttgactagatttacttgatcattttcgataccgattcaaaagaactagagatactaataacaagtaaaagatgacaataatatgggcttaaaacgattaactagtgttaaggcccactaaggccttataatcttccttgaggtcgtatcagattactcaaagtgcttgtggtaatatcaaagataagtaagtcaatgaatgtcaaagatcaacaaataacatataatttcgtttgactatatgcaaaactaaaaccacatctggattcaaaagagttcagtattcaatgacttaccccaagcaacagtgcattcctcactagtggcactagcttgattagctagacattcaatacctaaaaccacaaaacacacaacaaagaactaagcataatccatcaagatgattcaaaacaaagtatagatacctcaaaaagcttacagagatccatgatgtgattcctacaaattgcgcagttatcaacaacgatatctgaaaaaaccaaacaagagtgaatcataaaaaaaactaagaagaagaagaataaaacgtgagaagaagaattagggtttggtgataaagtaccccaagcccagagagcgacagcactccacttctttaattcaaatcgtttcgagttcttggacgaagatgaaggtacggagatggaggaggattcacccatgataacgtcggagttgagagaagccattgatttatcttttggaaatgaaattagtagagaaatcctataaaatttgaaattctgaataattgagatttgagacttgagatagagagagagggatttataagttttcaaaatggttgaatagttcctaatcttttatctttggggtttggccaattggttacttaacaaaatatttgaatgcaaattagcaaaaggagataaaagaagaacaattgttacaaaagtgaaaaagttattaaaaagttcatattttataccaatttatatttatttttttggtagaaccaaaattattttcttattttacagtattaattttcaaacttttaagaaattgattcattaaatttatattgtttatgtatctacacatattaaaatattacatagattgcttaaattgtttgtctttttctacattaaaaatttattaaacaatataatttttgtctttgggtttgagccaattggttactaaatcaatcactcaaatgaaacttagcaaaaggtagtaaaagaagaaaaattgttacaaaagttatgaaaaggaaaaaataattaaaaagttcatattttatacctttttatattttttagtctatattattaaatttaattttcttaaaaaaaaatattgataattttaatactctctcaaattgttacaaaagaagaacaattgttagaaaagtttaatttttttattaaatagttcaaatttcataccaaaattatattttgtatataaccctatagtattcattttcaatttttttatttataaaaatgataatttttatatgctctcattttcattatagatcttgtttaacagtatcattatctacacatctaagaacttatagattgcatacttgcataaaatatttatcttttctacataaaaatattatttattaattataagtaatatatacaactaataacaaaacactctcaagctcattgtttgcgttggagagaggggcttcggaagtcgcgaaatatgacttacttattctacaaccaattattccttccaaaattattttattttttggtagaactaaagttatttttttagtctaaaaaattaattttcaattttttaagaaaatgattattttaatactccctcagtttatattgtttacgtatctacacgtattaatatattacataaattgcttaaatcgtatgtctttttctacattaaaaagctatgggaaaaacttgaacaaactttagaaaactgtaatgaagaatggatgcttattggggttggggactttaatgagatattatcaaatggtgagaaaatcggtggtaaattaagagaagagtggacatttacggacttccggaacatggtttcttattgcgatcttgaagacatgagatcaagaggagatatatacatttgggtgagaggaggacacacacattcagtgaaatgttgtttagatagagtttttattaattatgcttggtttgtagcattcccaaatgcagaaacaaagttcttagatttcacgggtttagagaacaaactggagaccgagatcgaataaacggttggaggagtggtagggtttgcttcgcagacacgttggtccttcgctgtttttggccgccaattcagcttcagccgagtgagaactatctccgttaaggagattcgacttcgtggtcgtggttgcatcgggaggtagtgtgccagtacttcctccaacgacggtagcaggcagaatgacttcgtcagttggcagaatctttcttccttcgagttatttgattagagtaatgttcaaagagagttactcgtcgtccctacaggcagcaccaattgttcattccgaaagtcacacaatgatttgtttaaagggggaaaacaaattcaataaactctgttgcttttaggttaattaagtctcgatcgtaaagaagaacaaagttgcttagagacaaagttaggatatttactcaagaacaatgtagaaaattaggattttattattaagttatggatctctagaatacaggacaaacccctctatttatacattattaagacggtttaaggtaagctaaacatctaattctttgtagctaaaatcttctattttctattcttttcgcgattctcccttatccaaaaggaaagcttttttttctccatattaggaagtcggttggcgatcttcctactatatgttgaggtcgtctggtgacctccttgttcagacagagatcggctggcgatcttcttattttggcccattaattccttgtaattgcgattggactgaattctcagtttaattcgcaatttctccagtttaaaccggtattgtcggaggtgctaattcatgcaccaacattcatccataaagtcttcaattaagggaatagggaacctgtccttccttgtcataccattcaattccctgtgatccacacacaacctccatgtaccaacttttttctttaccaacactactagtgatgcatacgggcttgagcttacttgtatagtaccaccaatgtgtattttttcaacaattatataagtttcattcttctgatgaatagggtctctgatttactggattaaaaccttccaacaacttaatcttgtgatcatgttgtgtgcccacaaaacaaattcattcactaccttctcactatagactcattttccaaatcttttgtcaatgtgttgacagtctcaataactcgctcatcttcacttcctttttcatcatcctctgctacttcttgcacatacaacattgcaagttgaatttgatcatcctgaagtttctgtagcttttgtgttttaacttctctcattggtccttctttaatatcatgtaaccacaccttttgattattgtatttgaatctcatctctaattgtttaacatcacatgaaatatgacttaatgtttccaaccactgaactcctaaacccatgtccactccttgcaatagaattagcagtatatttgactaaaatgtggcggtctgcaatttccacaaaaaatcagatattttccaatccactttcaacttccttccatcagccactgaaacacgagccaaccctgcatcttgactttggcttcccaacttagctgctacctttgaatcaataaaatcgtgaatagaaccagagccaattaaatgaacatgatcttcttcccataagttcctttaacctgcatagttttataccctacattacccgaaacaacattcacaaaggtttgtgccatcttctattcatcttcaccattcaatacttccaatgcatcctcaaattcatcttcaacatccatacaaaagagttgcgtcttcctatttaccaaataatgttctagtgtacttctcatcacaaaagtaacaaaggcttttcgctttcctttcactcatttcttgttgagacaacttcctcgtgttgtgtggtttatagtcacctttgttattgtgattttttccttgttattgtagtgctctgtccgcggctcaaattctctattggacctcttgtgaccacttgctactctagatttaggctgccaaggtgtagaataaggcttcttaaggtgtgccttttcatacagcttccctaacctaaagcaatggcggtccgtttgaggctgaaacattctaacatgcatctgagtatccattcatatacctgccaaatatacactcaccaaatactttaaagattaactttaattgtaatcaattcaaacttttggtgataatcaacaattttatccgtctctttgtagcttcttcaactcagccataggattattacaacattcatcatcaaagcgctccttcaacaatttcacataacccgaccaatcatacagaacatccaaacaacacctcactgcataaatgaatggtgcgatgtagccgcatggctatcaaaatgaatagcagccatcttaaacttcatatctgcaaagtgaaatcaacgccaaagaactcttctaccttaaacaaccattccttaattccaataccatctaaacgagatatatcgattttccctagacgtgtgaggttaccgtaatgttgatgagcatcataacgaacctgatcatatcgatttttcctccgataaactggatgacccgacctgtcatctgttgacgtagatgacctcggtaagctccaatctctggttgactgttcatcatgaagcttatgagatgtggatctacttattgcacccatcatatccgacataggcctcatcattgctttgttttgctttgcgaccaactcttctaaccataaaattagtgactctatcggctccgcaatctccacttcctttcccttatcctttgactccccgacatgcgatcgtgtaaccaccatgattccgaaaaacgacgcagctttgatacctttaatacataaaacttccgattcaccgtaaaacaactccgattaataaccaaaacttcctattacaatcgaaacgatcaaacgctagctctgaagatgagagaaacctagctcgataatcttacaaatgatttgataaagaaaaatgaagatgaactcggtcactctaacaaccttctttcattagccaatctccggctaccacgtgtcatctctagacttttcaactatcccacttgacttctcacacgtgcacctccacacgtttcgttctataatggacctcgatacttaatgtacaaagaaaacccttactgatctctatgtataaatacttgtgatatgtgaatcaataaacgcaacctcttcccaaatatttcatggtatcagagcagagtcattaaaccctaattttttttgctgccatcattgttttgactgccacatttttctttactttcgctttgtcgttgcaagtcccttttatcatcacgatgtccggagctatcgtctcttcatgcatctgataatcttggtgctttaatttcttctgttatcttaaaggaagataattactctgaatgggctactgagctcatgaattctctccaagccaagcaaaaacttgggtttcttgatggcaccataccaaagccaacaacagatccgcacttggcggcttggaaagctgctaattctatgatcataggatggatttgaacatccatagatccaacgattcgttccaccgtctcttttgtatctgatgtaaaagacctttgcgattgtctcaagctaagattctcgaccagcaacggagtctgaaaacaaatactgaaagatgaaatatcggcatgtaagcaagatgggcaacttgatcttgcctattatggaaggctcaccaagctttggggagaactgcaaaattacaaaactagcagaagatgacaaggttcatcaattcttgttaaatttaaatgaacgcttcagacctattcgctcaacaattacggatcaagatcctttactgcctctcacacaagtgtactcgcgtgtgatccgagatgaacaaaatctcaatgcctctcgcgtaaaggatactatcaataaaggatactcgcatgtgtctcacatcgttttttcaataacaaggtattcttcatcgaacttcgtgtgtagatacaccgcaacaaaacgggcgagtcgagcgcaagcaccgccacatatttaatgttgcacgtgcatgtctttttcagagctatctacctcgcaaattttggggcgaaagtattttgactgctaaccatcttattaatcgcacacctacactgattctacaagggaaatctccatatgaagtactctttgggtctcagccgtcatattcagcattacatatgttgggttgcttgtgctatgttcatcatcgagcccgtgaaaaggatatatttggggaacgaagtagacgatgtgtatttgttggttatccttatgggaagacaggttggcgtctctatgatttggaaaacaataagttctttgttagtcgtgacgtcatttctcaagaaactgtcttcccgtttgctactcctcctcccgtaccaccaactgaatcacctcctctgccaaactcatctatattttttcacgatgatgattggagttcaccgcaaaatgttactcatataccatcgttggttaatcctttttcgtccactccgactccgatagtcacttccaattcatcgcaccaataccacactctactcctggttcgccatcctcacccagctcaccacttcccactagctcgactagtactttgaattcgggctctcccgcaccaacaacttcaccgagtttacctgaattactcagggaagggcatcctaagaaattttcatcggttcttctcaaaaactacattactccttctattactacttcaactactactactacaccaccaccaccacaccccccccccaacgcttcatctcctgctctcgccaattctagcttctctaaaacggtatgtggtaagatacttgactttatttctaacgaaaaaatttcggagttgcatcaagattttatggcagcaattacatccgacacggaaccaacaagctaccatcaggcttctcaaattaaagaatggtgtgattctatggggttagaaatcacagctcttgaagaaaatcacacttgggatatcactacattgcctccaagaaagaaagccattgacagcaagtgggtctataaactcaaatacaattccgatgatacgctggaacatcataaggtccgtctcgttgctctcgagaattgtcaagtttaaggctccgattttactgagactttagcacatgttgctaagatgacaacggtacgctttcttttagttgttgatgctgctaaaaaatgggaagtccatcaaatggatgttcataacgcgtttcttcacggtgatctagacgaagaggtttatatgaaactacctcttggttttcactctaacgattctactaaggtttgtcggcttcgaaaatcactcgataggctttgacaggctcctcgttgctggttctgagaaacttgctaagaccctacgcgcatttggattcaagcaaagttatcctgattattcgcccttttcctttcttcaaaatggtataattctacatgttcttgtctacgtcgatgattttgttgtggctggtaatgacttatcggagatagaacgttttaagacgtatatgcataagtgctttcacatgaaaatcttggcaagctgaagtacttattgggtattgaagtttctcgtggtcctgatggtatattccttactcaacgcaaatatgctaatgacattatcaccgaagctggtcttcttgatgccaagacgtattctactcctatggaacctaatcacaagctcgcatctgccaagggtcatgtcctcaacgtcccgaagagtatcgtcgtcttgttggacgacttatatacctaagtatcactcttcccgaactgagttacattgttcatattctctcgcagtttatgcaaacaccccttctctcacactgggacgctgccatccgtgttgttcgctacctaaaaggttgtcctgctaaaggaattatgcttcgggctgatagtgagatttctttaatcgcttattatgactctgattggtcttactcgacgatctctaagtgcgtatgctgtctttttcggctcctctccaatttcatggaagactaagaagcaacacattgtttctaactcttcggcggaagctgaatatcgcgccagggcatacactctctacgaaatcaagtggctccgggaactccttcatagttttggtttttgtcatacacgacccattcaactattctgtgatagtaaagcggctatacacatagcttcaaatcccgtatttcatgaacgcacaaagcatattgaatttgattaccatcaagtccgtgatgccgttcaagataagctcatcaccacataacatatttctaccaaggaacaagctgtagacattcttactaaagctctaccacgaccagcgttcgataggctattgtccaagttcggcgttcgacatcctccccgctaacttaaggggggggggagggtaatgggctgtaatggacctcaatacttaatgtacaaaggaaacccttactaatctctatgtataaatacttgtgatatgtgaatcaataaacacaacctcttaccaaatatttcattgtgcataacggaagtcgcgatacatggcttacttattttgcaaccaattgtgtgacttccattaaaaaagctttcggtcgaaattcgaggatgtaagaactctgttcattctctgctccttccttctgagcttttttattttttttgttcgttattgtaacttcgtgacaacaagtcaacattcataggaagtttgagatagcagcaactcgtgaagttacttcaaatgttggtgcggtttaagtctcccaatctttcatcttcttactcccttttggttttgcaattggagcatccatgcctgatgcctgccattttcttcttgtcttttttcccgtagaggatcattggaagtccacctgcacaatcattcattatgcaaacatattaatatgatattatcaaaatctacaacactcagttaggtgaaaaaacagatgcaagctgatactattgcatatcatcatattgggttgttattgggctcgtttgttaaacgctggaacttaattatgtaagccttgttttatgttttaagctttgtatttaagtcatcaccttactttgttaacacttattgatgaagatcataaaaagaatgttatctctttcttgttctttttttgttttttaatactaggaggttctgggctgaagcccgtaaacccccaggcccaaaaccacaacatgtaatattagtttcgtcccaaacgtcatttgaaccggcgacttctaagcttcgcctagggtctttaccaattgagctaacaacactttgtctctctcttgttcttctcctttctcctttcctttctacttctgaattcttctgcttctcaaccaaattcttctcttatctcatctcctttctataattcttagatagtcccattttggtatatatcacaagctcccataataacccggttcacatttgcatgcaatgattcagttcagttctcagcttaatgttgttactcaaatgctaaataaatcagattttagaatgagagttattttcatatcatgattctattgctactatcaatccacatcttatgatataagatctataatcattgttggacatcaacttactatataacattgcaaaacaaaaatcatttgttaaagtcatattcgcgtatactttttcatgtaatgttcaacacaattcattttaatgacacacataagtctttaacattaaagcataaatttttaagtagcagagttcttgcgtatcttcaaatatccaaacttgccagctcctggagatgatccttcaaacacatacggcataaaccctgttgcttccttgtacttttgctgaatctgcaaaattcataaaaaaacatcttttattaaccttttggttctatctccaagaatcatgtaatcaatcaaagttttgatactctttggtacctgaagaatctgttcactgcttctcaaactactctttccaataacgcaaaccgtaccgccacttccgcctccagtaatcttggccccgtagagagtcccgttctcggttttcgagctcttcaaattctccatattctgcactaatcttactaatctgtctgttccatcagagccaatcccacacgcactgtagctgtcatggcactgccaagcaaacacacgattaacaaacggttaacttactagcagaactcgatcataagaaccgcgtttgatttgtaaaactattgattcacctggtacataagctccccaagaccaatgacctgttcttctgaaggagttgctgtcaacaatgctttgaaagcctgagaaaaatatcacttttgttacatgtccacaactaaaagttaatatcattgaactgactgatgatatatatgcaactagataagctcacctgcacacggaaattctcataaattggatgtctagtcggcgccattatggcgtatgtaccatctttgtcaatggttgtgacagaatccccgtgatcaccatatttttcgaggaattcttctcctgtgatagactgtgggagcttacttgcataaagagcttggaatctgcgaaaaaaaagaaggaaaaaatattgatctcatctaatttgattaacacagatgatatatacatagagagagatttatagtacctatgaggtgaaaggttacataagtaatccaacgaagtatcggattcaatcaactccgagctctcctcttcagcctcttctgagttggtttcagcaaaagaagctgcaaaagatcttatcattgtcttaccaataaaagctcctatcctcactgaaccatagtctgaaccaccaacgctgcagagtaccaaatttgttagaaacaaaatgtaagactttctgaaggaagaaatgtacacagcacctgtgtcggattccagagtcgattccccaaaatcgaatgtgagaaggaatttcaacaagtcctagtatctcagctggctgcaacgagtacaatcaccagttattactcttttaagagaatcaagtttgtaagagacaaagagagaaagtacctgacagatcatagccagaagcttgttagcttctccacaagcagaagccatctgatccatcactccacaaggtgctccaacaacataattctccaccttttggcaaagtaaagccacatctcgcggagatatttcaagacctgcacattcagctcaatgagtcatcttctcgttaattactattattgcagagaagttgtagtaaccgtgagcagcagcaacagcagacatagtagcaacttcaactgaagcagaggaagatactcctttgccttcaggaactgttgaagaaacctgaaaacatgtatgtaaaacggagttaaatacaatgcagttcatgaaattcgatgttttctttcttaccagtatgcttatgctgtcttcaaatcgaacgtccatctctctcattagtaccagaattgtacctgcaacatacgccgcccacctagaaatggaactcaatgttataatatatcaaaaactttatgatgaatctgaaaatggggtgaaagagatgaaccaacttctgagacggatcccgggaaaagtaatggtaggctttgtcataagatattggtttcccatcctcttccataaaatcagacaagtccatatcaaaagttggccctctgttgctcaactcagatccaaatgaaacctgaagttcgaaaaacgttatagagaaaagcactgtagagtcagagagtatagagaagaacatacaatttcaagtatgggagtgtctcttgaatgatgtcgtgcttcagcgtgcttccagagtttctgtttactaggatgattcctctgtacagcggcatgacacgcctctctcgtaggcatctaaccgattaaaaaagacactcttctgttaaagatgaatttaattgatgccaataaaaaagatgaatcatggagaaggtattaaccagcaagactagacttccagagtaatcagcaatgcctcccattacatcgagtcttccgggtgctctcgccacaacaatatcctcctgaatggccacaaaaacttcattagttcctcaaaacacacacaaacttcactgaatccaagaaaatgatacaaacctcccagttgaaaagcgcggcagccgctaaatgctccctttcttgatgatggcctcctattttcgctaatgttgccaaactatccaagaaaccgatggtatctgaaaggccatggtgatctccatgaagaatttcaaagccttctacaaacctgttaataaaacacataggagcttaagaggtgagtaccattaagtcctttgagagattcaaagtatacaagaaaacacacttggagggtttctgagtctgatcaaccgaaggaatcccagcttcgtttccagcgacttgataccattctggaactgaaagatctcttccaggagctctctgtagctggaagcctaatattattgcatcccgcaatctcctcgctccgctaagctacattggcaaggtgaatatcattggattggcattacaaatgaatcacaaactaattttatttttgtctatacaactccatacatctaaatttctctacaaaatctaaagtaacaaataacattatcttccttgtagcactcacattgagtttggaacgcttcttccccatggctgtgtcctgcagtattttagctgccacctgaatatagaaacagccagggcattgacatcatcaacaggggaaattgagcaactgtcatgatatagtacaagaaggactggtctgctaatatgaatagtttgcacactctacctcgccaccatcaatgcctccatcgtaacacggtttcaatgtaaccgcacgctcgagataaggtgcccaacatccagccagaaggtctcttctgatcatttcaactcctccttggtaatactttactccaagaaagaagaagtattcttaggagaaggcaaacatttaaacaaacatttacgcaaactgtgggtctctcacctcaagcatctttctcaagaatggttcttcattgaagtaatcccttcgcacaaatatgaaccgtaacttgtatgcaagtgcttcactcacagttccatatccaatttttcctgaaattaccaccattattagacgtgaattagttaatcagcacaatgttacggtgaaagactcatagatgataccgagcatgcagtctgaagcagcaatcacatcaggagtataagcatcttttggaagtgctatgaaatttggaggaagctcctgtttagcagaagctccacagacctatatatatgacatattttcatttgttattttggttttgaaatcaatcaaaccaagccgaaatgacataaccgaatctcgatttaccaggcataaccaaccagctggtagatattcctccttcagtgtccaaccagttggctgcaaatcacaccagcaatatatcataaacaataactcgaatttgcatattgagattaaaagctataagagaatgtgcttacttgcccaccaaagttaaagataagtagtttcacgttgtctggaactccaagctctctcctaacctgaaatgaattaaaaatttggttaaatctgacaaaaaacatgtctacaattaagcaataaaattggactctagttagatctgacaaaagacatgaaaactaacctcttgtccagatttatgcactggcctcacaacaaggggaatatcaataacatcatgaaacgcaggcactgcagaagaacaagagatggggtttgttttggtacgttatgcagaaaaaaaaaatggaactatgtgtataacttactaggacagtatccagggaggcgtatcagaaactcgcaatgcgaataatcctcagctatctgaagaaattaccattcattaatagagaaaatctgattttaagctttatagtatcaatatagagttacctgccaaacaatggatcggtgatgatgtcctgctgccatcacatattctgcatatataaagtcccaactgcaatgatcacaattcacagttatgagaaaactaactttcttgagaacttacaccatctaacccataaatcagcacactaacctgaagttggtgacacaaacagagcgaattccggcatttgctgcagcacgacaagcgatggggacaacatctgagacctgatgggaccagtatcttcttagttaatttagaagccaaatactcagaagcatagaacattatattaaaagcatttctgaagtaccacaaggttggctttgatggactttagccactcagcctctgtggctaaaatagagtctcgaggttccactgcaatctcacaatactgcaaatttgacgaaaaaagaatgattcaagctaagcacctaatggtctaaaggtaaggaggaaacatctcagagagataactggaacagaccttctccaaagaagcacgacgatctacacttaacgcatcagcttgtacggatccacagtccaacagtacctaacatcacctccatacattgtttaaaacaattagagatccatctttgaatgtatcagagtgaaactcaactaatatgtcaatgaacttaccttccggataaagagatttggtgaatgaatctccatggtgaaaacaaactctggagcagcagagacaacatgaactcgatgtccagatgatatcagataccgaaccacctaaaaccattgcatgaataaagataaatctacgatatcaaaatgttatgatctcagggattctaacctcgacaacacgagtggcatgaccaaagccatggccagtaacgtagtaagcgaaaaccaaagaagaacgtggtgaagaggaggattcagactcagacattggagctgtttgaagcagagtgggcattacacaatgttaaatcaaccaatctttacttttgattctaaagagaaaaaaaaatgggttttgttttgttggttagccataaatgggagaaatcagaagatgataagataaaagcgaatatagatatgagtaaagcgttacataagctaaatatggagtctaccgattttttctaacaacttaaatcttctctgtcccttttcttacgttgttgttgcagaggaaagttgtcatattttttttggttcttcaacaaactaaaaaagcactagcttccaaattcgtttctaaccattttttttctttgtgcctctttaactttttacctgcaatttcttcaggtgatgatatatattattttcgccatatggaccatatgtaattcctttttattttattttactttatccgaaattaattggaactcaaaagaaccatttatgaggaatattgtgtttttttttgtcatccgaaataaattagagctcaaaagagtcatttctaaggaatgttgttttacataagtgatatgatgcggttggacacgaattttacgcaccaaaatatccgctttgacatttgcactagtaaaaattaaagataaagaaaaacttgtgaattctttaggaatgatcgaaaagaaatatggcgtagggtaaatgtgaaaataaatttcatatattattgcagaagttatcggagagaaatgttagagaatttcaaggcttatttttattgatatttttaagatttgttttgctatgtatatacaatgttgacagggttttcttagtcaaagcacggtaaaatctattaacaaaacgtttgtcacaattggaataatggacacatttcaacccaacaaaataatagaacaacccattatgatatgttatatcaaaacgtcagaaaacaaatcaaatgtaaggtaatttcatgcagtaactttaaacagatcagtcttctttgattcacaagctttctaaaaaaaaggtaacaaaagaaagattcataagatggaagataaagctaggtttcgaagttaggcacacccattggccatggcaatgaagtggttaactatattaagagagaccctaagattttgtataagacagatcaaaactagaaagcctgacctagtactgcctctgtcttttgcctggagtgtttgtagtttgagcaggggaagtgcaatctcttgaccaatgtcctgcttttccgcatttgtagcaatctccagttgaggatgtggattttgcttgccctgattgaaattgttgattactagattgaccggtgcagtctctcgaccaatgtccttgcttcccgcatttgtaacattctccacttgaagatgacgacttcatttgccctggttcatacttgggattaccagattgagcagtgcaatctctcgaccagtgccctggctttccgcatttaaaacaatctccagctgcagatgtagactttactggtcccgtatcagactgaacagtgcaatctcttgcccagtgcccttctttcccacatttataacagggcgtgcccgttttcgcattttgatatcctctggtatctgagtcaccaaagttgctgtttttggtaacactatacgacgtaggagagctgactacattgtcattgcaccatttgaagaaaccacaagagccctgaaattaataaaaagccatgttatcacacatacactcaaaggtaagcaatactacattaaccacttaaccatcgtgcacaatattgactcggaattcaatttttcacttattccagtgatgcacaaagtctacaaactgtgtatgccacagttatcactctatttccgtcatttaaaccatgaaaaatctcctaatctaagctgagtatacttggttacaacaatcagagatagcatacaatgaaagacaagactcagcacttaaccatatagaacgataaccatagttctatccgaaacacagccaaagggctcactaaaccagaatccagaagcacaaaccacaaaatgaacaagagattgcaatgccattgctatgttgattatagataccaacacaaccaaccatataaacaaattgatatacacacacctcaaaaacaggacatcgataaaactgacggccaacgttttcgcctgttttcgcagtcaacacacggcacaaacccgcaccacacggacactgatgatccgggaacttagtatcattaccgtttccatagctattactagtagtagtactagttccagaagactgaaccgcatcacaccactggaaaaatccacaaccaccgttttcctaatagaacacgtagcttaaaatcattatattctcataggcattttatcgaacacttagaatgcaaaaataaacatattaagaacctctctattgggacacttgtagaatttgcgacctggattcttcggtgtatttgaagtaagaatcaaacagataccaactccacagggacaactcttttccggaaaatcttgttcaccggcgacgcctcctcctccgtctgatctttgaaaaccgccggtggtaacagcgacgctgcgagatttagaggcgggatttaatggactttgctgccattgatcacttttgcttccttttagagccgccatgtatggtccttccggtatagaagaaaccctagggcgtttcgctgctgcttcagcttcaattgcggcgagttgtagtaggaaatcgtcttcttcgtcaagagattctaccggaatcgtgattttcttcatagttgttttgctccgatctacgcttacgtgttttgtgaaatttggtttcgctttgaagagttttttttttttttttgggtttgtttcagtgcttaagaagctt

SEQ ID NO: 1341 - DNA, 95996 bp, Arabidopsis thaliana
gaattcttctgcttctcaaccaaattcttctcttatctcatctcctttctataattcttagatagtcccattttggtatatatcacaagctcccataataacccggttcacatttgcatgcaatgattcagttcagttctcagcttaatgttgttactcaaatgctaaataaatcagattttagaatgagagttattttcatatcatgattctattgctactatcaatccacatcttatgatataagatctataatcattgttggacatcaacttactatataacattgcaaaacaaaaatcatttgttaaagtcatattcgcgtatactttttcatgtaatgttcaacacaattcattttaatgacacacataagtctttaacattaaagcataaatttttaagtagcagagttcttgcgtatcttcaaatatccaaacttgccagctcctggagatgatccttcaaacacatacggcataaaccctgttgcttccttgtacttttgctgaatctgcaaaattcataaaaaaacatcttttattaaccttttggttctatctccaagaatcatgtaatcaatcaaagttttgatactctttggtacctgaagaatctgttcactgcttctcaaactactctttccaataacgcaaaccgtaccgccacttccgcctccagtaatcttggccccgtagagagtcccgttctcggttttcgagctcttcaaattctccatattctgcactaatcttactaatctgtctgttccatcagagccaatcccacacgcactgtagctgtcatggcactgccaagcaaacacacgattaacaaacggttaacttactagcagaactcgatcataagaaccgcgtttgatttgtaaaactattgattcacctggtacataagctccccaagaccaatgacctgttcttctgaaggagttgctgtcaacaatgctttgaaagcctgagaaaaatatcacttttgttacatgtccacaactaaaagttaatatcattgaactgactgatgatatatatgcaactagataagctcacctgcacacggaaattctcataaattggatgtctagtcggcgccattatggcgtatgtaccatctttgtcaatggttgtgacagaatccccgtgatcaccatatttttcgaggaattcttctcctgtgatagactgtgggagcttacttgcataaagagcttggaatctgcgaaaaaaaagaaggaaaaaatattgatctcatctaatttgattaacacagatgatatatacatagagagagatttatagtacctatgaggtgaaaggttacataagtaatccaacgaagtatcggattcaatcaactccgagctctcctcttcagcctcttctgagttggtttcagcaaaagaagctgcaaaagatcttatcattgtcttaccaataaaagctcctatcctcactgaaccatagtctgaaccaccaacgctgcagagtaccaaatttgttagaaacaaaatgtaagactttctgaaggaagaaatgtacacagcacctgtgtcggattccagagtcgattccccaaaatcgaatgtgagaaggaatttcaacaagtcctagtatctcagctggctgcaacgagtacaatcaccagttattactcttttaagagaatcaagtttgtaagagacaaagagagaaagtacctgacagatcatagccagaagcttgttagcttctccacaagcagaagccatctgatccatcactccacaaggtgctccaacaacataattctccaccttttggcaaagtaaagccacatctcgcggagatatttcaagacctgcacattcagctcaatgagtcatcttctcgttaattactattattgcagagaagttgtagtaaccgtgagcagcagcaacagcagacatagtagcaacttcaactgaagcagaggaagatactcctttgccttcaggaactgttgaagaaacctgaaaacatgtatgtaaaacggagttaaatacaatgcagttcatgaaattcgatgttttctttcttaccagtatgcttatgctgtcttcaaatcgaacgtccatctctctcattagtaccagaattgtacctgcaacatacgccgcccacctagaaatggaactcaatgttataatatatcaaaaactttatgatgaatctgaaaatggggtgaaagagatgaaccaacttctgagacggatcccgggaaaagtaatggtaggctttgtcataagatattggtttcccatcctcttccataaaatcagacaagtccatatcaaaagttggccctctgttgctcaactcagatccaaatgaaacctgaagttcgaaaaacgttatagagaaaagcactgtagagtcagagagtatagagaagaacatacaatttcaagtatgggagtgtctcttgaatgatgtcgtgcttcagcgtgcttccagagtttctgtttactaggatgattcctctgtacagcggcatgacacgcctctctcgtaggcatctaaccgattaaaaaagacactcttctgttaaagatgaatttaattgatgccaataaaaaagatgaatcatggagaaggtattaaccagcaagactagacttccagagtaatcagcaatgcctcccattacatcgagtcttccgggtgctctcgccacaacaatatcctcctgaatggccacaaaaacttcattagttcctcaaaacacacacaaacttcactgaatccaagaaaatgatacaaacctcccagttgaaaagcgcggcagccgctaaatgctccctttcttgatgatggcctcctattttcgctaatgttgccaaactatccaagaaaccgatggtatctgaaaggccatggtgatctccatgaagaatttcaaagccttctacaaacctgttaataaaacacataggagcttaagaggtgagtaccattaagtcctttgagagattcaaagtatacaagaaaacacacttggagggtttctgagtctgatcaaccgaaggaatcccagcttcgtttccagcgacttgataccattctggaactgaaagatctcttccaggagctctctgtagctggaagcctaatattattgcatcccgcaatctcctcgctccgctaagctacattggcaaggtgaatatcattggattggcattacaaatgaatcacaaactaattttatttttgtctatacaactccatacatctaaatttctctacaaaatctaaagtaacaaataacattatcttccttgtagcactcacattgagtttggaacgcttcttccccatggctgtgtcctgcagtattttagctgccacctgaatatagaaacagccagggcattgacatcatcaacaggggaaattgagcaactgtcatgatatagtacaagaaggactggtctgctaatatgaatagtttgcacactctacctcgccaccatcaatgcctccatcgtaacacggtttcaatgtaaccgcacgctcgagataaggtgcccaacatccagccagaaggtctcttctgatcatttcaactcctccttggtaatactttactccaagaaagaagaagtattcttaggagaaggcaaacatttaaacaaacatttacgcaaactgtgggtctctcacctcaagcatctttctcaagaatggttcttcattgaagtaatcccttcgcacaaatatgaaccgtaacttgtatgcaagtgcttcactcacagttccatatccaatttttcctgaaattaccaccattattagacgtgaattagttaatcagcacaatgttacggtgaaagactcatagatgataccgagcatgcagtctgaagcagcaatcacatcaggagtataagcatcttttggaagtgctatgaaatttggaggaagctcctgtttagcagaagctccacagacctatatatatgacatattttcatttgttattttggttttgaaatcaatcaaaccaagccgaaatgacataaccgaatctcgatttaccaggcataaccaaccagctggtagatattcctccttcagtgtccaaccagttggctgcaaatcacaccagcaatatatcataaacaataactcgaatttgcatattgagattaaaagctataagagaatgtgcttacttgcccaccaaagttaaagataagtagtttcacgttgtctggaactccaagctctctcctaacctgaaatgaattaaaaatttggttaaatctgacaaaaaacatgtctacaattaagcaataaaattggactctagttagatctgacaaaagacatgaaaactaacctcttgtccagatttatgcactggcctcacaacaaggggaatatcaataacatcatgaaacgcaggcactgcagaagaacaagagatggggtttgttttggtacgttatgcagaaaaaaaaaatggaactatgtgtataacttactaggacagtatccagggaggcgtatcagaaactcgcaatgcgaataatcctcagctatctgaagaaattaccattcattaatagagaaaatctgattttaagctttatagtatcaatatagagttacctgccaaacaatggatcggtgatgatgtcctgctgccatcacatattctgcatatataaagtcccaactgcaatgatcacaattcacagttatgagaaaactaactttcttgagaacttacaccatctaacccataaatcagcacactaacctgaagttggtgacacaaacagagcgaattccggcatttgctgcagcacgacaagcgatggggacaacatctgagacctgatgggaccagtatcttcttagttaatttagaagccaaatactcagaagcatagaacattatattaaaagcatttctgaagtaccacaaggttggctttgatggactttagccactcagcctctgtggctaaaatagagtctcgaggttccactgcaatctcacaatactgcaaatttgacgaaaaaagaatgattcaagctaagcacctaatggtctaaaggtaaggaggaaacatctcagagagataactggaacagaccttctccaaagaagcacgacgatctacacttaacgcatcagcttgtacggatccacagtccaacagtacctaacatcacctccatacattgtttaaaacaattagagatccatctttgaatgtatcagagtgaaactcaactaatatgtcaatgaacttaccttccggataaagagatttggtgaatgaatctccatggtgaaaacaaactctggagcagcagagacaacatgaactcgatgtccagatgatatcagataccgaaccacctaaaaccattgcatgaataaagataaatctacgatatcaaaatgttatgatctcagggattctaacctcgacaacacgagtggcatgaccaaagccatggccagtaacgtagtaagcgaaaaccaaagaagaacgtggtgaagaggaggattcagactcagacattggagctgtttgaagcagagtgggcattacacaatgttaaatcaaccaatctttacttttgattctaaagagaaaaaaaaatgggttttgttttgttggttagccataaatgggagaaatcagaagatgataagataaaagcgaatatagatatgagtaaagcgttacataagctaaatatggagtctaccgattttttctaacaacttaaatcttctctgtcccttttcttacgttgttgttgcagaggaaagttgtcatattttttttggttcttcaacaaactaaaaaagcactagcttccaaattcgtttctaaccattttttttctttgtgcctctttaactttttacctgcaatttcttcaggtgatgatatatattattttcgccatatggaccatatgtaattcctttttattttattttactttatccgaaattaattggaactcaaaagaaccatttatgaggaatattgtgtttttttttgtcatccgaaataaattagagctcaaaagagtcatttctaaggaatgttgttttacataagtgatatgatgcggttggacacgaattttacgcaccaaaatatccgctttgacatttgcactagtaaaaattaaagataaagaaaaacttgtgaattctttaggaatgatcgaaaagaaatatggcgtagggtaaatgtgaaaataaatttcatatattattgcagaagttatcggagagaaatgttagagaatttcaaggcttatttttattgatatttttaagatttgttttgctatgtatatacaatgttgacagggttttcttagtcaaagcacggtaaaatctattaacaaaacgtttgtcacaattggaataatggacacatttcaacccaacaaaataatagaacaacccattatgatatgttatatcaaaacgtcagaaaacaaatcaaatgtaaggtaatttcatgcagtaactttaaacagatcagtcttctttgattcacaagctttctaaaaaaaaggtaacaaaagaaagattcataagatggaagataaagctaggtttcgaagttaggcacacccattggccatggcaatgaagtggttaactatattaagagagaccctaagattttgtataagacagatcaaaactagaaagcctgacctagtactgcctctgtcttttgcctggagtgtttgtagtttgagcaggggaagtgcaatctcttgaccaatgtcctgcttttccgcatttgtagcaatctccagttgaggatgtggattttgcttgccctgattgaaattgttgattactagattgaccggtgcagtctctcgaccaatgtccttgcttcccgcatttgtaacattctccacttgaagatgacgacttcatttgccctggttcatacttgggattaccagattgagcagtgcaatctctcgaccagtgccctggctttccgcatttaaaacaatctccagctgcagatgtagactttactggtcccgtatcagactgaacagtgcaatctcttgcccagtgcccttctttcccacatttataacagggcgtgcccgttttcgcattttgatatcctctggtatctgagtcaccaaagttgctgtttttggtaacactatacgacgtaggagagctgactacattgtcattgcaccatttgaagaaaccacaagagccctgaaattaataaaaagccatgttatcacacatacactcaaaggtaagcaatactacattaaccacttaaccatcgtgcacaatattgactcggaattcaatttttcacttattccagtgatgcacaaagtctacaaactgtgtatgccacagttatcactctatttccgtcatttaaaccatgaaaaatctcctaatctaagctgagtatacttggttacaacaatcagagatagcatacaatgaaagacaagactcagcacttaaccatatagaacgataaccatagttctatccgaaacacagccaaagggctcactaaaccagaatccagaagcacaaaccacaaaatgaacaagagattgcaatgccattgctatgttgattatagataccaacacaaccaaccatataaacaaattgatatacacacacctcaaaaacaggacatcgataaaactgacggccaacgttttcgcctgttttcgcagtcaacacacggcacaaacccgcaccacacggacactgatgatccgggaacttagtatcattaccgtttccatagctattactagtagtagtactagttccagaagactgaaccgcatcacaccactggaaaaatccacaaccaccgttttcctaatagaacacgtagcttaaaatcattatattctcataggcattttatcgaacacttagaatgcaaaaataaacatattaagaacctctctattgggacacttgtagaatttgcgacctggattcttcggtgtatttgaagtaagaatcaaacagataccaactccacagggacaactcttttccggaaaatcttgttcaccggcgacgcctcctcctccgtctgatctttgaaaaccgccggtggtaacagcgacgctgcgagatttagaggcgggatttaatggactttgctgccattgatcacttttgcttccttttagagccgccatgtatggtccttccggtatagaagaaaccctagggcgtttcgctgctgcttcagcttcaattgcggcgagttgtagtaggaaatcgtcttcttcgtcaagagattctaccggaatcgtgattttcttcatagttgttttgctccgatctacgcttacgtgttttgtgaaatttggtttcgctttgaagagttttttttttttttttgggtttgtttcagtgcttaagaagctttcctggtttcttttttgcaattgtaaattgccgctccgctttatgtggccgcgtggcaatacacactcatcatggattttttttttttttttttttttcttatcatcgattatgaataactaattatgggtaatcattattatactttcaatttgggtattggtgcatatttttagttttggtcttctttttttttgctgttttaaggttctgaatggttacagcgtacaaggagaaaagcagttttataatccaatacagtttaactttagtatgcggggaaaaaacgtatttacaagataagtgtagtttgtacacaattaaaagcataaaataaagtttgattgatgaaaataatttgcggtatacaagaaaatgtttgaatatgaataatttttttttgataataaagaaaattttcatatacttataaattttaaatatctaaactgatataaaacaataatttcttttgatataattattggtaaaaaatttaaaaatttcaatttcataaacaagcacaacacaattaaaaactattattgaattaagagtttaacaaaaaaaaactaaatctaacaagtgtatttcatatattaaaattataagacagatatattgaattacgttttttttttaaattattacatgaaaattagaaatgagaatttagagacaagaaaaaatggagaggatgattaattttctttagttttgctcgtaatataacatacaatatttaacatgaaaaatcaaattttggaaaagaaacaaaaaacattacctattgggttttttgacaagtctgatgggtaaagactggtttgttttgaaatgcgttccacggtataatccgttagacaaaaccgtaatttttttatttttaaatgcaaattgaataaaatatagtgattggtaacactactacgattttgataaataaaaaagtttcgaaaatcgctttttacaagttaccattcacaaccttagagtttcatcagggcccgtcctaagaaattggagtctaaaacaacaaaataatttttttaagactattattaaattttcaaattttggggtcttttcgtaaaaatatttttttggggggcctatttgaaaatatatttcttatgcgaatcttttggaaaaatttgggagccttgttcattagtttctccttgctcccctcaaggtcggccttgagtttcatgtagagagaaaagatcattagaaattcatgaataaagtcatcatggctaagatgttcgggttcaagcgcttaagcggtcagatggcatttgttgcaattctaaggcagtgaatggagactatgtcttcgcagattttgaagtaaaagcgtagaaaaccgtgatttgtcaccaattagtgaaactagaaaataaattacgtttttcaaaaaagaaaaaaatagagcaactgtggatttcaaagtataataatacaggaccacacttctaaattgtcatactccttttatgtagtggtccaatgtaaaacgcatggtacaatattattttcttttgtaatttctttctttattaattattccttatatatatatattgttaaatgtgtcaaacacaattcacatacacaaacacaaaaattcattctctctcgtcatactctctctctttttctactttgatattaaagaaaattgcaaacccccattgaaggtacttattggtgtataattttgtttataaaattttttaaccacacaacactatcaacttagaacaagattttatttaaataaattggataaagaattcatattccggttatgtgaaagcatgtgtaatccattgaacatcatgcttttactttttttttaatatacgtgtatgttgcataataattatttttaatttctttttgtaatgaatttgttactacaaaattatttagtatcaaagttagattaattaaaagattgtttttcacattcttatttggtgtcttataaacataaccattattatctcttatttatatattaatagtttaattaaacacacgagcatgaaattgatgaagaaagtgaagattactcagacactgatagtggtaacatgccacaaaccgaggttcctgaaatgcaagaagaagaagaagtgtatcgtgttaccattgatgatgatgaaatattccaacattgtgctgctagaaggcaacaacgaggtaggccaaatttgcagtcaaccgctaaacgtgaaagtagtgcacaaagatctggaggaagctcacgagtttctattagaagtggttcacgaggaagtcgaaaacgacaatcatttgaaacaacaatagaagacaatatcactagcttcagagaattccaacgacaaagttttcatcctggtgcttttgaccaagatgattacgatgaatttaaaaaggcggaagcgatatttatcccactagatcttcccaagcacactagattttattgggcatgcattaatgcacttgaggagctagtatattggcgtaagtatttcattgatatagctgcaagcaccgacgaggataaggtacaactgttagaagctatgactggtgtttcccccaacaaccaagatgtgccaaaacagttaggttcaggtcattcatttgggcacattcaggaggtatatcatctggaagtccatcctttgtgggtaataatttgggagggcaaaattcacccggtttttgggatttcatttatccacagtggggaacaccacccaatgctccacactggggaacaccactaattgctccacaatggcggcaaatatttggaaaatttcagcaaggtggttcaagtggaacgtctctgacaaatgttcaatatagattttaagttggaagtcaaggagatggtgcaacaatggaaactccaccgatcatacaacaaacatcatcatccggtgtcggtttcacaaattattttgaaactggacaaataccacaaacacctagaccaggaggtctctttaatatttatggaactccgcaaggatccaatgcaaatcatcacagtaatgtaggagatgaagaatagtttatatttattgtggtgtatcaatctcacttatattttgaaatgatttatgtttttattaagtttaatgttgaattttatttaatttatgtttgcaaaataatttatgtctaatgacatatatcgtttgtattgaatttcaggcatttcgtatatgtcagttgcgatcacaagaccttaataatctagtttacgaagaaagaattgagttgtggaatttggaaaacgaacaatttgaaaagttagtagttcaaccagctttgaattattatgaacggtattttcaaaaagtccagtccaaactgatagatgtttgggatggagaaatatatggcgtcgactacagcaagatgatgctgcttgacttcagttattactgatgtcacttccatgtttcacaacattgtgtaatatgttgcaaacaaattatggtcttcagccaacattgaatataagtattgaagaaagagttgcgatgtttctacgaatatgtggacacaatcaagttcagagagacgatggtttaagatttggacgaaataaagagattgtgcagagaaagtttagagaagttcttacggcaactgaattattagcatgtgaatatattagaactccgaaaagacaagaattttatcgagttccgaagatattggctatattttagtgggttcgttggagctaatgatgggactcatgtatgcttaaaagtaaagtttgagttatagagaatgtattggaatcgacccgataatgcatcattgaacatcatggcaatatgtcatttgaatatgttattcacatatatttggaatggagcaccaggttcatgccactatacagctattctgcaaatagcacaacaaagtgattccggttccctttgcctctttcagagaaatattacctggttgattctggctacccaaataaataaggatttttagctctttatagatcgtcacgaaatcgagttgtgagatatcatatgtctcaattctattatggtcctccttctagaaacaaacatgaactgtattgtactttttatgatgaaattagtcaacgcatttaacaatatgtatgttacaaaattaaatttatattttgatcaatttttgtattagtggtttataaatatctgttattgtttatttattaacaaaaaaataattaattattaatatatacatatatattattctataccgcttattttgtacatatatagttttttcaccaatcaaatattattctataccgcttattttgtacaaatcgcacttgtcccgcaaatatatttctctcgcacgtaccgcagttgaaccttacccactataataacgctttccccgcacaacaaaaaccacggttaccattcgaaccctaaattcattcaacatccttttttgcttttttaacacatcacatcatcttctctttcttccatatcatcatttaacatctacttaatttttcaatactacaatagttttgtttaataaaatttaacattttatcttacattattattttccaattttttattttcttaaatatatttaaatttttgtgattgcatattaataatattttttgataaattaagtttgaatatcaactaaattaaattaaattaacaaaaagttgacatagttattataagataataaaaaaattatgatagaaattgtgttttttatgtgtctgaatcaaatgaaccaagttttcttttatagagttaaaaagttatgaattttcatataaatgatttgttacataataattgattttagatacataaggtgagataaaaatttcaattgccaataacaatataacaagtgtcatgtcaataattttttttttaagaaaaaataatagaaaacatgcgcgaatgtgtgaaacacaccttcccataaagtgatgaaccgtggcatgcgtggcccaaaaaaaaacatgttggatagattcaacatccaaaaatccacattggtttttttcagttttcaacacctttatttgaataaattaacagttaaaacttttttcaacatgttcaatggagttgaaatttcaacaggttcagtgcaagtagtgtaagtataaatgtataaagatttaacataaatctgcttgataaatagagcctctagaatggtgagaaaacgataagactcgttaacaaaatgttgacaaaattagtaagagaactagttttcaagaacaaggctatacgatcagagggttttacatattcatggacacatcacttgcatcaatgtatatgatgtgactaaagatcatgagtctagggaagattctaatgagtttaagatcgagagctttttagcattttcatgaaattcagggcaaaggaagagagaaaagagcaaacactaagttcctttcttctagcgacgcaaggaaatcatgttctggattaaatctcagtaacaccttagtaggaaccaaaattaaagtggtggtgcattgagcggattgttatacttgttttctgattttatttttgatgacattttttgtatataagaaccataatttattactgaaaaactagcttgaacatgttacatgtatatgttgatcattccatatactaatgtctagttagtttttctctttaaaacaaaaacgtgtagttaataacttgatattgaaattcaatatgatcgtaatgtctacttcatgttctttttcgagaaaggaaatagtaatcaaattaaactaaacatcaaaaatttaagcaaagaaaaagaataaatacatccatggtttttagagatcactcatatgattatgtgatatctacgatttgtatgtaaaaatgttaataataataaaagaaactatatgcaaactgttacttgacgcacaaaagaaacccgacaaatgtggtgaaaacaaggtcaaaacctttaaaaaaccatggtcgtaagaaatcctccaagaaagtctctgagctctcaattcttttcaattgaaaaagacaatctttaatttaggaaaatcataaaaatctatttttagtaagtggaagcctaaactttaccagctaattccctcaaagacaagaaaacatttctcactttccttgcggatcctcaaaaacaatgtccaaacttttgaaccataaacaaaatccaaacaaaaaaacattcctagacaaagagacaacgccatacatcaatatttttaacattatcttggttattagattgttaggagagaccaaaacaacaacaagaacaacaagaacagcagttcctctacttctccttaacccatgactgctgttctatttctctgcttccttctcatctgtttttccttcaccccttctctacaaaacgttagtgaatcggaaccgctcgtgcggttcaagcgctcggtgaatataactaaaggagacttgaattcatggagaacaggaaccgatccttgcaatggcaaatggtttgggatctattgccaaaagggtcaaacagtttcgggcattcacgtcacccggcttggtctctccgggaccatcaacattgaggatttaaaagatctcccaaatctaagaacgatcaggcttgacaacaatcttctctcaggtcctctccctccttttttcaagctacctggcttgaaatctcttttgctctcaaacaatagcttttctggtgagattgctgatgatttcttcaaagaaacgccacaactcaagcgggtttttcttgataacaaccggttatccggaaaaatccccgcttctttgatgcaactcgcaggtcttgaggagcttcacatgcaaggaaaccagttcactggtgagatacctcctcttacagatggcaacaaggttttgaaatcccttgacctctccaacaatgatctagagggagagatcccaataaccatttccgacaggaagaatctagagatgaaattcgaagggaatcagaggctttgcgggtcacctctgaatatagaatgcgatgagaaaccttcatctacagggtcagggaatgagaagaataacactgcaaaagctatctttatggtcatcttgtttctattgatattcttgtttgtggtagctattattacaagatggaagaagaagaggcaacccgagttccggatgctcggtaaagaccacctaagcgaccaagagagcgtggaagttcgtgtaccggactcaataaagaagcctatcgactcgagcaagaagcgtagtaacgcagaaggttcctcaaagaaaggttcatcgcataacggaaaaggtgcaggaggtggtccaggaagcggaatgggagacattataatggtaaacagcgagaaaggctcctttggtttacctgatctcatgaaggctgcagctgaggtgctaggcaatggtagccttggatcggcctacaaggcggtgatggccaacggattatccgtggttgtgaaaaggattagggatatgaacaaacttgcacgtgaagcattcgatactgagatgcaacggttcggaaaactccgacaccctaacgttcttacccctttagcttatcactatcgtcgagaagagaagcttgttgtctctgaatacatgcctaaaagcagtctactctacgttttgcacggtactacaacgcttttgcttttcttgattgatgtagaagcatattttacgatcttttttaatatatatatatatatttttaatttgcaggagatcgtggggtttatcattcggagctaacttgggcaacaagattgaagatcatacaaggagtggcacgaggaatggacttcttgcatgaggagtttgcgtcctacgatcttccacatggaaatctcaaatctagcaacgttctactaagtgaaacctatgagccattgattagcgattacgcgttcctcccgcttcttcagcctaacaacgcctcacaagctttattcgcgttcaaatcccccgagtttgtacaaaaccagcaggtttcaccaaaatcagacgtctattgccttggaataatcgttctcgaggtcatgacggggaagttcccgtctcagtacctaaatactggtaaaggagggacggatatagtcgaatgggtgcaatcttcaatcgcacaacataaagaagaagagcttatagatcccgagattgcgagtaatactgattcgataaaacaaatggttgaattgttgcggatcggggctgcttgtatcgcaagtaaccctaacgagagacaaaacatgaaggagattgttagaaggatagaacgagtaacactttgaggagatttgaaaatgtaaacgcatggaaaacgttagagagaaagaagcttttggaatctgtagattaaaaacaaacaaatgaggaaaatggtacgttgcgtaaataggaatgacacattcttttcctctggctaattaaactgaaacaaacgagaaggtattgtttggtaacgaaaaagtccttttcttttttgtgttcattaggaagaggtgaggagcaaaccatttttttgttgttgtttcatagattttttttgttgatattttccatttttctttgtcaaaagacgttatgtaaaatcatattagtagttttattttcttaaaggaacttctgatgtatataagtccatgtttttgtgttatataagatggatttttacgcaaaagaaccatgaaaactccaattttgttataaacagagaaagaaatagaagaaatgagtgtgttattccattgagataaagggttctttatataggagtacaaggaaagggtaaaaccctagaaacatctagatgatgggcttagatgatgggccttataatgggcatccatctttattcataacactccccctgatgaccattatagtatcataactcgtaaagtatttgaaatgctgcctcattaaaaaccttaccaggaaaacccaatgggaaaaaccatggttaagggaaaaagagtgcaacatacaattactcccccttatgagtatattcgtcagatctttgagacggcgtaatccgatacgatagactaacttcttgaaagtagcagtaggtagcgctttggtgaataagtcagccagattatcattcgaacggatctgtagaactcgtacatcgccgctcttttgtagatcgtgtgtgtagaagaattttggtaggatgtgctttgttctatcgcctttgatgtatccgtctttgagttgtgcgatgcatgctgcattgtcttcgtacataattgttggagtctttttttccctgcatatataccacagtcttcttgtatatggtgaactatggatcttagccatacacacttgcggctagcttcatgaattggtaaaatctctgcatgattagaagatgtggcagagaataaacagtatttgagaataagtcttccaaatcttctcttgaacaaatttctggataaagtacaacgccattcttctgctcatgaatcttttagatgattcatcttgaccatcttatttatttctctaaatatcattagtgtataatattcatttggatgattgatagaatttcttaatattcatcaagtgtattatttgcgtgttctttaatgtctcgttaaaaaccttgtcatagaaaaatcatgtgggataaaaactatgataaggaaaaagggtacatccacgcatatcattcaatctccccctcggaaacatcttcttcaggagatgattttcaatcaaatacaatatctcgttggaattaataaccataatcttaatgatccaaattatatggttttcatatagacttataaatatcattatcttgtgatattttatcatacattattgtcatcgtattacttatgataactctgtaggagttttaatgattttcaaaacaaatattagtttgatcaatatattttgacaaactcaacataaatatacatttatatgattatatgccatgttacatatttctttttattcgatcgagtagagttttagagaacataattctcatataattaatccttcagagattatatctttcaagaatttcatataaatgtcatatccagtgttccgtctcttattgccagattttagatacttaaaaaaaattattacatccaccacaagagaatatatctcttcataatacatttcttatctttgtgaaaatctcattaatttcactattctttcacataaagagtcatttattttccactggttttacacatcatgtgcatagactagtagtccaaatatctctactagagattataattatatgtctatttcttcttttccatttttggctaatcattactttgtgtacacttttcaatagactttctttcatgatcctcctttttgtccataatatcaactgctcatagcatgcaaatatattacgacgtcgatttgcttttgattccattatattttgacatgacatagctagctagatctcttcattgtcaagtacttgaatgtttcatttgtcatgtttatgtctcttttagagatcattcactctcttcaagagatcatcaaaatatttatttcctcaatttggtcatttttaattttgtgctccttcacttttacgaggatatttatatttggaaccaaggtctattacgcttcatgcgatcttaagactcaatagcagtttgaaattggtccttacaggacattcattatattctagagcatttaatttacaactggtataagtgacttcatcactttatttgggtcagcaaatgcgtctggcaattacaacgctaaattctgtaattgaattatcttttggactcttaatatacattctttactccgaggatcattgataattcatttctatttatctttttcaccagctgtatacattctcccccttatgttggaatagctgactatataatatgatagtcttcaaaacgagcggtatataaatccttctaggatggcttagttatcattcatatctaacatgtattcttatcctcctttgagggttcatctcttcgtgctgtggtggagcacttttcacattcaaagcttttagatgaaaactatttggtttctgacccaaaaccaataataatggggaaaactattaattattcattggcttgatgcgtatcgatgttactaaaccattttgtgtatgaacatgaatttcaaaatgttaaacacttatcccaacggatatccaataatggttattataaataaacactgaaatactcttgtactttaatcaagaaagtaatctcgtaaactctatgttgcgggtttataacaaggataaatatgaccttcttgtcgatgcaacaatcgagtcaatgcgtccattgaatcgatgcatcttttataaccattaggtatctaaatgtcatatagtgggtgatcaacccataatcatctccttatatatacttacgaatagataaagtccaaattacttacactggtaaaaatcacattatcatattgctttctgagcaagtaacatttgataaatcattaaggagaatcttctggtttttcacctaatgtccacataattctcaatactttcacatcatcattaaaccaggatgactaatccggttaagccaaatatactcttgaaacttttaattcttttgaaacttctagttctttcaaaacttataatttacttttcattgcttatcagttactcccttaatgagatcttataatcaaaattacttccatgtattttaataatcaatcatatgttaataaaacaataacgagataataattaaaattttagattctaatataaacgatattaaatttaatttgactagctatgtaagatcttatattcacttcagaatatgagtattacttatcaacaataactcatatattttatttagcctttgaaaaacactcgatttaagttcataatagttcttaaatttctttcaaatattgtgtctacaggacaacgatacttgcgtaaaagtttaatcgtctgttttaccaccttcgcatcagagatattctcttaacaatgtgagttatattcaaaaagagacttcaagtcttgaagttttagtaataactaattataatttattttatctaataacaaattcatataagaattgctttatacaacttttagatctttagtagtcaaagattgaacataatcttctggatatgtcacttattatccattcattacttctccttctcgagatgatgaaacttcaagttcatccatctcgtattgaattccactctagaatcataatgtatttatatctcatcatattaactttgagatttggagaactataccgcatcgatgattttaattttgtattcccatagaaaacaatgtatatgctcttctagagtcttttaataagattttatactacttgatatactagattatttcatcgttagaattttttttttttttttttttttttttttttttttctcaacttctggtgataatttaagttcttaaaaaaaactttgaccatcaaaaatatgatatcttcttaagatacattaaactagtcattcatgaaaatttgtataagtgattatacctttaaattaagttatttatcaatcaatttatttcataaaataatccagtattatatactaatacaattttaatgcaatattgtaaaaccaatcagaataaaactattttgtgcaaaatctggattttacatatatcttgacaaaacttttatttagggtaatatgaattcgtgcaagatttgggaaaaatcatttcgtgcaaaattagggcaaaaccatgaacaactttttttttttctttttttttttattttttttttatttagataccacaaagatttagagaaaaaaatcttataaaaagaaaaattatcttgcaacgtttttagtaaaaataataataacacaatcaaatatatggaaatcttataaaaagatttagataataataacacaaagatttagatatatgaaatcttataaaaagaaaaattatcttgcaacatttttagtaaaaataataataacacaatcaaatatatggaaatcaaatatttaatatggaaaagtcaatatctaaaagtgataagatatgtataacgttttaatcaaaggagttaaataagggatatcatatcaatcataaatggattttagacaatatagtatttataaaatgatattgaatatagatgcaactattcaaaactggaatgctaaaacattaatacatgcttgcatcacccaccaccgggttatgaatagttacaaaattagttatataattataaaattggtaatttatatattcaatattgtaatagtaaatcacaaaaattaacaattaacaagcttgattctcttctttaacgattttctttgtagaatcattgaatcatgcgatagtaattatagaaacaaatgataagcatgattctcttctttattgaatcattgaaaacatgcttttaccgatctatactataatcatcgattggctcatattgttttgtttcaataatagaaaataagtattatgaaccatgagtcgataagtaaacatggttcttaaaaaaaaatgtaagaatctctatatctaccttttagagcgtgctgataacgtgttataaacagagaaagagatagaagaaatgagtgtgttattccattgagataaagggttctttatataggagtacaaggaaagggtaaaaccctagaaacatctagatgatgggcttagatgatgggccttataatgggcatccatctttattcataacactccccctgatgaccattatagtatcataactcgtaaagtatttgaaatgctgcctcattaaaaaccttaccaggaaaacccaatgggaaaaaccatggttaagggaaaaagagtgcaacatacaataaatatccgaaaaatagtgcaagaatagttgaatattcattttgtgttatataagatggatttttacgcaaaagaaccatgaaaactaattgtatgtgtccaacatcggttgctaataagcgactattttgggacaggatattttacgacccttttttagcgatcgttttatatcgtcgttaagtagtagtgacaaccttgtttgcgattattttgggactaatatgagggtcgcaaagggcaggttgtcttatatatgaatcaataatgaaaatacataattgagcttaatagagtttttttttgcacaataactatcaaatgccaaaacactatttaagtattttgagttgattaatgacgtttcactttttaatcatatatttaagtaggtctgttaacgacgggaagttaggacataaatcttatttcccaaatttgttttcatgaatctaacctcaccacaatgtatttgggacgaattctaatgtgattcataacactgcaatcgaagcgaatctctaaactttatctttacgatatatcaacgccattcctgcaggtccggtcatatagttccattgattctatccactttaccgcatgtaatttggatcatttatggaagtaatatacagtttttcttgtatgagtcaataacgaatagttttatttatactaacaggattgacgatacatacatgcagtaccacatttacaattaaaaaaaaaatctttatcatttacgcatatatatgtataaccacggcgaacaacattaaaaatctgtaaatttagttttaagggaaaataattttttttaaaatacttattatttttatcacccacacgaagccaatgaagttttgatttctgttttaggaaaccttcttccaactctacaacatgatcccaatccctgtaagccttagcttcctcctccatcagagctgaagaaggattaacaagggtggccaactgcttatcacaaagaattttatgagcctcctctactctgtgtgagtttagctaggaaatgctattcatgagatacgttgtccgaatggttctatagctacatcgcaagaagacattaagtccgaagctgtaaggttttttgaggatttcatgactcgtatacaggtggactttgaggatattcccaaggatcaaattgaagacctgttggagtttcgatgctctgtttcagaacatgatgatttggtgaatcagttttcagaggaggagatccaagcggtcctattaagatggcgggtaataaatcacctggcccggatgggtttacagctgagttcttaaaccaaacttggttcattgtaggaatttcgtcacagcgatccaatccttctttcttttgagcttcttacccaaaagggttaatactactattctagcccttattccgaagaagaatgatgcttctaagatgaaagactatcgtcccatctcctgttgcaatgttctttataaggttatatctgttggattaagcttgaaggagaagtaacttgaagagcaagttactaatgaagagaaaaggaaattaagctttaaatattctaggagttatctagaatatatatatttggagttatctaatgttattaggagttatctaatgattaggataatgttaaagttttattatataaggagatgctaagttgtggcataagttatgagttttagagagattaagacttagagattgtttagtttttgagttattttcctaagctaataagagagttatttttataatcctaagtgttcttaatcttattaaactttatttggtatcagagcactcacgatccacaagacatcatgggtgaaattacggagacgtcaaacacggcgttagcaaaggttaacgaaggaggaggagggggatcatcatccctcaagtgcccgatgctaaactctataaattacaccgtatggtctatgaagatgagtatcttacttcaagttcataaggtgtgggatatcatagaggaaccatcggacaacaacgagaagaacgttatggctatagccttgttgtttcaatcaattcctgaatcacttaccttacaatcgaagcacttgggagcggagagagtcaaagaggcaagattgcaaacgttgatggctgagtttgacagaataaagatgaaggataatgagacaatcgatgagttcccagggaggttatcagagatatcatcaaaatcagcttcacttggagaaaccattgaagaacctaagcttgtcaagaaatttcttaagagtcttcctaggaagaaatacatacacatcgtggctgcacttaaacaagtactagatcttaagaaaacaagttttgaagatattacgggaagactcaaggtttatgaggaacgcattactgatgaagaagaagttcaagatgaccaaggaaagttgaagtatgcgaactcggattctcatacgagtcatgaacaaggaagtgaatatagaggaagaggacgtggtggacgatcttatggcagaggaagaggtcaaggacgttacaatgaagggagagacacttcccgagtcgtttgttaccggtgtgacaaaaccggtcactacgctttggactgtccggatcatttacttaagctgcaagaaacacaagaagatgaagcaaagagtacagcagaggcagatgagttaatggttcacgaggtcgtatatctaaacgaagagaaagtagtaccaagtaagttcgatgcaagtaatggaggagataatatttggtacctcgacaacggagctagcaatcacatgacaggaaatcgaagttattttactagcttagaccaatctattactggaaaagtgaggttcgacgatgactctggaatagacatcaaaggaaagggtatgatcgagtttatcgatcgaaacggagaacaaagaaaaatggttgatgtttattttattcctgaactaaagagtaacataattagtcttggtcaagctacaaaagcaggatgtgatgtgaggatgaaaggagaagacctaactatgcatgatcgagatggaaagctacttgtcaaggcagttagatcaaaaaatcgattatacaaggtgagtatggggatcaaagacacaatgtgtctttattcaacaactccaatcgattcttctagatggcatgcgaggctagttcacattaatcacgagactatgaagtcaatggttaaaggagagcttgtcgtggaaattacacttgctaactttgagtcaaatgtgtgtggctcatgtttacttggaaaacaaacaaggcaagtatttccacaagctaccatgttccgggctaccaaggcattagaattaagtcatggagatctttgtggaccaatcacaccaaacacattggcaggaaacaagtatgtgtttgtactcatcgatgacttcacaagatacatgtggactatcatgttaaaagaaaaaaatgaaaccttcggaaaattcaagaaattcaaaagcttggtagaacaagtactaaattttaagacggagatggcactaaaatttgagatgagtgaccttggaagagtgacttactatctcgggattgaagtttgtcaaaacaaagaaggaataacactaagtcaacgacggtacgcactaaagatactagaagaagcgggaatggctgaatgtaacttggttcacacgccaatggaagctggtttgaacttgtctaaagccccgaaagagaaagacattgatgctacaagtgacaggaggaatgttggatgtcttcgatatctacttcacacaagactggacttatctttttgtgtaggtgtattgagaaggtatatgcaaagtccaaaggagtcacatggagcagcaatgaaacaatgcttacgatacttgcgaggaaccacaacactcggtctagagtttcggagttaagatcaaataaatacgaagctaatcggctacaacgatagcagccacaacgtggatgaggatgatggcaaaagcaccacaggtcatgtattctactttggtggaagtccaatatcgtggtgctcacagaagcaaaatgtcgtagccttatcatcatgcgaagctgagtttatggcgggaactgaagcggcgaaacaagcgatatggcttcaagaacttattgaggagatcaaaggaagtacatgcgagagagtgatgattctaatcaacaacaaatcagcgatagcactctccaaaaatccggtgttccacggacgttcgaaacatattcacaagaggtatcatttcattcgagaatgcgttgagaatgaactaatacaagtggaacatgttccgggagagaaacaaaaggcggatattttaactaaggcacttggaaggatcaagttcaaggagatgagagatcttgttggagttcaagatgtggtacaagaagacttcaagcttaaaggggagaatgttggattaagcttgaaggagaagtaacttgaagagcaagttactaatgaagagaaaaggaaattaagctttaaatattctaggagttatctagaatatatatttggagttatctaatgttattaggagttatctaatgattaggataatgttaaagttttattaataaggagatgctaagttgtggcataagttatgagttttagagagattaagacttatagattgtttaggttttgagttattttcctaagctaataagagagttatttttataatcctaagtgttcttaatcttattaaacttgaatatctaaactccttgccaatatattgaaaacaattcttcctccctctattgctccaaaccagtctgcatttatacatgatcgacttatgatggaaaatatgttgttagtctctgaatttgtcaaggactatcataaagaatcaatctctaaacggtgtgctttaaagattgacatatccaaggcttttgactcggttcaatggccattcttgctcacagttctaaaggcaattaatctcccggataaatttgttcgctggattgagctctgtattagtacatccgctttctgatctgttcaagtaaatggaaagttggcgggttttttccgtagtgatagaggtctgagacaagggtgctctttttcgccatacctatttttcatttgtatgaatgtgttgtcgagatttcttgataaagcggctgtagacaaacagattggttaccaccctcgttgtaagaacatgagcctcactcacttgtgttttgcaaacgacatccaggttttctcagatgggagtgcaaaatcaatagctaatattctatattaacttgatgtaaaggaaaaggcacttccaaagagttgacacaaaaaggacttcaagtccctggctaacagaggtctcgggtttacatataagcttagagaagtccactttgttcatggcagggttcttctcaacacaaaaatgatattctccagcagtttccctttgaagcgggaacacttccaatcacctcatggattggaggttttcgtcttttgcaggacgacttcatttgataaaatctgttctatctagtatcactagcttttggtaatccatcttcagggtgccaagtaagtgtattaaggaacttgaaagtctcctctctgctttcttgtcgtctggtccagatttaagcacacgaaaggcaaaaactgcttggttggaggtttgtaaaccaataaaagaaggcgagccagatctatgcttattatctgaaacaaacaccgtgagcatcatgaaacttatatggagacttgtttgagctaaagattctctctaggctaactgggtccgagtcaacttgttggaaaataagtcgttatggttagttcgtggaagtagtaacatgggctcctggatgtggaagaagatcctaaagtatagagacaaggctactcctctacaaaaaatggaggtacgctcaggtttagaaacatctttttggtgggatatttggagctctatggggagactggttgatatttttggtcctcgtggttgtattgattgaggtattagttcttcaagctcggtggctgctgctctttcaacgcatcgtcgtcgtcatcattgtaatgaagcattgaacaaggttgaggaggagatggcttccctgaatcttcgttctactcaaacgggtcgtgatatctctttttggaaacggaacaatggtgcttttaaacactctttcagttcaaaagatattttacatgcaatacgagttcctaatcctatctgtgaattgtacaagggagtatggttccccaactccactcccaagtactcattcataacatggatagcatttcgtaatcgcctagctacgggagaaaaattagtaaagtggaataatgatgctaatgggggttgttctttctgcgatgaggctatggaaactagagagcacattttcttctcttgtccatattcatcagcagtgtggtcagcccttacaaaagatttgcttggtcaactctttacaacaagctgggaatcaatgactgccctactcacggatccaccaagaccaaaagtccatatgtttgtcttgaggtatgtttttcagctgtctattcacaccttatggagagaaaggaatggaaggcgacatggggcatcgccaatcccatcatctaagctagcaaaactgatcgataagaacgttcagaatagacttaccactttgataacatcggatctcccacgtatgaaggcagcttgcgatattggttccaaacccatgctcgttagcaagttttttctttgaatgttttccaaatctcaaatttttagacagatgttgtgtttcttttagaatgcctagtggacataggcattgtaaaaagggtgaacataatttaaaaccatagaggatgaaatatttaaggatctgcggatgaaaattttataattaaacctctctcttctgacacaccaaaaatggacgaaactacccctatccccgacacaaatctctgttgccaaataaacgatattagtgacataaaatcagagcattaattgctcggaaatctctgggtaaagatttcgaaagatacaggcggcgttatggggaagacaaagataatattagaaaaaatgattacacagatatatctcgatttgtggaagtatatgtcatatgagttccgctatttattaccacatctacttcatcgttgcccacacaaaaccaaacagagcaaccttaaaagagccctgagaaatttaatgcgctgaagaattgagtcttactgggaagtttctgggtaacatttctgagcttcattaaataacagaaggtatttatgtgtcgtcttcccgaaatccacttcttcttccatatacttagttcgataatcgtataatcgctaataaagaatttacggctatatttttcaggtacattatgacaatggtggtgcgtttggttagaggggagtggaggaaggacgaaaacggctgttacgaacacgtctcagctttagaagtattttctatgacagttcgtcttagggagaccgatggttataacaaggtggttagcgaggtaaaggaaatgttgtctatggccgttacggacgaggtcaagctaagttaccagtggccaaagtggatgatgggaccatactggacacgagctaactcaatatacatcgttgacgatgaagatatgacattattcatggctataagggcggatctcgatgaggtacatctacgagtgaaagtgatacatggaggagtgggaaagagtgtaaattattccacgagccatcttgatcttggaggcatgactgcagaggagatatcagataattactggaattccgcagaaacaaggtcaatttgggatagtgcgttaacgaggttgttgacgaagaatgtgggtgtcgttaacggtagtgcgagtgatcttcaaccaagagtgaacgagacagttgaaggaccgagaaggataaacgtaaatgcagggataaggatagaggaaccgatagacgcaacgcctcttagagcatcggtacccaagccgtccgttgacggagataaacgaaaggcatccgcaaaagagaaaggcaaaggacaaattatcgagtcaacattgcctctacctgtgctaacgactagtttaccaagtattaatatgtttgacgcagcacaagcttctgcagaagcggagtttgaggcgtttagaagaacatactttgcggaaatgtagcgaggtatgtgtgctacagagatgaccctaggaggacagcaaatgggggcagctgaggcaaccgcgggaacaaaaacggctagaacattggattatgaaggggacgttattttcatggggaggttgttcaaaaacaaagatgactgttgcacaaaattggcaattcatgcgattcgccgcaagttccactttattcgtgcgattcgccgcaagttccactttattcatgcgaaatcatgtccaaccatggtcatcgcggtctgcgtggggaacacttgcccgtggcgggtttatgcaaccaaattagtagatagtgatcggtttgaagtgagaacgaccatactgcagcacacctccagcgtggacgcaagaggcaacctctacaagcaagcgtcaacaagtaataggaaagctaatgagaacacggtatgttggggttggaagaggacctagacctaatgagttaaggaaaatgctgagacaagaattcagcctcaatgtttcgtactagaaagcgtggagagcaagaaagattgctatggacaatactatggggtcggcaatggggagttttgcattaatccaaccatacttcaaactactgatggcaacgaacccaaactcaattcccgcgctagaaacagaaacggataatttgggagttatctgttttatgtatctgttctttgcatcaaacgcgtcgatcaaggggtatgcttacatgataaaagttgttgtaatcgatgggactcacttgaggggcaggtatggaggttgtcttgtggctgcgagcactcaagatgcaaatttccaatgtttcccactagtctttggaattgttaatagtgaaaatgacgaggcgtggacctggttcatgaacaagctaagtgactttgtccctgacgacccagacctgatcttcgtctcggaccggcatacctccatctacgcaagtattagaaaagtacatattaacgcgataccaaatttattagtgagtaatttctataataaaggtaaatatattgttagtccaaatatgatatattagttaggtaacatcatcaaaagatgtgtttgattagagcatgttaatcaaatcgttagcaagtaatagggtacacggttaatgtttgtcttattatttattatatgcaggtgtatcccatgtcctcgcatgcagcttgtgtggttcatttgaaaagaaacattatcgcattctttaaaaacgaaactataggaagtctagtatcaaccacggcgagagcgtaccgcttatctgattttaacaaaatatttacggagatacgagcaatgaacggcccatgtgctgactatctaaccggaattggttttgagcattggacacgatctcattttgtaggggagggataacgtcatgacaagcaacatcgcagagtctttgaacaacgtgttgaccatgtcaagagactatccggtgatctcgatcctagaatcttggagaacaactttggtaacatggtttgcacttcgatgggaagcagctcagatggaagataacatattacctccaaagataaatgacatggttatagagaactttgaaaaaggggcaggttatggagtcttgaaaataggcgacggtctatatgaggttagagatatggtgaattgcgggtacgccgtaaatctgtgggaaagaacgtgcacatgccgccagttccagctacttaccataccatgttctcatgcaatcgctgcggcaatcagagaaggggtcaaagttaactcaatggttggggtacaccacaccgtccacaactacgtttagagtacaaagaattgattatgctagtaccagatatggcaacgctagcaccatcaccaaatgatgtcgaaggaggaaagctagcaccaccctatgtgaacaaccaccggggagaccaaggaaaagaaggatattttcacgtggtgaattcaaggtaattttaccgttacaggctaataatgtgtatatcaataacatggtgtcgggatattttacatatgttgaaagttttgtgaatttgtgatcagagaaagtcgagtaagcgctgcacacgctgccgttcagttggccacaaccgagcaacatgcaagggaccaatgacggtaactactcgaaaagacaccctacttaaatacataaaaacacccggttacctttgctaatacctaagataacacacatgaaccttaggatgaaggggaatgcaagttttttggcggagggaaaacggatggatgacgatgggcaaagaaagcctaacgtgaggttttataaataaggaaaatgacgctggtagaatatttttgtttgtagagaatgcggattctattggcctagcatgtataattatcgaagcaatacccattcgtagcgtgatgtatgaatgataacaccagttaatgtttaattatcctttagcagcattcgaccatatctaattagtaatgtagaaacttcattagacattaagatgtttcttagtaaataacatatttataagtaatagcttataaaaacatatttattgttcaagaaataaaagggtaaggtagatagtataacagaaagtaaaatatattttccaactaaactttctttcttctggagaatacttacattgttaatatattaattatcggatacctagaattagggaaagcaaacaaacaatttctcttaatatattacattcgtaataaattaattatcggatacctagaattaggggaaacaaacaatttctcttaataagtaattacatacagaaactcacttatcgagatgattctaactacttatcgagatgagtctaattacttatcgagatgagtataactatatcggtgccatatagttagatatttgtttaaatactgttaccaactttaaggcatatacttgcatagtagtaaactaatgaacaatgtagtaacttcattagacattaaacatttttttattcaacatcatattttataatattatctaggtaagaactaacttacatggtataacttacaatgataagatttggattacaagataccgagagttttgcaaaacaaccaatttgtctacataaatattgtcgtataaatgaaccataaattattgaacttaacctaaatccaacaagtaaataattaacatctttgataagtccgtactattattatcacataacttaaaatatgattaaataaatttccacaatacaagggaacaaaataagaataattaaaatcttaccgagtaattgtataattaatgtataaccaaattgttggcattagaaagtaacttgataggggtatatgagaaaaaaataaaatgtaggagataacttttacagtgacacttaacatctttaggagtcaaatttaataagcccataataaatttattagataacttaaattatgtctaaattaacacattaaaagggaaataattagaattataaaaaatccacaacaaaacaaatttaaacaaagtattaggaagggataagtttatatcgcgataataaagtacttggtggatattaggaacgaaagttatatgggaaaactaagggggcgagaatgaaggcagacacaagttttttggtttgggtttcaatgcaatcaggtgaaaactccagacagtcatccataccaccaacaatatgggcatgaatcaggaaaatggtcatcaagccagcgtcaacatggtcaatcacttgctggatgcataaagacctttcaactgagtatggagtaggtaagagctgagtcatggttggattgagagccgactgtctgaacagaataggaagcatcccggagagtggttcgagagccgtcttgaggctggcatcaatgcgcaaatgaatgttacagtcgagaaccattatcttagcacaattgagatcaacacataaggctacccaatgttttttttatcgaaatggaatggcaaatagaagtaatcaacatccgtgaaaagctgaaggcggtcaaagtcgccatcaccagctatcgcatcaaccaacgacgtagtaaactgaaaatcttgaggaacatgagctttgcaaaacttgggatacaggtggcatagttgagagataaacttggcatcaagaacatccacacgaagtttgttgccatcgacctcacctgtctggaggacatgcctgctaaattttaacaaaccgtccatcacctgcaataaggccaagacatcacaatattgtcgatgttaatataaaaattatctggtaacactgagaatagtgcgatagacgaccttgttagtaaaggtttttctgtcaacaaactccaggatatccttgttattcatagtaacatcaccgacgagagcgattgaactataaaacggtaccaaaattgttatatgtcattgataagtgggaaggacgagataagtagttaacacaaaagagacccaacaaacagtaagccgagaaaaatacctgattgctttaagtttctttaatgaacagttaaaacgctctttaggatctaaagatgcagttgcattgggagatggatgccctaccaacaacttggttttcttgtcaaactggaaccgagcatccagtttgctagaaatgtttctcttccttttactccttcgtcctccgtgattagcgacaacagaattttgggtttgcacacctgttttagattcctagtaaacgataaaaaattgtttatgcgagcgacgtaaatctataagggtaaaaccatatttatcaatcaacaaagagaatccattttaccgggatggtgagaggtcgatctctttgagaatcctattaaacgaaaacaatttgtttaaacgatagaaacaaataaaaacggttaataacagacttatcgaacaaacaaaaaaatgacattttacctgaatgcccataggtcgatctgtttgtgattctattaaacgataacaaattgtttagacaataaattcatttttatatgggtaaaacatgcatgtaaataaaataaaattttttacctacatcgcttgaggtcgatctttgttactagccaagttctgtaatagatagtaacaatattatgtaatagttaattaaatatcacggtaaaccttatatgtgtgaaaattttactaacttcgtcttctccttcggctagaagcttggggtcctatagtcagaaaatagattctgattatcaactacatgtacaaactaaattgggtttgaaacttgaaattaatcaacaacattgacgttgacagcaatcctaaccataaatcaaaaaaaaaaaaacttctcgataattcttagtcggtaacaaaaatattaactaaattacatatataatacccgaaactaataagagtaaattgttactaaattacaaatcagcatgcttaagagtgaagtattgtttacctcatcatcatcattgttaccgccaccgagaacttttccggcggagtcctttgatgcatgcaattattatccaaaaaccattcttacgacgcccacatttaccggggaaaaaataaatagctagtgaaaatgtttaccacgacatcacaattgtttccggcgccattaacctctacccccccccccttcttttgatgcctgcaatgggaataaatccatcaactttgaggccgaacaatacttagcgggtaacaaacactcttaaatatataatattaataatatacggtattgataatattgtaggattattaaataacatatcatcatgtcaaaaaccaagttatgcaacttttacctcatcgtcttcaccgtttccgtctccattagactctacaccaccatcttttgattcctgcaagtatacaccaattataaatgatgtataataattatattagcttctaaacttgaaattaaacaaaaaaaactttctcctaactcacataacccgctaaagctataaaaactaactaaatattatcagttaatttgattacctcagcatcgccatggttaccaacttcctcagggtcgacgcccatagtttttggtccctataaccaaaagaaacaaaaaaatatttaccccataacataaaaagtaacatttctagtagttagttagttactaactggtgaactaaccaaataattttctacctcacacccttgaaaagattgaccaaccgccgcctgagacccactacaatcaccagggaaacaccctttgtaatatgaagctatcacatcaacataattttcaagaccaaatcctttgtcgggagcttgggtgtcgcgattagaatctttgtcaaggcgggaagaacgacaaaccaacggacggacaggaaagagagtgtcaaagtcatcgtcttcatcaaatatgggtagaggattattacggggagcaggcacgtgtttctctttcctaatcactgcaggaacttctttcccattgttagcaggaccgtctttcccattctcatccgagaccagtctatttgaaagaaaccaatcggtaacgcctttcattattttttttgtactgggcagcgaacttagcatctaacattcaggatagcgcgcccatgtcaaccgaaacaaccgtttcatcttcatccgtcaatgattgatgggtccttcaaacccagttaaattttttgggagtctgcccttcttagaagcttttctcccacgaccacctttcgaaatagcgttccttttatgtttcttgggtgctacaacaatttcagatgggacgcaaccaccaggaaacatatcattgttgaacttggaacctttggacgccaacttcaccattgcgtcaacacgggggtcaacttcgtcaactgcccaggaaagatcttgggcgggatcaagaacgacatcgggacggatgatgggatcaacacgggtctgcgtaataacacagtaacacaaaacattaaatagtatccggtattcaatagtttatcacctgacatttagcgtcaagatctttggcgttaccgagtttaaacggaacaatctgatggggtttagttcaacagtcacttcatcagactcagacctacccgtctcttccgatacaggaccttcttgaatagcaggagcggcttgaagaacaacaagctgaaggacgtacaatagaccttgaactgctaaagatgtggttgtgagctgttctatttctctctctttgatggacttcatcgtcatctcaaaagtcaaacaaccccaaggataattaagaaacgaagttaggttttcggacatctcggcgtgctctttgacaattttcgaataatgtgatgttggcaggagatatccgtcaaagagcgctgataacactatattttactcattttaggcttgtatttatcatcatttatcttagtgattactcattgtttcatatcattttgcatcacatttagcttattttgcacacttaggcatttaggatcatcttgcatacatattgcatattttggtgtgttttcaggtgcagaaggagcttacaaggattctactcgaccctctactctatccaaccaggagggaagcagcggagcattctactcgaccagttcactcgatccaggcagcctcaaaggaagcagcagatcgatctactcacccctcctactcgatcctctactcgacccatttactcgaccaagggcgacctactctacaagacttgttgatctatcaaagcttcttcggatcctcctcattccccactcaaccagacatctgagcatacagataggagaggaagaagcatctactcgagcaattgatcactcggatcatggaggcaaaggcgcagactttgcagcaccttgtttactcgatccccaagatcgagcaatcgcccaaaccgcccaaaccgcctcaagtcttttgtcttctagtgaatctagggttttcaacattttagtataaatagatcgctttggggtttgtccaaaggatctagcttttatctcttagtttttgcttgtgttcttgaatcttaaaaccttaattactcttaatctattttgtttttgcatttagttctttgagtagagttgtttaacttgtttagatccacattttggtataatttcagtaatttctgggtttgtgttcttgagtatgttgctttagtagtgattagggttcttgaggatggattagattagggtaatctctaggttagtcaggtggttatgattaggttagatcccttttggattcgttggcccctatgcggttttcgctggctaatgtggcaattcgaccttaggtatccagcgtccaaaagatgttcaaatggatgactgatctacgaattccagagatttgtagactctagaccaagagattggctagactgcttattgactttggtagattgttgcttaaaccctcctctcctatgtttcatcaacgagagttgagattaggaagtggtagagttatgggagtctctgtcacgagagtggattgacccggtttttgaatctatcgtctagggtatctgcctttcgcctgttagccacctgatgaaccctagagttgcccttatcaatgaatccatccttaggacttctattcttcttagatttatttgtatttactcactgtttgcacttttatttaccagttatttgtgtcacctcttgattgcattttagttcttaaatttgttgcatgttggttctactcgacccaatgatcaggaagggcttttaagttcttatttttgttgtttaaatcctgacctaggattgttactagaaaccaaccatctctataatctggcttgacttagttgcttttgtacacatcttgattgctagcaataacagtagactggattgacaccccctatagatgcatcgacatgttagtgtttaaagggaattgaactgaactgaacctcacttcagcaaataagtaggcctaaaaaacctacttatcaatttgacgctgttgctaattcattgttgcattgttacattcaagatatcagaaaaagttaagatcaagttcttttacatttatcaagttactaactcttattttcgtctgtttgtttttgtgatataggtactaatctttgtgcatgcaaactcgatccaaagtttctgcacacctactaccattcaaagacaggattgacaaattacctcgtgagttacaagaaaccaaagcaaaggcagcctgtgatcagcaaagaccagctgctatggatcaacagaacataccagttgatgttcaagatccacctaatgttgatcaaccaagaaacattggtgctggtgtgccccaagtaatcataaccatagacaagggatagtgccaccaccagttcagaacaacaactttgagatcaagagttgtcttatctccatgatccaaggaaacaaatttcatggtttacctatggaagatcttctggaccatcttgacagctttgataggctctgtggccttaccaaaatcaatggtgtcactgaagatatgtttaagctcagactatttcccttctctttgggagataaggcacaccactgggagaagactctacccccagactcgatcagctcttgggatgattgtaagaaagcttttcttgccaagttcttctctaatgctcgcacagctagattgaggaacaagatctcaggcttcacacagaaaaacaatgaaactttctatgaagcttgggagaggtttaaaagctacaccactcagtgtccccatcacggtttcaagaaagcttcattattgagcacactctacagaggagctttaccaaagatcagaatgctactcgacactgcctcaaatggaaacttcctgaacaaggaagtagcagaaggatgggagttggtcgaaaatctagcacaatctgatgggtgctacaatgaagactatgatcgctcagtgagaggaactggaggcagtgaagataaacagagtaaagatatcaaggctctgaatgaaaagctagacaagctattgatggctcagcagaagcagatacactacatcactaatgaagagcatttccaaatgcaagaaggggggaatgatcaaactgaagagttgtgctacattcagaaccaatgagggttccacaagggctacaactactacaagcccaacccaaacctctcctacagaagcgctaatgtagccaacccccaagatcaagtgtatccaccacaacaaaataagtctaagccatttgttcagtataaccaaggttatgtccctaaacaacagtttaatggaggctaccaacagcagaatccaccatcagggatcactaaacaaccacaacaagcaccagcagctcaagatcctgaaattaagcaacttagtcaacagatcattcaaggacaagctactggagctatggcttttgacaagaagataactgaattacacaacaagattgattgttctttcaacgatctaaatgtcaagttcgaaactctgaattccaaaatcaagtatctggagagtcaatttgcatcaacctctgctctgaagcatcctcaacaacttccagggaaagcagttcagaatcctaaggactatgctactacaaatgctatcaccatccaccaagaagatgagtctccaccaggtcatcagactccccatactgaggacaatatgattcaaaaaggggggggattcaacttaaattgatgcaccttccacccagcaattcatatggactatagagcacatacctttgctgaatactcaccactttgaaaaacatttcaaaagagaaaaactcaagaaggatcagaatcaagaaatgattagtagagtcatcacttaagaaacttacaagaagaaagtcatccaagaaaagcttgatgatcccggttcattcactctgccatgctctctaggaccattgacattcaataggtgcctttttgatttgggagcatctgttagccatatgcctctctctacagctaaaaggctagggatcatggaatacaagttcttctacttagcttttctcttagctgatggttctgttgcatatcctcatggtctaatagaaaatctgcctatcaagattggaaatgttgagatacctacagattttgtggtattggacgtagatgaagaaggcaaggatcccctgatcctagccagaccattcttagcttcagctagagcagtcatagatgtcaggaatggaaaaattgatctaaaccttgaaaaaggtatcaagatgagattggacatcagcaaggcttcagggaaatcaactataggaggtaagagttttgggatttaggacatagatgttgatgaagaaacagaagctggaaccctaccaagagttaactatacttctcaactcagcaagctgaagagaaattttgaccacaagaagagagcaatagaagggttagctcagactgaagatcctacaaaagatgactggtatgagatgagaaaaaaatttaaatggcaaagaagagtcatagagggattatcttcaagggtgatgaagctgaaagatcaactatggatgtttgaaaaaagagttaataagttttcaatgagtattgatccaaagaagatgggaactgcactagctatcaaagaggacgaagatttcacaacagaatggtttgcaccagaagataaaaaagaatttcacttagaggaaagaagcttggagaggaagttgttgagtgaggaggaaatccctattccgacttattctccaggagtgcttaaaccgcccactaacccctctactgaagaagaacacttgattcttgattctgttgctgaagaactcctggactcatgatagaatacaaagctaaagaggataccattggggagctaacttacaagatggaagaactgaaccatgcaatcttggaacttgaagaaatggttaaaggctaccccagttttgaaattgaggattggtcaaaggaacctggttcagaagaagaagactactctgctgatcaaaaggaagcttattttgaagaaaaatcaaatgagtactcatcctaccatatgtcaagggggaatgcagagtatgattcatgcacttaagattcaaccactgaagatgaggacttctctgctcctctcttcaaccttttttctgactaagccttgtaagagtcaagcttagtgacttaaaacaagctcacttgggaggaagtcccatgtctatccatgtatataaatttatatttcccttgttatttttgatgtttttgtttaagtgtttcaggtttatttcattgaccctaaggaagtcaatgatcgagtaaattcaaaccaagtcaactaagatctcaaccgttgatcgagtaagtgaggaaggatgttttgagccgtgcgattgaatgactaaatgtgggaaatcacgctcaccgtttgatcgagtgatcaagggataagcattctccaccgtttgattaactattgcgcacttcaagaggatgctcgatccttcactcgagcttgaatgattcggcgaccaaggagtgatgttgagtggcccacttgttccccttcacttcattactcaacggacaaaccatttacccatgcccctcaccatttccaactcgcttttactatccttccaaagagaatcccaagaccatcatcctccacccattgaaatcgccaaacacttttgaaactctctctttcatcatctcattttcgcaaactctctcacaaagcttcaaaagtttcattccaaactctccctatcactcttcacgaattcgttctcacttcaccatatttcaccaaagttactcgatcacttccaagtccatcctcaaatttttgatcggtttttaagctcaatttccatcaccaaaaaccgaatcctttccagcttgatacctcttggagagtcgtttttgattgctttgttgaatctcaccaccaatctccatggattcaagaaggaagagttcatcttgggcaagaagatcctctgttgataatgaagaagttgaggcttttgacatgagtggcatgactgaacgccaaattcgccaagctcgctgtactcaaagatcaagtttgatccaaggtggaagttcaagccgctcagccatgcaaagagaagaagtagctcggggaaagagggtcgttgaggctgaagaagaacaccatgaagaggcagcctttgaagatgcggtttctgaggaagagggtgagatcatcggggatgatacaccagcccctgttgggagaagaaaccggccaaggaggaagagagagccaaccccaagcgagtactatcaatacttgaagaagttgaagtttgagggaactagataccctcataaggaaacgatgcaagagcttggtatttgtggtgatgtagaatacttgatggaattggccaatcttgcaacgttcatgagctgccaatgtgggggatttaaagaggagagctgccaactccttgcaaccctcaaggtacacttctgtgttgatgattcggagaaagaagaaagaggggtcttggttacataactttcaaggttagggatgtcgagtatactcttgatattcgccatgttgataccatttttgggtttccaagtggagaaggaatccgccaagactaagaccaagatgagctaaaatctctttggaagacaatcgccggctcaaagccctactcgccagccaagagcaagagttcttcaattcgaagtcccgtgattagatacctccaccaatgcatcgccaacaccctctttccaaataagaccaccgtatttgttagcgaagaagagttatgcatgattgaccaatctttggtcttcattctgaaagagacaaaagatgggagaaagatggcgggtgatagagcaaacactttgctgagtgttgttcttttggatcacctattgagctacagagagtatgctgcaactatccatcgctcgggaattcgcggaagtctttgtgttggtggtctcttaacgctaagactgggagctgtggggatgcaattcggaacccctgacgtgttccccaagttcattgaccttgactatctcaaggggaaggattttcttgacaagacaactccggcggatcactatctcttcaagttcaaccatccggagcttggaccctctttgttacccctaccatgcgagaattgaaccttagtgaagacaagacgcaacatcaatttcatgccatctcttctgtcctgaacatcgacatcggaggagccagagaagatgaacaagagtatactcaagtcgactatgagcaacaagagtattatactaaggctgactatgagcagcaagtcgaattcgagcaacatagcgagcaaccggagcaagagaccaacaaattcgagcaagctcattatgactgaccaaggaggagatgagatagctgaagttcacaagaagctcggagtgcttgaagagcttgggaaccttcacagcaaaacgatgaagggtttcaagaagaagatgagaacaatgaagaagtcgctgaagagtatggctgctcaaatcaaggacttccagagcaagccaaagccaccgtcttccacccacgaagtaagaagaagcggttccacgatagtgtgatgttggcaggagatatccgtcaacgagcgctgataacactgtattttacttattttaggcttgtatttatcatcatttagcttagtgatcactcattgtttcatatcatttgcatcacatttagcttattttgcacacttaggcatttaggatcatcttgcatacatattgcatgttttggtgtgttttcaggtgcaaaaggagcttacaaggattcaactcgaccctctactctacccaaccaggagggaagcagtagagcattctactcgaccagttcagtcgatccaggcagccatagaggaggaagcaattcactcgacccacttactcgatcaaggcagccttagagaaagcagcagatcgatttactcgcccctcctatcgatcctctactcgacccatttactcgaccaagggcgacctactctacaagacttgttgatctattgttgatctatcaaagcgtcttcggatcctcctcattccccactcaaccagacatctgagcatacgagtacgagaggaaaaagtatctacacgaccaattgatcactcggagcatggaggcaaaggcgcagactttgcagcaccctgtttactcgatccccaagatcgagcaatcgcccaaaccgcccaaaccgcccaaaccgcctcaagtcttttgtcttctagtgaatctagggttttcaacattttagtataaatagatcactttggggtttgtccaaaggatctagcttttatctcttagtttttgcttgtgttcttgaatcttaaaaccttaattactcttaatctattttgtttttgcatttagttctttgagtagagttgtttaacttgtttagatccacattttggtatgatttcagtaatttctgggtttgtgttcttgagtatgttgctttagtagtgattagggttcttgaggatggattagattaggataatctctaggttagtcaggtggttatgattaggttagatcccttttggattcgttggcccctatgcggttttcgctggctaatgtggcaattcgaccttaggtatccagcgtccaaaagacgttcaaatggatgactgatctacgaattctagagatttgtagactctagaccaagagattggctagactgcttattgactttggtagattattgcttaaaccctagtctgctatgtttcatcaacgagagttgagattaggaagtggtagagttatgggggtctctgtcacgagagtggattgacccggttttttaatctatcgtctagggtatctgcctttcgcctgttagccacctgatgaaccctagagttgcccttatcaatagatccatccttaggacttctattcttcttagatttatttgtatttacccgctggttgcacttttatttaccagttatttgtgtcacctcttgattgcattttagttcttaaatttgttgcatgttggttctactcgacccaatgatcaggaagggcttttaagttcttatttttgttgtttgaatcctgacctaggattgttactagaaaccaaccatctctataatctggcttgacttagttgcttctgtacacatcttgattgctagcaataacagtggactggattgagacccctatagctgcatcgacatattagtgtttaagggaattgaactgaactgaacctcacttcagcaaataagtaggcctaaaaaacctacttatcaagcgcgagaacgacatactgaatccgcaatgaagggtcatcagtaactttcttcttaagcattgtgattacacgggcaacagtgacatccgactcaagtccgaataaagtgctataaaacggaatctctttcccagcggtccccttcttcttttttttctgaacagcaagatattagccacaagcaagaccagttacgagatgaaactcatagagagaaaatcgaacaggcgtaccagcataaacaacccagatctcgtttgatttgttgatatccaactgtcgcacaagaaaatatagaccggaagtgacagaccaggccggtttgtttggaaatttcaacagcccaccaaggggagaatctctgataagctggatttcgttatcctctaacgaatcaatgataccgtgaagagtcttcatcttgttgtaaacattggccctttctccaagaggttcttcgccagcagagattagacgattagggaattcaagatccatcatctgcatacccatgaaataaatatgcgaattgaataggtaatcgttgcactatatttgagatttaatggcgaacttacaagaataatggaggaaaaagcagcacttcaatcggagagtcgaaagcaaaacggagcaaaaaaccagaaaccacatagagaaatgagagagatgagggtaaatgtaatgagatgaagcggttgcaaaataaacaaaaaaacacaactctttgtttcgcaccgttctcatgtttattatcacacctattcccaaaaaatctcggaaaccaaatctcgtagagagatttgatttctataggttctgacacacggtactgtttagcatatctcacgctttattcccgataggcgggtaggggttaataggtcataatttcggaacatacactttataaatagtgtcatattgtgtcatttaaataatgagtcttccatggtcatcaattgtagaaatcctcaatttgaaaaataataatcttacattcaactatgaatcttcgttatttcctccatttaatatctatggtgaatcgaataatttcatttacttttccttcttttattttagtagtcaaactatcatcttaattacaaatctactatcaaggttacatatattattaaaaatcccctatataaaaacattttaaaaaataaaccttacccttaaatgttattaacaagaatgtcatgttgatgtgtcgtggtaagaaagctccataatccaattaattatttacccttcagttactagagcatttatatcaatttgtcattagtataactaccatatattttcactcaactaattaaacaaaattataatttattatccaattaacaaaatcaaatacctaacatgagtaatctcaataatcattaatataaaaccctttaaaatatataattttgaacaatatatcaatcaaaatagcatatgacgacttacaatatatgataagcatgtttatatctgtatgtatatattgtaacatatacataaattatatacccttcagttactagaatatttacatcaatttgccattagtataactatcacatattttcactcaactaattaaacaaaattacaatttattatccaattaacaaaagcgaacacctaacatgagtaatcttaataattattaacacaaacgctttaaaatatacaattttgaacaatatatcaatcaaattatcatatgactacttacaatatatgataagcatgtttatgtgtgtatgtatatattgtaacatatacataaacgattttttgtatacttattataaacattcatacgttatcattagtcatattaatcataattatatatattttctgttgtatataatggataaaattgtatatatctgaaacaaatatcttattatatcatttcaaacatattatatttttgtgaagataaagtgaaataacatgcctaagaaattctaaaatttaaaacttattatatataaaagaaaaaattatataaaattcacagtttagattctcctccgatttaatctttaatccaattatctttttatttgattatagagaattttaacaaacctcctaaatcaaaagatttcaaaaatattaaatcactttttcaggttcaatgatttcacgggtagaacgtattctgacacgaaataaacgtaaatttaaataaaacaaaaaactttagttaaatattttgttgtatacaaacaaatattatatctcacataatgtttttacacataataatttatttcaatcgtttaatcccacacatagtgtgggttcttatctaatatgcttttatacacaatcatatgttttcctagaaaatgcatgtttttttatcaccaccacctacaagaacattataccaaattctgacgaaaattatcttgaccatgtaatgaaatacagtgcgtgtgtacgactcaattatgcgcttcaactaggtaaaatgttaagttataaaaaaattccgatttttgtattgatttcgttgagtgttctttgcaaatgtggcttaataataataaaaaaatagttgggtcacaggttttaaatgcaaaaaagtttagacatgactattacccatatttattaatgcaaactcataattatatattgtaatattgattatatacttacatgtcaataatattgagagaaaaacaaaaactgatacaataaaatttatatggaagaagatgatgcttgagaagttttgattttgttgttttacaaagtttgaaagcgagaaaaatagtgatagtggtaagaaatttatgtgtgattttcctattacattaacttgaatttggatttgaaagaaaccaacactgtattgggacaaaaaatctgcaaattctaagtttagaaagtgtgtagttggaaattctttttatctttgtagatataaatgatcttttacttccatttatgtggttctgatgaatttatgatgtatgtatgaagatttcttgtatttattatgattcatgagtgtagatataaagaagaagaatggaaatctgaactagataaaggaagttttggtcggtgtgtatgtattaaagaaaacaagaaatacacagatttggcaggtatattatgtgaggttttcagtttgaattccactgaatgcaatcctataattagttacgggatgccggaaaatatgtctatgatgatagaaagtaatcgccctcatgtctacattgacaatcaaatcagcttggatacattttttttgattcgtaatgcggatcctagtgtaaacttgtttgtatctttttgtactactgacaatggatgagtgaatagtttggctacaaagggaggccatgatgctgtagctgggttaaggagtgaaaatacaccaaaaaccatggtagaggcttcaaatgtagatgcaactagtgaggacgttgatgaataagaagacgtagagaaggataaaacagatgaaggtgaagaggatgaggataagtaaaggatggggatcataagtttgacaaaaaatttaatgtacaatgaaccccaaaaacattttaaaaataaactttacccttacgtgttataaacaaaaaatgtcatgctgacgtgttgcgctgaaaaagtttcatagcccaattaattatttgtccttcacttattagaatatttacatcaatttgccattagtataaataccacatattttcattcaactaattaaaaaaattacaatttattatccaattaacaaaatcgaacacctaacatgagtaattttaataattattaacacaagaccatttaaaaaatatacaaatttgaactgacagaaaactaacgggatatccgtcagttatgacattataagaaataaaattttattcttcttcttcactttgctttctctcccaaaaatgaaaaatacgcagatttgccgccgatatcatcttcccgtcgtaatagccggaaaactcacctcatatctcagatacgcatctaacttaggccatttcatctccaatctccctttatgatgtaaattatcacttccacttttaattttctaagtttttgatagatggtgaattggaatctaaatctgttagaattgaataggatatggattagtatatgtccgattttgaatctggatttgttagaatttgtgttagattagttttttctatatgatttcataatttttgcaaaatttgtgttgtctattatatatgtgtgagatttgttttagagaaagttttatataattttattatatgattgttgtttttctatagcccatctttaaattttttttaaaatattttataaagactattagagatggcatggtgacttcccccgaattaggacgagagaagatgaacgaaattatttatgaggtaatattttgtctctaaaatattttaatatgctttacttcaagttgtttaactcattttttttatttgacttgtaggaaccccataaatccaagggacgtattttgggttaggaaatttttcctaaatatcatcttcttctcgttcattgggtttctcatatgccccatctttcgattatcatcaagctatggaagaaaagaatgaacggattgcggttttagagaaagaaatggaagaacagaaagcagcaatggaagaacagaaagaggagaacatgagagggatgcatagtacaagaagagagacgagtagttggcaacgttcatgaatgagatgcgcttaaacttgccattatttaaggattttccctctttgttatttatggatttaaaatgtttttactaataattatgttgttctgaatttaaatatttatgaaattactaaatttaaaagttttaaatatatattattttgaaaatttaatcaattttaattatgtaaaattttatatagaaaaaataataagacccattggtaataacggactttttacgtaacttccattagtaatccgtcggtaatgaaaaaatattttttcgtatattccctcagtaatccgtcggtaataacagagttttttcgtatattacctcagtaattcgtcggttatgacggataaaatcgaaaagtatgtttccgataaactgttggtattccctcgaaaaccatcatcgacggattatcaatggctatgaaccgacggagtttcgatggattaactgacgaatgctgctgtcactaatccgtcggtaattgaccaattggaaatccgtcggtaattgaccaattgaaaatccgtcaataatccgtcaataatccgtcattacgaatggaatttcttaaccgacgctttagaaccaacaaacgcatctgttagttttcccttgagattgcgactcttaaatactattaagctacgattaaaatggtgagaggagcccaacagaaacatacatgtcatattggaagattaagaccacgagaccaagaattgaagaaattactacgtcggttgcaagtgttttctaggtttcatcattaatatcaataagattctttgtttgagtcatcatatggaataaagctttgcctttatagcattcataaaaaagcattaggccgaaaacacatcaacacgaatcatacaatggtgtcatcacttctaaccattattccatttgatgatctccaacatgaacccttttgattcaaatgatgaaacctacaaccatatgcaacatctccgccgttaatggtctcaccgcttcgaaccatttagacatttgatgaatccaaaaaggactgagttctaatggtttatgatttgcaagtacaagaagagagtaaagattaccctctatttaaaggcacaattaggatatatgatgtatccttgttgaggagaagaatgatggccgttagattcatctctaacgtctaattttgagtcatttgaaaactctagatttttttctatgttattcaacatatcttttttttttgtagggttattcaacatatcttagactagcaatttatgtttaacctaaatgtaaaatatctttactttctctttttaaataatattttctacatatatgtagtttattcaaactatttttatgaagttcaataaatttatatatattacactaaaagtattaagtattatacccaatgattaaattttaaatatgacttcagaaatttgtcaatataaatatatatgaaaattttattattaactttgactacgagttttccagacatacttgaacgggcttcatagcaaattcaatcggttatattaatttgtgataccactacaacatgttatgatacatcatctatgaatgtgaagctcttcttggagttcttttccctatagccatggacttgtccttattcataaagatcaatttgacttgacatatatgacaaaacaaatttaatggatattcatgtttcctgcaacaaaactaaagaaatgaagatagtaaggtcacacaatattttgaagacaattgggttaagatctttaaactggaatggagttaaaacacataaagtgggataagaagatgttatgaatgtttgtatgaaggataattattattgaatacagagtttgaaatatatacacatacaactattgctagggtatcctaagaagattaattacatgatctaatttacataaatagaagatatgattgatcaaatcatttgatatgattgatccttaatatgccccctcaagatggaggggcttggcgtaactccaatcttgctcgataaatttgtaaatgtggcgcgggaaagtggtttggttagtgcatcagccaactgatcatttgtagaaacatgaaccacccatagcgctcccatttgaacttgatttctaagaaagtgatagtccaaagcaatgtgtttcatccttgagtgaaaaactgggtttgcacacaaatatgtttcttcaacattatcacaataaacagttggagcactagataagacaattccaagctcctgaagtaacaaacatacccaacgaatctctatggaggcatttgcaacagacctatactcaacctctgttgatgatctcgccacacctctttgctttttggaggaccaagatattggattgtgacctaggtaaacaacataagcatttgtggaaacatagtcatccgtatctccagcctaatccgcgtttgaatatgcatgaagtgagagtggattgttgcgtttgagaagtataccatgagttggcgtaccatggagatagcgaagaagtctcttaacagcttgccaatgttctgaagttggagaatgcatgaattgtgaaaacttatttaccgcataggagatgtcgggtcgggtgaaagctaagtattgaagactacccactacacttcgatactcagtaggatctgatagccgaacaccagaatgaagagagagctttggtgttaatgccgttggtgtgtgatacggttcaccaatcctattaccgcaaaaggccacgtcaggagaacgaagctgagttggaagctgtcgtggaagcgaagggaaaagaaggagagaaagactccaagtgagaaggagggtttcctgagaagacttgaagtataaataagccattgtggcatttatttccttttatgcttttatctgggtttttcttgagatttattgttagagagagattgtcccggtgatgtgccagaagagagtctctatgttgagctctgtgtaatcgttactggtgagagtggtgaacgattgtatttctctttaaccgatcgattatctcgttgataatcgatcaaatttatctcagttttcaaatcatactttcaataaaagctaatatctctttattcatcattttgttgagttttgagttgatcgatcatcttaaatctatcattggtgcgatgatctcggttcgttgtaagtcgcgatggttgtaggtgaaggatcggagctgtatgaggaagacagctatggcggtgtgggtgttgagaacgatatatcatttttgaagggtggatacaaacgtatgaatgaaatgcagctggctcaaggtgagaagctggaatcgatggacatattgttgaaaacggtggctgcaacgttggaaaggatggagatcaatgctggaaaacaaactgatcgaccagatccttctcaaaattccccacagagtatgattaactcagcgtttcaacaacgcggatctggtgagtataattttgtgttggataatcgtgctagcttgctgcgcaaaatagagatgcctgtgtttgatggatctcagccgtatgagtggttttctaaggtggagcgtttctttcgtgtgggtcgttacgccgatcatgagaagcttgatttggtggcgttgagtttggagggtgatgttttgaaatggtttaattgggaggttgatcggtgtgagttttgttcttgagttgagttccgtcaacgtttgttcttgtgttttggtaaatctaatgaagatgatccgggaaatcgggtatttgcgattacacaacatggcacagtggctgagtatgtgacttaatttgaggatttatcacctcaagtacctggttttcatgactttcatttggagagaattttttataatgggttgaagcaggagatgaaagaggtgcttaagatgaaggagtcgcgggtttacctcatcagaaggcagcaatgttgaggatggaagccagctctttctttcaacttatcagtgagatttttttttacaggttggtcctgtgaagtcctttacaccaaggcaagctactgtgtttcagcagaacaaacctctgttgctaaccagtggatctactccgggaggttcacaaccagtgggattgcgatcgctgttaccaacatgacagcgagatacatctgaggagttggatgttatgcgtgttaagggtatctgtttcaagtgtaaagggaagtactctcgaggctatgtgtgtcctcttaaagaattgcagattcttacaattgtggatggtttggaattggaagttttggacgatgagatgctggttgttgacactgaacttatggaagttcaagaaccaccagcttgtcaatccttatctttcaactcctttttggggttacactcaccacgcacaacaaaacttgttggcgtatttggcaagagcagagtagtgatattgttggatttaggagcttctcacaatattatcactcctactgtggctgccaaacttaagttgcaattgtacaaggctagagggttagatggcatgcttggaaatggtgtttcagtgcatggctctagcatttgtaaagcggtacagtttcagctgagtggtgtggattttcaaagtgatttcattgctctggatttaggaggtgtggatattattttgggtatgcaatagttagtcacattgggtaagtgtgaagtggattagaaattacaagagtggtggtttacttataacgggaaggctgtgcatttggttggagatcagcttttacacactcctcctctatcgttaagagctgtggaagcaccattgcctgttgtggagtctttttcaccggatgatgtggttactcctttggtgaataacacggtgattactcatcacacacaagcgatagcattggttttgcagaagtttgcattagtgtttaagcttctggttggtttacctcctgtccaaggacatgagcacactattactcttcaaccaggagtacatgccattactgtcaagacttatcgttgccctcatgcaactaaagttatcatggagaagatggttgaggacatgttagctgcgggtatcatcaggccaagtaacaaccctttttccagtcctgttcttttggtaaaaaagaaggacgtttcttggagattttgtgtggattacagggctcttaacagggctactattcttgacaagttccctatccctgtcatagatcaactattggatgagttacatggtgcagtaattttctctaagattgatttgcaagcaggttatcatcaaatacgggaagatgttatagcgaagacagcatttcatactttggaaggtcactatgaatttttggtcatgccttttggcttgacaaatgcaccagccacatttcagtcacaaatgaacaagatattttctccttacttaagacgttttgttttggtttgctttgacgatattctggtgtatagtcgaacagttgaagagcatgctcatcatttgagtttggttctgaagttgttagacgagaatcaaatgtttgctaactagaagaagtgctcttttggagttccacaggtggagtatttagggcacattatctgtgccaatggtgtggcaactgagacaacaaaaactgaagctatggccaattggcatgttcctgttaatattaagcagctgaggggttttctgggactgacaggatattacaggaagtttgtgcagggttatggttaactacaagaaaacacgattataacgactacaattttagtcgcaaagtagtcgtaaatcgatagattacgactgttttacgactaatcactgttatcgcaaatccacagtcgctaaacgcaatagtcgtaattttagtcgccaatttacgactaagttacgacaaactcatgtagtcgtaatgttagtcgtaaaatagtcgctatctgttacgactatgttacgactaagttacgattaaactatatgaactttcgattattgtagggacagtctgcgactatttaccgactaatatgtgactgagtaacgactacggttttagacaaaagaaaaaaatgtcatttttatttctgatttatattgcttaatcctgtaatgctttaacaactattcttatctaaatttcaaaatcaaactcatgattcaaacaaacacgaaattcattaatattgtaaccaaaataaagattcaatttacactaaattctcaaaatacaattcaacatacactaaattctcaaaagactacaagttcatgctagtttgtaaagagggagaagtaacttaagaagtagttggagatgagataggctctgtagttgattcaggtgaatgagagtcgatgaagtggagaaaggccagatcagtttggcgcaaatacttctcaaccaaggacaagtgtgccaacttgtccttctgctcagctacagccttggtttgctcttcctcacgttttgcattatgagcagcttgctcttcaagtttttgttgagcttccttcagttgcacttgcaatgccacgaaagaagaagattctcctaaatgtttgcgttttccagtgactagatccggaagattctccttaagactgcccagtccataatagtttcctcgtgaatctgtctctgtggactgtgaaaagaaagagacaaacaattactaaagagcatgagaatatgcagaccataattatgaaaatgtaaactttacctgtaggaagatgagagtacagtcatctgatgtgagctcccgaggtcatgattccccgtctgaaacatttgaagtctctgcctccatttcagaaactttctcctgcaatttctgctcatagttctttgcaatcttctcagccttcttatcgacataagtgccatctggtttggtatgcgtcttgacaaagacctcaccaatacccactgtccttcctaattcctcttcctgcaatgttaaaaatgaacaaggactaagacaacatctaaacttgcaatggactatgtaaaacaaataacagagagaacaagaagttatttaccatttctgattggatttgttgataggacgtcggccctgataaatggatgtgaggaccgagcccattacggtcagacatgcgagccttggaatatgtcagactctttgcaattgcttcttcagtatcccagtatgcacacatcgtttcccagatatgggaatcaatgatccatttaggacactcttgactagtcctcacagtgctaatcatatctttcatccgtctttgacatatatcttcaaaatagtactgaactgttcctgtaatcaaaggatcccaatggtgtattttctacaaatacaaagacatgatgttagtgaagataattaacagctaaacatttaagtgaatgcaagagaaaaaactataccgcaaactcgagaaagtatctttctcgtcgatcccgtggaacacatgaccagctatagaagacaccatcaaatttgtttgtccatactctagtaatctttcgaatcaacctcgaagatgtgtcacgagtaaacctgcaaagacatgacaagaatacacagatcaaatgcataagacactcacacatttaaactagagatcacaatgcactaacacattaaaaccatagatcataattggcttacacatcataaccagacgcatgctagagatcacaatagactcacacaacttacacaactaagtttaacacttaacattacacaatacactcggactcttattactaagcagacacatcacaatacacttacactcttatcacttacacaactaaagtagacacttaacattacacattacacaatacactaacacacttacaaaactaaaccaaacacttacacaactaaactagacacttcacatctaaactagataccgcaaactaatacacttacactaatacacttacacaatacacttacacaatacactcggactctaatcaatacattgttaagaaagaaacaagacaatatcaaaaccaaacatcaaaaccaattctccaatcaaaaccagacatcaaaaccaaaatataacaagtaaccaaaacacttcactaaatcttagcacaactagctaatgagctaatgaggtaaaagagaaagaaacacataaaagcatggagactgagctaaacataaaccctaactagaacctctttacacaaaagcaatcaaaacaagttccagaggttatcaaagcatggagactcctcaagtgttatcaacgaccactcgatcattctcctatcaaaacaagctccagaggttcaaaactcaatgaatcttaactccaacactcgatttgtcatttactgtcttaactcaaatttcaaagctaatgttcggaaagaaacaaacaaacttcatcgatttccattacactcggactcttaggacttacacaactaaactagacacttcacaatacactcacacacatcaatacactcggactctaatcaatacattcacacatcaaaaccagacacatcaactaaatgttaagaaataaaaaataaaacacacttaattctaaactagagaccaaccacctaaataatattggaaaaccagataaaacgatgactaaccaagttgttttttctatcggtatgggagaaagaacggtggtccacgcctcacgaccaggaacttgaagaatgtcgtttagagcctttacgttatcggcttggagttccggtaacacggaactgacaggttcttggaagttgttaccttgggaagatggttgacttgcatgatagttctgaattggagaacttggagggtcatgttgtggagtcgatcaaaacttcttctgatgaaagaggtgcagggagatcatgattcacggagttctggaaaagaacttgaggaggtggatagtcggagactcgtggagctgctgaccttgcttgttggggttgaactcggactcgcccttgggaagactaagcaggaggaatctcggccgcgggggtgaagttgtattgactagctaaagggtttcttttcacagtagtgggtttagaggctccgggtctctgtgaaaaatttggatcggcttttctcttccttcctcgcttagctagaggcatcgagacagagattgagagagattggaagagagtgagagagattggaagagagtgagagagatttagggattcgaagagagtgagagagattggaagagagatcgagagaggctgaatcgagagaggtaagaaaattagggtttttcttaataacattggatttcttctggcttttactgggccaagtcttaatattgtttgggtagcgaaaattttcaagggtttgaattaagcctaatatactttattatagtcgcaaattagtcggtaatcagtcgcacaatattttaaaagtttgaaaatcataggtcttcataactttggtccataatatttgctagtatccaaaatttgatttttatgtataccaatataaagaatatatatgtgattaacatttcataccaaacaaattattcaatcactatatatccctttttaattaattaattagagtgaataatctatatatatatatatatatatatatatatatatacattgtacaattttttaaagagagcattttcaaaataaagctttaaaataaaatctgttagaatgtttacttgtattttgataattacaaaactaatagtctgaatatcataataaaaattaattcattatatttacaattttaacgacttatatgcgactattgtttccccgacttacttatgtgttaaataacgactacagtaacgactatgtgttagagtcgccatttagcgactatataacgttgtttttagtttagtcgtaaaacagtcgctaaatagtccttactttgtcgctaaatttgacgactacataaacagtcgccatgtatagtcgttataacctgttttcttgtagtgtaaagaaggataaatttcagtggtctgaggcaactcaacaagcctttgaacagttgaaacaggtgatggtctctgcacctgttttgagcttaccggattttacaaaagtttttatttttgaatcatatgctttagagacaggagtagaagcagctctgttgcaggacaaacgacctattgcatattttagtcttggacttactgcaagggaacaactaaagtcggcgtatgagagggaattaatggcaattgtgatggctgtgttaaaatggaaacattatttactgggaaagaagtttatcgttcatacagatcagagaagtttaaagtttttactggaacaaagaggggttaacatggagtatcagcgttggttgactcgcttattagggcatgatatggagattatgtacaaaccaggtgttgaaaataaagcggcacatgggttgtctagaattccacagcggttcagttacaggagttatattcggagattgcagatgatccgattatacaagctctgattttacaagtacaacagaattctaatggtttgcgacattatgcgttggtagatgggaagttgtggtacaagcgacggttgttgattccaaagacatcaaagtttattcccttattgctacacgagtttcatgacagtaagatgggggtcatggtggggtacttaagacggttaagcgaattcaagagttatttcatttggaagggatatagaagatggtccagaagtatgtttcagaatacagaggtgtggactgatttattcaaatggtcgagtactgatatggttcaaattacctagaactactctctcaaataagagatcaattgcagtattttaggatcgaattcacggagttcttttgttcaaaaagtgagttaaatgtcgagattaagctagcagggtataagtgaaatagtaagaaaacaaaataagaaaacagcagattgattgggttataaacgattaggaaaagagctaggaaacaaggtattctcaggaaactattggttagtagatctaatgaaagctaggttgttatcgaaccattcttaaactcaaactctaattttgaaataaccggtgggcgtgccgtaaaactccctatatctatagctaataataaccggagaagccgagaaactatcaacctaaatatgcatttttaatgagtttaattgttcatcttagtagataggccaattcttattacacacctataaaccagactcatcaaataatagatccaactacagatacctatggcgggcatatctactgtcttgaaagcataaacacagtaaatagagaaggggaaagaagggatctcttcactgtatatagatctgaatgaaactctgagaaacaatagatgaatagcttatgtctctcacaatagggtttgtagaaaacttgataaaagacttgataaatgaaacttaggtctaaaaacaatatatatagaccctaaaaacgtccagggactaataatgcaaataaggaagtcttctggggcaaacttgagcttctgtaaactcgaaagcatctagggtttttgttgggccgaaactggtgtcgatcgacactaagagtgtgtcggttgacactcctcgctgattcctgaaccaaaatcgtccttagcttccttttccttagcttttgctccaaaatgtctcattatctccattgttgtcccattgcatagaatacctgaaaagacactaaaaatactcgagaaataacagaatgactcaaaatcctatacctaaaacagagataaaatcggtgaaaatcgggttatatcaactcccccagacttagcttttgtttgccctcaagcaaaacacaaaagccgaacccgtggaagaggttttgaaaacaaagaaactcccaacattctctagcctattgccatgatcattaaaactaagtccatatgcctaacaagtctaatcaaatcctaaccaacatgtacttctctgcaagcttacacaacattttagattccatacctaaattcaacaactatatccaccaggctttcattgctgggtctcatcaaacaagcctacattcaagatacttctaaactcattcctgtactataccatgataaattgaccattctttatatattttttctttttcggtgttctttctctcccagacttatttttttagagagtaaacaaaggggaactcgcatactggatcgacaccctcgacatttttccaacctttgtaattgatcattctaaataatgtataataatggggtcataggaaacattgctacccctatagtcgtctcaatctctcattatattttatatttattttttatttattttttattataaggggagaggaacatattcttttgatcacattggtctcaatatcaggtatgaacaaggagtcaagatctattaatactaaccgtttgaagaggtaaaaggaagagcagtgagattagctccagccttagtggttgagttggaaactaggatatcctcaagtctgttgctttgccatctaggttttccaatagtcggattgattcaaacctgcaacactcatcaatcaggcaataaacaagagaaatatagatcatgattcctaactaaactaaagaaaacgtttttttttttttttttttttttctttttgggaaagaaaggaaagaaataaccaaatgaactgcaaaataagaaacaaaaaataaaagcatcattagtaagaacctcctctagacttaaatgacactgtccttagtggcattcaaatccagagaaagcgggaaaaataaatcaaaaagaaaataaaagaaagggaaaagaaaaatcaaaccagtgagttgcctcccactaagagcttgttttgagtcaatagcttaacttggcggagttcaagatgtgggtggagtggtggaggattgctgctgcctcctcgccttccaaggcggtgtgaaaacggatctggttggagcagtttctggtgtcgatcgacactcaggtgtgtgtcgatcgacactcttcttgtcacctgcaagagcaacaggagaaacaagctttcgaggaactctgggcttgttatctagtgaagcagtcttcgcataatctaaagcattaatcaaagataaaccaggagaagagagagaagagaacttatcacataggtcctcaattggtgtgggctgaagagactgtgcagaatcctctgtttgcaaaactcgagggtgtcgatcgacaggggtagtggtgtcgatcgacaccgttcctctgcaactctcattggcgagctgaatgggttggagcgttatgtgtggctctcaatacaaaaagtccatttgttcttagcaatataactctcaaggtttctgtgaagatctagccctgctttctcataatctcaattacaaatctgtagtgtggatttcgaaacccacacaaactactcagacatattggatgaagcaaacaacatatttgagtgtaaatgcataaacacagtaaatagagaaggggaaagaagggatctcttcactgtatatagatctgaataaaactctgagaaacaatagatgaatagcttatgtctctcacaatagggtttgtagaaaacttgataaaagacttgataaacgaaacttaggtctaaaaacaatatatatagaccctaaaaaacgtccagagactaataatgcaaatagggaagtcttctgggactaaaaattatcaaacaaattgcatatcagatgatagagaaaaaaacatagatttttatgatagatttagaccactgtacagatttagaccattgtacagatatagaccaatgtacaaatataaaccattatacaaatatagatcattgtacaaatatagaccattgtacaaatgcgttttatcatttaatatgcattttgatatgttcgcacagttatctacatctgtacagtggtctacatctgtatagtgctctatagctctatagctgtatagtggtctatatatgtattgtggtctatatctgtataatgctctatatctgtacagtggtatataatataaattttaaaaatcattaaacaaaatgcataagataatgttaatgaagatgcccactcatccattgtaatgttcttttgaatcttcgtcgttatcaagcaccactaaatttactgccctaagttccatgttctacacaagtttaagaacaccaatcaaaaacccatagaagagagtacactaaaattgtcatgttggtttatgaatggttcaatctcgtggtttaggattgaaattgggttatgtggcaagaagatggggtgtgctttcatttcaaagcccatgcccatttatagtttttcctcaaaatagctcgatgcagaggataaaatagaggagattgatggacttgaacctgtgtggaacgaaggaaaacttattacagattcggtatgatgagaagaagagtacaaaaatatttcacatggtttacgactggttcagtctcatggttagtcttcggtttaggattcatgagtttatttacatattcgatatagtgagcttcaatcgggaaacattaggaactggtttaagctccggtttagtgaaatctcttaccaacaagaaaaaggaaatcacaaaaaagttggaaaaaaggaaatccaaaaaagttggaaaaagggaaattgtgttatccgcatcaaaacaaattacaatcagacttttgcttataaaagaaaaaaaaaacataaccttacacttgagacatctccacaatttcctatttttcaacaatctctaactttcttacgactgctgggttcatctctctttctctgaatttgttgtcttgattcactctcagataatggataccaaagaatcagtcaacgccgatgttagtgtaactgctatgtctcttcctccatcttcaggcttcttaaacgagttgttaatcattcgacctagagaagtcgagaaaattatcacagacgagaacggtcataatgtaacaagtcttggatcttacccggattctcctccttccaacccatttatctttctcaaattccaacacttcgaagcaaactacatctatgaccttgtccatccgcatctccacgatcatgtcttgtccaaacaaatatctgatcggattgttgttaaagcccaacagctaagaagtgatcgaagttctgatcacttgcccttattcatgggagtctccgtcatatttacacgcaaggtctacaaagtcttgccttgcaactgtgctccgtcgacaccagacttggtggagaaagaggccgcagaagaagaaacagaggcttgtgcgatttgtttggaagatatgttggagtcgggattcgatgataaacaaatctaccgtatgcataactgttggcatatgttttatgaaggatgtgttatggagtcgttgaatcgataacataattcatgccctctctgccgccaacctgtttaccaataacaagagactataattagggtttcaacacatgttttgttttgtagttatattacctcggctaaagaccaaaaacttttattaattatagtgattattaatttctcgagtattagtttatcgaagttttttttgtacaaactctttgaatttataattgtggtcacttattttcttctcctaatttatttgaatgttgtataatttataaactactagattagaacccgcccgatgggcgggtttttaaagttttaaaataaaatttaataaaatgtacatcaaattttttgtaagtaaaaatatttttagaaaaaaatagatagctcttttacctagagaaaagatttatgatatttctttaaaccttttggttgataaaagggaatttttatttcattaatttgcacttctatattttagttatcaaattttttatacttatcattattagtaatgtcaattctcaaaaaattaattttgggaatccataaagttttcaactttttttttaataatccaaccaccagtcaaactttcatcttatttaaattattttacaaatatactattgaagtatgctttttaccgtttataaaatatatatgatcagttgatcacaatacccaaaatatatgtctatttattttcattttcttatagtttttttaaccattaaaattgttgacccaaaaattatattaaatattccaataaaaataattgatgacatttatgtaaaagaaaaaatctacttaaatgaagtgagtgtataaccaacctagaaaagttgagaaattaatttgacataactaaaagaaaaaagaaaattataagtacgatgatatattagtcttagataatacaaatataaaaataaaaattaaaaggaaaataaaaataaaataaacaatctacaaaaaatagtcttaacaaaaaatggaagttcaaataaacaacatacaatttattttaagtcctaaatttttttaattataaaataaaatcaaaaggaataatatataattttaaattaaatcatgacatatgttataatataaaattattagctcgatgatatataattaatattatataattcaaaacttttatactaatttatagtctaagaattataatgcatgtattcattagtgaaaacaccaaaatttttgaatatagggcttaaagggattgattttttcttattttatgaaaatgtaatataaatttaatattttatttataattttaagtcatttaatatgagtttgacattaggtaaaactgatttaagagattatagaatacaacaaaactatatcttaaacaatgttttttttccaaaacattttgtggttttcttttttttggttcattatgttttgttatttattaattattttactgtgaagtaattatattgatttgatatgatataattatattgatgtgatatcatatacttattatattgatataaaatttaggacttattcattaaaataacgtgtgcataatcaaaatcgggattattctgatgaaatagatagttaaattttatagcaaactaaaatctataagactaaaattttggtttttagaaaattactaaacaaaatacaaagaaagagggttgactaatatttaaaattttaatatcatcaataagatatagttaaagtcattaagtgtatagcaaaataaaaatttgatataaaacaaatttactagattagatatttaaaaaataggaattatcatttactatttaaaatttaaatcatttggtaaaaatttagaattatttttaaacccgcctgtctaggcgggcctaacctagtttacataaattcatgttctttaaactattttgttaggctcattaagtaaccataaaaatttatctacagttttatccggcttgacacaatttctatttttcttaaagcaatttaaaaaataaaaaataataacatatacaactatatatatatatatatattagtaaaagtataaatatttgggttttgtgcaaaaaaccattaaagtcgcatatttttgcaactttacctttcacatcaaaaaatacaaaatagtcctataaactataaaaccaaaattaatacgcaatataacatattttaacaactttacatatatagtaaatattatcacgatcacatacatatgtttttgaaaattctgaagatctagatgaactagtcatctcgagagctttgatttgatatattatttatcaaaattttaaaatttaatagccaaaaaaaaactatattacgtattattttagatttcattacattattctgcattgttttagacatgaatggtaaaattgtaaaaatagactactttgaagtttttttcccacaaaatcataaatattttaagggtgaattagctcaataaccatattccataaaaatattaagtaactaacaccataaacgaaggaattgagagagtgacgctacgggtatgtgaagttacaacccactccctaagccacgtttctgtgatttcttgtacgtgtgtgagggtaagagcgagcttctttcttccagctgacgtgtctcctttcgaaaccagtaaaaaaattatcctagcaccgcttgagaattgtcccatcagtaacataacctgcagattattacattaatttgaataaaatactccccccaaaaaatcagagcagaagatgctctgttttctatttattgccaataaatgctataccttttacgcagagatctaacctgcaaaacagaacaatatggatgatggtgaaaatagttcagcagtaaatacagggaatcaaaagggaaagatacaaaaccattgctttcttgtttttgtttttagtctctcgtgatttaattgcctagtataaactttccatgtaaaacttctcactttttcgttcgaatataccactttctagattgtagatctgctaaacaacttgttagtatttacttaaattacatcgtgattcacgctatattttgtattccgcaattaaaggctacgatcgattaaattgaaaaactgttattattgattgatatttacatttactcttcattatgttctttctaaataataatgaactatttccataatccatgtagaccgcaggacaagatgaagtattgttggtgattggcgagtgggtcagggtggataatctagcctggcagtttgaacctaagactgtcgaaggatcgtcattcatccgactcagaactaacatgacgtatgaagagctatcacagaaggtgaaagataaacttggcttgcgtgcaagaggcatcacagttaaaatggcataccaatttccagagtggatgactatagataaaggcaacggttctccacctcaatacatcagcgaagatagtgatgttacaatgttcattcaaatgcagcggcatatagaggaggtcaatctatgtgtaattgtcgtccaacacattattccaagttttccggttgatgttgcggacaagaacttcaattcagaggacagtgacgagttagattatgactcagaggaggaacttcaccaatttgcacttgatagtgctgtgttggggcctacactagagccaaccgctgctacaacagagacagaacaacaccgtagtaccaggcgagagctgttccctacaggaggaatcagtattagagagcctgaagaatgcatccgccttaaagccctgactgtctccctactgacaaagggaaaggaataatggacccaattgggaagacaggaaaggctggtccaagcagagcaacggtgacagatagctcaacagacagtgatgatgacttgctcattgttccattcacactgccacccaatccaccagctatcaccattccagaaaatgctgacatcgaaggcgcagattcctcacgggcagctgtgggcacgcctcatggcaatcatgtttctcctattgttaatgctgttgaagaaactgaccttcagcgtcaaaacattctgttttgggggcgggcacaagagctttaaacactatcctatccgatttcagtgatgaccctattcttttttggtagtgacgccccaccagtctttaacgatggaaaaggtgaaggtataacttgcattccatatctacatatagatttcgtttgatgcttatttcaaaactaatttggttatggattaattgggaaaatagagttcacaccttatactattctatttatattaatcgtgtactatttatattacagactacacccatgtcgctgatggatgttccttttatttcaggtgtgaactctgctttctttgacgttaaattcgaaggagataagctgtttgttggcagagtctttaagtcaaagtctgactgcaagactaagatagctatacacgccatcaaccgcaagtttcacttcagaactgcgcgttctactcctaagtttatggttctgaaatgcatttccaagacctgtccatggcgtgtatatgcatctaaggttgattcttctgacagctttcaagttcggcaggcaaatcagagacacacatgcacgattgatcaaaggcgtagataccaccggttagcaaccactcaagtgataggcgagcttatgcaatctcgctttcttggtattaaacgtggtccaaacgctgcagtgattaggacgttcctacttgacgactatcatgttagtatatcatattagaaagcttggcgggctcgagaggtggcaatggagaagtctttgggatctatggccggtagctatgcacttattccagcttacgctggactccttcaacaagcaaacccaggcagtctctgctttacagagtatgatgatgatcctactggtccacgccgtttcaaatatcaattcatcgcattcgcagcatcaattaaagggtacgcatttatgcgcaaggtcattgtagttgatggaacatttatgaaggggcgatatggtggttgtctcatctgagcatgttgccaagataggaattttcagatcttcccactggcttttggaatcgttaacagcgagaatgatagtgcatatgaatggttttttcagcggctaagcattatagctccagacaatccggatttaatgtttatctctaaccgccatgcaagcatatacacaggattgagtaaggttagacacaaccatccatctcacgttgcttcatatagtatacatatatcgatttacttaatctgccaataagctggttctattttgattggataatgaatgatttccctaatattgttgcaggtctatacgcaagccaaccttgctgcttgcacggttcacctttggcgcaatatcagacatctatataagccaaaaagcctctgccgcctaatgtctcaagctgcacaagctttccatgtcacggatttcaatcggatattcctgaagatacaaaaattgaaccccggatgtgctgcatatttagttgatttgggtaagtgtttttctcagcttacatatattgttattaacgtggctgagatgaagtttactccataacctctgtactttgtaattcgtatagggttttcagagtggagaagagtgcattccaaaggccggcgtttcaatatcatggatagtaacatatgtgagtcttggaacaacgttatcagagaggcccgcgagtacccgctaaactgcatgctggagtacataagaacgacgttgatggattggtttgcaactagaagggctcaagccgaagactgccctacaacattagcttcgagagtgcaggaaagagttgaggaaaactatcaatcagctatgtcaatgtctgttaagcctatctgcaactttgaattccaagtacaagaacggacaggggaatgttttattgtcaaattggacgagtccacttgttcctgtttggaatttcaggggttagggatcccttgtgctcacgcaatagccgctgctgcaaggtttggcgttccaacagactcgttagcagcaaatggatattttaatgagttagtgaagcttagttatgaggagaaaatctatcctattcactttgttggtggagaggtcgcaccagaaattgctgcaggaactacaggagagctgcaaccaccattggttcgctggccaccagggagacaaaggaagatcagaatcttgtctcgtggtgaattcaaggcaagtacctattagtaaacattacaatgtacttcttatctattaacaagctaatagcctatctacttttaatatgcagcggaacaggacaaggtcccagaggaggtgttcacgttgttgtggtgttggacacaacaaggcctcgtgtcgtaatgctatataagtcgtcaactactgctatggggtgctaataggtgttatgaagaaactttgtggagtgggcttaaataatggttgttcccacatatcttgcggaagcgggtttgtttacttctactaatgcaggattaagtacatttattgaaatagtttggtatacccaactttgatgtataccttattattttgatttttatgtactacctgttcatcgttatatttgtattggtatctctaatcccgatgtaattaagtaatgccctgtaacaccgcttttgaaatgtatatatatgaaaccccgctgtttgtgtaatcacccttctctgcttctttcaagtgcaaaatcatccatatcttacttacatactatacagtataacgaattacgaaaactaaaccttaataatgaagtgggaacccaagcaatgatgcatcagtaattgtatacacagatttttcctgtaacataatcaatggggtaaaccataacaaaccaaaaccatcactctgcctttggagcccaagcaatgagtttgtttacacgtttgatgaaactgttggccgaataacatatgttttacttagtttcattatgctgtatgttggagatgcaatttcagtcaatcgcgagcttctacctgcaagcatcacgtttataaatgttatgattatatagccaaacgggcatcgtggatggcagcttcggcataaatagttttgcatggtatcctattctatttactacttactgtactattccgaaccatatgcaagattcaaataaaaaaagctcgtgtcgatatccaaagtattcaactaaaattgttttcttttgatgtcatgttttcagtatatatgttgatattactcgttaagttataaggatatgcaagaacttgacatttcatttattagttgaatactttggagttataggagtttgtagttgtaggagttcagcatatctgttattgcatcactgtaatataacccaacacactaggctaatagactgaaacatttcacttcaaacataaatattcaaacatcacagttattagttgaatttcaatacaattggtctctgattacaaaagaaactccatgtttgttcaacataaattacacatctacaaatcaaacaccacgttctgttggagacaatgcattgaaagtttcgatagcgtactgtttagctgcatctcgcatcttcccatcatctaatttcccacaatactctagagcgtgtgctcacgcacgggttaagtttgtcaatattacataaagttcaatacatattggttgaagtgttagttttgcaattataattcttttgttggtcatatttgcaaatttcccatatttttagtctaatttcagtttttagtttatttcggttcggtttcatagatttcaaacggtttataaatacatttcggttcgattacagttcaaataattctatttttccggttcaggttattcttttttccggaatgcgaaaaaaagaatatcattgtttgctctctcaatctcaacaacaacacttctctcactcaatcgctttctctttgagacgtttgtttagtttcaacaaacaaatcaaaacacacaaagtttgtgtcttcccttaagattcactcaaatctcgcaacacacacattcaacaaatcctgattcataacatctcaccaaatctctcaaaagatctccaaatctaaaatgttcttcttcttcttcttcatctgaatccaaaacaacaatggtgagacgtttcctctcttctcacaaatctctcatcactgttttctggatcgccactttcgcttccttattcatctggcaattcggcggcgtttccacaaatctctactccggtttctcccttttctggtcgtcgtcttcaacaaccaccaccgtcttctccggtggattccccaagctcagacctgtagttttcaatctaacagacttcggtgctgtcggcgatggtgtcacaatcaacactgaagctttcgagaaagctatttataagatctctaagcttgctaagaaaggaggtggtcaacttaatgttcctcctggtcgttggctcactgctccgtttaatctcactagttatatgactcttttcctctctgagaacgctgagattcttgctcttcaggttttgtttcctctgatttgaaattgtgatctatgtgtttgggatctgtttagggttttgatgcagagtttgttatttggttcactattgaattaagattgggttttgatgttgaaacgtttttaggatgaaaagtattggtctttgcttcctcctttaccttcatatggatatggaagagagcatcatggacctcgttatggaagtttcattcatggacagaatcttagagatgttgttgttacaggttagttgattggtttgtgaattttgcttctggggactattcttgtgtttgcaatgtaactcttcttgtgtttgcattgtccttgttgagctttttaggcagtagctgaaatgagggcttttcatgtagtaagactattcagaatgtttaagctctagttgtaaagtttttatgtctctcttagctgcttgaattgactaagttttggtattagatgatcaaagttgaattgactcaacttatgtggctaatagtattttctttctttgccaaacctgggagtttaatctgtcaactgtatgattgatggctaattgatgatggaaaacagggaataatggtagcatcaacgggcagggacaaacgtggtggaagaagtatcgccaaaagctgcttaaccacacgagaggaccactggtgcagataatgtggtcaagtgacattgtttttgccaatatcactttgcgtgattctccattttggacgcttcacccatatgactgcaaaaatgtcacaatcaccaatatgaccattttggcgcctgtgttcgaagccccaaacactgatggtatcgatccgggtaagtaattctgactttggctggatgttgcaactcagatatttaacaaaggaattagatacctaagctcatgtgatgcatataataaccgaacagaaacagtcaagatggctagagctagtgtaattagtagtgatacctctaggcctctaagctattagatcaatgaaacaaaagggagaaacaatcttagttccctacctgcaactgggattctagcgactagtatatgtagacttcaggaatttcagatgcttaagagcgacacagctcctttcattgtatctgaccattgcatataaccatatggtacctaatggtacataacatataaccttattgataaaaatcaggtcagagtatgggcttgggcgatctgtaaacattacttggctttaatggtggctaatatctttttgttgtgcatcagattcgtgtgaggacatgttaatcgagaactcttacatcagcgttggggatgatggaatcgcaataaagagcggttgggaccagtatggaactacatatggaaaaccttcaaagaacatactcatccgcaacctcatcatccgctccatggttaggtaagagagaattgctttccctaatcaatgttgatctaataatcaacgtgtacctaaagcctctgtgcaaaaacagcgctggtatatcaataggaagtgagatgtctggtggtgtctcgaatatcacagtcgagaatattctgatttggagctcccggcgtggagttaggattaaaaccgcaccaggacgaggtgggtatgtccgggatataacattccggaatgtcacattggatgagttgagagttggtattgtcattaaaacagactacaacgagcacccagatggtggattcaatccccaagcctttccgatactcgagaacataaactacactgggatatacggtcagggagtgcgtgtaccagtgcgtatccaaggaagcaaagagattcctgttaaaaatgtaaccttcagggacatgtcagtggggataacatacaagaaaaagcacatattccagtgtgcgtacgtggaggggcgtgtgataggcaccatcttcccagctccgtgtgataaccttgatcggtatgatgagcaggaacggttggtgaagcaatctgattcccagaatgcaacagatatagactacgagatctgaccaacaagagactgggtttggcctctgcaacaaatttgtttcgttggattttgtacatatacagaggaatctggaaagcaaaggaaattatcggtcagtcagattaaattgtatttgcactcttaaagaggaatttttccattgatcagtttatgttattgggttcttctctatctacctttgttatacacacataaatgggaatggtgagattcgaaaattactgcttttgcggcaagctgagatattgtatcataagttcaatttcgtaaataaaatgcagtcttctacggacacatgattctgcaatgacctgaccagtctagtagagaaacagaaagtaaccaagttgatcagatgatgatttggtgttggaaatacagaaaaaatggaagatatgtgagatttgttgttctcagagttagatgagttttaagagggtgtggatcatgcagcttaaagcatcaccggtgactgtaacggctagcagctcgactctcgggacttttaaagtggggacacttggacaaagtcacacctccatggactgattgtcaaagcatctgtagtggttgctcctatggtacttcaatttggtcattctttgttaacctttagtagtttggtggtttttggttatgtcgtatggtcacctacagggttattgcatttggaacttttaacttcgaaactacatgtatcctatatccaaatgctttatcactttgtactgaaatgcgttcatgtgaggttatttttactcatttccgctcttttgcacctaagatgtgttgaaagtggaaatgagctaaatctttgttcagattattcaaccgaattaagaaagattgacaagttagcaattaagataaactctttttttttttcttttttcaaagaacaactttgaaaaggaaacaccaccaaacgaaaactagttgtagataaatctcatagtactagtggcagatgtgtaaccaccatcaacaaccaagttatgtccggtaatgaaccccgacgattcttggcttgcaagaaacaaagctgcttgagctacgtcctccacagtaccggctcttccggtcagcaaactccctttctcagcaataatgtcggtgacctcagcgacgttgagtttgtcatggttaaggaacttacggtacgcattaaccaagatgtcagtgggaactccatgaggagagatgctattcacacggatgccgtgagacccaagctcgcacgccgttgtcctcaccaccccgttgatggctcctttggagagcgtatacgcatgtcctccaagtcctcccattagccctgatgagctcgatgtgcatattatcgagcctcctcgtcccccttctcggttttagttacatcataactaaacttagttgtcttataattaaagttggagcttcggaattaaacactatctgaggtagtaataatacatatatacctttgatcatggccttagcggcatgtttgataccatgcaaaacaccattgacattaaccgagacaagtttgttaaccatgtccacgtccatccccatgatactaccttcgttaagcgacatcccggcattgttgaacatcacatctagtctacctttacgtctcattgctagctccactgccgcctcaacatcagcctccttcgatacgtcacaatgaacgtaacacccaccgatcgattccgccacaaggatgccttcattctcaaggatatccgcgactatcacatacgcgccattctctgtgaacaatctcgccgtggccgctcctatccctcttgctcctccggttattatagctaccttctcgaataatcttttgtctgagttcgccattttaggtttactgtctcttgacgatcttgttgttataaaacctttaatgtgtcttcttgttagacatgctctttacctttccatcaactactttaatttctttcacttgttagttcattcatcatcttcacgttaatacaagtttattttatggttagttttttttttacgaaaatagaaagaagtagaattttaattatagaataaatttttcttgttttttattgctgcaatattgttgacgtgtgtgatttataccgaacatgattttgttctttagtctcttaagatcaatatatgtgacgattcatatttctttcaaaaatataaccatgctataatatatcattctttcaatagttaatttttttcttaccaagtatctttttcttacatataatccatagattatttgaagttattttttatttatttatctgtaaaatcttaagattgtatatatttggccatttccatttggttcaagaaaaattatattatgcattagatcattaaaaatttggtgactagactatttgacggctatactcacccggaactgttaattaagtggtaaaaattcgtatcaataccatcgtaaaaattacaaaatttggtttatcaaatactaggtttgaatagtgatagaatgatagtaggtcaaaacagtgcgtaaaaaatgaatttggtgggacgataacacaaactgtagtgagtaaaattgggtgatataattggaataacctacaagattagttaggtggtaaaattcggatcaatccgtggatatatgtaaataatttttaaattgtaagaattacaaaatttgttttatttaatactaggtttgaatagtgatagaatggtagtagatcagactatgcgtaaaaaaataaatttggcagatcaagcacagcaattgtaattagtgaaaattgggtggtataagcggaataacccgagcgaaaaaacacaacaaaagttgaacgacaaccatagttagttggtgtggtgaagcagttaaaatataatatatttcttttgtattgctgatactcaaatctatattatataaaagttgaagttatttgtttctaaaagcgtccacgtgggatttaaaacaacgaatcgagagctgcaacatccataattaacatatttagcatctaatctacatatacatttttgtagtcattttagcaaataaatcctcaagttggaacttatttacaaggaatgccattgacattaattattatcaattaattaatatgcctaattattattatttccttatctaatatatctccatccattctaattacttttgaaaaggagaaattttaaaactttattaatattatactttattaaaaataaatattatagttatttaaagtttagaaaatgtttagaatatttaacgaaaaaacgtttagaatatatataatatataaaatctataaaattaaataaccatttcaaaagaaatcttttaaattgatttgaattattaatcttttaataaaaaaattattagaacaaaaacataaaataatgtttaattttacaaaactggattagatggggggacaagtttagaatagtataatgtatggattttataacaattaaataaccatttgaaaaaaaaaaaattgaattatatatctgttaaattaaagtattattaaaaaaacaaaaacaaaatgtttaatttcactgaacggggttagatggtaggacgggtttgggtcgacagtaatacgagacggtataccacgggtgaaatccattacatatgtttagtttcactcaacgagattagatggtatgacgggtttgggttgataaaaatacaagacggtatactacgggtgaaatcctagacataacaatcaaaatacaattatattatcttaaatactaaacaaaaaaatattattaatcaaataaatataagttaaatttaaattatttatttataatctagattttaacttaatgaactatactttaaaacttaatgaacgttattgttcatatattttaaaacagtaaaaatcaaacataataattgtatactaaataatatacagatataagagttgtacattcagaaaatataaaaaattaaattatattttttttttaatcgactaaacaaattaaatttttattcttataagaacaaaatagtcccgcgttgtaccgcgggttgaaatctagttgattaacatttttgaaaatagtaattactttcttttgtttttaaaaagaaaaataacaaatattaaatttaaacttataaaaaaggaagctaagtaattataattatgtactattaaaccctaacttataggattttacacaactaattcagagcatccacatcataaatttacatttttactagtactataaacctccaaactaattttactaacactttaaacctccaaattacgagaaaagaggcaaagattccggttttataggttgcaagaggttggttgggacaagttgtgtggtattgtaaaacaatttattttgaatggttattcagtaattttgacgaatgcaacatcaaatgcttatattgaggaagtgtcgagggcttataaatctaaggaagtataggtgatgataggagttgaggaacatacatgcaagaccatggaaggaagttgtcttgggaaatatgtttaggttaatacagtgaaaattgtttacgtgaaattgtaagtggatgcagctatggttagtgacgtaagttattacatggttcttttaaaaaacttttgttgaatatactttagttagatgatatctaacaagacaaaatgtatggaaacttgtgttgaaattgtggaatacgttgttcttcttggagtaccaatttcaatcaagaacgagaatcggcaagacgtaaaaaaaggtgataaattttaactgatgagagttctcttgcattatgaacaattaacgtcataatctaggtaacaaagagaaatgttttccatgtaaaaatgaaggagaaaaagataaatgtggatagatttgcgacaagaaatagagatataaagagaaaaccattttcttgatgaagaagaggtcatattgtgacactataagataagcttaaataattagttatgagaaaaggtgagaaaacagttatgacatgaactccttaaagcaacatttggttcatatatttaggagtttctggtattaatatctttaagttgaatggtggatatacattcaaacatttttttgtatgtgtattttatctaagcttcttcaatctgtttggaaaagaaaaatcttttaaagttttaaatatgacaggcatcaaacaaacatccaaacataattggaataatctgaaatttagtaggagacgtggaactaagttttgatataaagacatcaaattttgagttcaaaatgttaaataaacaacactggtctagtttgtttaatttatttagaagcttatagaactatgttgggttaaggttagtatgtttaaattcattcttgttttcaacacataataacatattttttatgaagaaaaagatggagaagatgaggaagaaaatgatgaagatgacgagaaagaggaagaagaggagtttaacaaagaagcggatggggaaagtaacgacgacatgaccatgaaaatttgacaataaaaataatgagaaggaatatgaagaatatacaaagacatatgttggcaatgatttgaatatgagaaatgagtttttttttttaaatagtaatcaaaaaaatttaaagaccaacagttataactatataagataatagttaataactatcatcattaaaatataatattagccaaaatatatcaactaactccacgtgtagcgtgggtttaaaacctagtctatactatataaaaattgaggctatttgtttataagagtgtccacatgagattttaaacgactaattgagaatagccacatcatcggtttacttattaaaattccacaaagtttctatattttagatttttgtaaaatggaaaaaagcaaaatataaaaataaaagaaatattttaaaatatggaaaattttctccaataaatccgtccacctcaattagcagccacctcaataattaacatgtatgaaattattcttattttctatttttttttagatttttgtaaaatagaaaaaaccaaaatatgaagtaaagaatatttaaaaatatggattttttctaaatattttgtcaccaaataataaaaaagtattaaaatgaaattaactattttattaagtttataaacgaaaataaataattgattatctatactattaattgagaatcacttaaaaataaataattttataaagagtaaaatattatatagaatgtcattgatactattggatttaaagaataaacaaaaaaaatcataaaaggttacattagacaattacaaatttggatcctgggctttaggtcggataaagacgaggtacggtcctggacacggatcctagagtcgattcatttagtttatcattaattgtttattgttcagatattaatgttgtttgcagttatttcctgaacctcttacataaatatttgcccaagatcttaattatcatttaaagatatttctacaactaactaatctaattacttgcgattactaaatagtaaataagtatacaactaaataaatcaaccaacattccaattattttaagaaacctgctaaagaaatcagaaaatatgaggagcacctccaaatttgcagtaaccgtattcaataaatatagatctctacgatacaaaattcagtaattatatttacaaaatataacaaatcgagcatataccttaaaaatctctattggcaaataaattagaagattttgattccttaaatcctttttttttggacaacaacttgttacattccatcaagtaaaaacccaaagatcaagacaaagacgaagggattcagagatcccaaagtttagtttacaacaaagaagggcattccccaatgccaacataaaaagataaaaggataaacaagggtaatcgataatacaatcttgagagctttgagccacaagcggtgaggcatgatggtacatgtgaggtcaagaattagcgataaatcgtccaagcgtgaaacactggaggaccaaatagccatggtcaatagacagtttgacttcaaagaaggcgtcaaagtctgggatctcgccggcacgaggaggactacaccagaaacggctttgacaaggtttagagctacggagatgatgctctgctgaatgaggttgaaagctgtcattgtcgtagggtttgtgatgagcatagacaagccacagttggtggagttggtacagaggacatgatagttaacgttgtgagaaaaacagaggtcaatgtagagattcaaagtcctagtaaaccgtaatagaacaggtgggtcctctctcacatgaaaaccacaaaggtcatggagattaaggaattccacacaaagtttatagtcggtatacctccggatgggaaattcaaacatgagtttcaagtgtgtaataagatagaaatccttgaggtagcgaagacacacaactaatgggcaaaaggggctggataaacattggtactcaccactacaaagaggtgggagcataatgccaatctttttccagcaaataaaaccatgatctttaagtaaggttctcacaaaacaagagattaagcacatagaaccttttgccgtaaaggtaaaaaacacatgatcagaaacctagctgactctaaaggcagagagttcttgtacaaccaaagcaacgaagtcacataacgttccaaaagaaatccccaatcaattggttttagtgagctacgtttaaaacaaaggttcgacaaaggagagattaaaacagacctggcctttagtgggtaatggtttgggccaccatcaaacggaatgggctttatgggtcttcacgggccagattgggagaggcccatcagttgaaaccctaggttccttctgattgacacatatcgacttggagagcggcggccgtcagtgggcttcaaatgagagagaattaaaggagcatagatctccggtgaggaaaataaagatatttagttgggtctatatctggtgatatatctcgtattcgttagggagttatagtacccgtctttatatcgtttttgttggcgtttaaatttgaataaagatttcaatgacaaaaaaagagttgggtctatatattccaaacaatcgaacgaataaatcgatcgattccaagagtcttatgagttgagtctatatatttggcctaaacacaaataatttctgattcagttatggtccactatattaaaatttgggtctagcatttttaataattaccattggataaagttataacttataaacaaaaatttaggatttacaaataaattattttacattttattccataaaaatcatagtcaatattataactaaaacacaccaattctgcaactgtacaaattatttatatattatttaccagaaccaacaaaactatccaatcattctacaataataatttattaatttttaacttgtattcctattcaaaatgtataactaatcaaacagaaatagcaaatttgtgtaccaaattttttgaaacatataatataattttgtaataaatttctaatattatggttatattctattactaattcccataaacaataatttcttaaatactacttaaaaacaaaatgattatacttttttaaaaacatatttcgtaaaatataaaatcccgcacgtatgtgccgggtcaaaatctagttaatatataaaaataaaatactaaatttattagtactttatctttaattacaataaccatttaatcacaataactatctcaatatataatatatatttttaactgaagaaatatcctacaaaggaatacctcttcttcttacgtgttatttacaatttgtatatggttttaatctaatactagattttaacccacggtacatcgcatgactattttgttctttcaaagataaaaatttgatttgtttagtcgattaaaaatatatatgatttaatgttttgtattttatgaatgtacaactcttatatctgtatattatttagtatacaattactatgtttgagttttactgtttttaaaatctacttagcatttttgaagtacaaaataaggattttttcgggtcggttttttttgggttttacccggttttttcggcccatctaatgaatttactctctttttggcccaaatactgccttccgctactttcaatttttcccgctcctgcaaacaaacaatgcaagaatctcagcttaatcattcttctaatcaatgtgaatcattaatatcatcaattacgtgatttcgtcaaagaatatatagtaaatcagtcttaatcacagtaagaatatatagtaaatcaagttgttaatattataacctcccaaaaacagatacaccagtatgcgcaatgtattcactatcattgaaactcgctaaattaaattactgaaatcaatgttgttaccaagacaatctaaaacgtatctatttagtacaacataaatgtcaatatctacacatcatcttcaatcatctttaacacgaagatctttttcaagccggatttccaatttcatatactagcaaagactattatcagtttgatcctccagatttcgcctactcaatcttttaaaacccttaccaatctcacaccactataaatatagcatgtatctcatctatttctacacattccattctaccaaatatcacaaaatctagaaaagaagaaacttgcttaccaactgaaatggctgcctctttcgcatttctaagagatattcggccttacaagacttcatggcgcatccaagtcaaggtgtttcactcgtggcgtcaatacactagcatgactggtgaaaccctcgagttagtcttggtagatgcacatgtaagtttacaaaacatattgtattgacatgtgattttcgaatgccattctaattatatggtttctgttgttaatagggagtcaagattcatgcatcagttaagaaggacttggtgagcaattttgtgaacaacttgcttttgaatgagtggaggtttatagaaacctttgctcttaaccatgcatcaggtcaattccgacctactggtcatctatacaagatgacttttgtcactgggacacaggtcatacggtgtgattctgttagtgactctagctacctttcattagctactttcgctaatatctaggctggtgactcaaatccggctattttagttggtaagcctatgaccagtagttaaatttcatccctgtaaaattcttcttttctatattgtttcattgactgtcagtgtattctactagatgttatgggtcaagtggttgatattggtgagcttgagactctcgaggctaaaaacaaacctaccataaagcttgactttgaattaagggacgacacgtaagtctatgtacctatgttttttatcctcaagaatgcaactattgtttcaatctctctaatatattgtttggtttagtgatgagcgaatgtcatgtactttgtggggagcatttgctcagagtgtttttagtgcatgcgaatttgctgatggtcaaatggttatctgtgttctgagatttgcaaagattaagtcttacaaaggtacatgtctgttctgaactttcttgacattactcattgattctaacagttattaccataattaaatgttctactttttgtgtttgtaggagttaggagtttttctaactctttttatgcatctcaagtccacatcaacccggatttccctgaagttcaagcttttgtttctcggtctattttttttgtttatttgtttatttgataatggtctttaactcactttccgtttatatgttatttaacagtttacatgttgatggtctttctctcactttccgtgagtgttccaaagtttcacatggttactgtgaaacaggatgatgactgtaagcaatatgagaggaagtcaatccgtgattttcttcattctatggaggtttgagttcttaatttacatgtactataaatcataataccctttattgatttatataaatttataatttcatattggaaaggttagggttgtctgcaccatctatgctcttgacacagattggtcatggtattactttagttgtcgtaattgcaacaagaaagtgactcacattcatgctggtgttaacacaacttcattgaagtcatcaaaaccaaggttttggtgtgatgtctgcaagaatggagtcactaatgtgcaagccaagtaagtatacctcacagtttatgtccattactaactcaactagaatgcacacattaattgacccgcaaataaacatatatagtacatgcttgatgtgaaaaatagtctatactatagaaaatttgaggttatttgcttctaaaggcgtccacataggatttaaaacaacgaattgtgcttggacatgtcattaattagcatttttggccactatgttaagttacatttttaaattttaacaaatttctatattaaaatatttatgaaaaggaaaaaaaagatatggaaataagaaaatgtacaattcaattaccacaatatagaaatattattgtcattattagtctcattatgttagcttccaaataaattaagaaaaaatcttaattctaaattaatatagataattagaattcaaataaatgaagaaattttctacaaattaagaaaaagatagtgataaacaaccaagccaaagttttttgaaagtctaagaaagttaaagtttaaacgaaaaggaaaagcttaatgacgtaaatgaaaacctcttcttaacaaataaagaaactaataaagtcttaaataataaagcagtggtgtctatataaataaacatctatagaccatttatagtcgattaaagattttatttttgaaagttcaaacaaataatttatttacttaactaacgtacctttcgacgagcttgaaaaatgcttttactaataagaaaaggaaggaattttcaaagaaaatatatgaagtatgtgaaaagtttggaatgtaggacatatactactgaaacaaaatcataagaggatggaaataaacacagtaggaaagaagtatgtgaatttttttcactagtagtctaagtgaagagggattaaggtgtgtttggtccatgaagcgttaaagtttggaaggacatggtttgatgatggtgttcataatcgtatcaatttgaataaagttccagaatatataagttgaggtgtttcagtctgtgaagcgtgaggtgaagacgatttaaacaacaacatcaaaagagagaaagtgatagagttaagaaccaatttagaagctaaaaccttttattataaaaatataaaacaaaacagagcaaaacaagattttattcttaaaagttcaaacgaagagtttattgacttgactcagctacctctcgacgagcttgaaaaaggtttttactaacaaggaaataaagggatattcaaagaagaaaatatggagcatgtgaaaagtttggaaggtaggataaatacagcttagacaaaatcataaaaagatggaaagagataccttaggaaaaaagtatgtgaaagattatttcacaagaaggtgaagtaaagagggattaaggtatgtttgatctgtgaagcgttaaagaaacaagcatatggtttgatggtggtgttcttaatcgtatcaatttgaatcaagttcccaaagatataagttgatgtctttaagtttggaaagcgtgaaggtgaaaaggatcaaaaccgcataaaaaaagagaagtgatagagtcaagaaccaatttagaaggtaaaacattttcttacaataatagaacataaagtagagcaaaaaagtttttttcttaaagattcaaacgaaaagtttattgactgttggggtcggatttggtctcgtaggaaccgagccaactaaacaaactccgagaacgcctcagaaacatctgtcgggtatatttggctcgggagtcgttccaagacgcgtactccgggccgatgacaagtacctcggaaatcgcatcaaggaatcatcccgagctagattagaaaacacctcggagaccctgcgggtaatcttccgacccgaatttagcagcgcctcgggtacttcacgataccaccccgaggcgaatctcgtaaacgcttcgggtaaacggtctaactcgcacaaaacgagccgtttgactacaaaccgacaagaggtacccggctcggaagaaaattcactcaagccaaaacatctcaatcctaaaggaaagatatagacccgacgcatggtcaagataccatatctgaaagacctggaaatgatatttggaaatcatttcaggatattaacaacaaagagaaaatctcgagaaaatcttcagaagataaagatttatcattgccgcctcaaagataacaacaaatctcccaagaatatcgcgaggggcggctcaaagccttatataaagcacctcaagggatgagagaaggggcacgcacaaaaacgctctcaacttcaggctataaaaaacgctctgactttgaaggcaaaaacacttattttcatattctagaacacttgtacgatcaaatcattactttcttattaatacaatcaagaacaccgtccgcggtaattgagaattctgttgttctttgagaatctcacaaagattcgttctttgaagaaacccttaaaacaatttctattgtgcgagttttgactctcacaatttagcgctagaaggaggggacttgagatttctcttactcccggaacacagaaccaaccacccaattcacaatggtcaacaatcaaatccccggtaacacagttgatgcagagggaaacccaatccctccaatccagacagacgttcctgaagccgctgctcccgtgaccctagcagaactaagaagtatgatggctcaacttctgcagaaggtgaacgatcaagaacaggcaaatcgatccttggcacaacaactcgaagtagctacctcccaaggacggatcaggactactcgtttcggcgcgaggcaacttcaggatcgacgagcagcaacagatctcaacccaacacggctcgtgttccacacgcctggcaatactacaaggcccgtcagcagaaccgcaccggaaatcggaagagatcgaaccgagccagcgatcttgggaaatcgggaaacgaatcgaacagaaagaaacgaaccgcagctccctcctccccgagcagaagttgccgaggccgatcagatcggggtctcggacgatgaagattcggaagagaacattaggtgggctgaggaatacgccagagaacaggaaataagggccatcaagctctccctagccaaggcagagaacgagataaagctcttaagatcccaaatgcataacgcagtctcctcggccccgaacatcgaccgcattctggaagagtcccacaacacaccgttcacacacaagatctccaacgcgataatctcagatccaggaaaactaagaatcgagtacttgaacggatcttccgacccgaaaggacacttgaagtcattcatcatctccgtggcccgagccaaattcagaccagaagaaagagacgccggtctctgtcacctgttcgtcgagcacttgaaagggccagctctgtattggtcctcgagactcgaaggaaattctgtggacagttttcaggagctatcaacactcttcctgaagcaatattcggtgctaatcgatccgggcacatcagacgccgacattatggtcactatctcagcagcctaatgagccacttcgagacttcctccggagcccataattaccaagctgatacacctcgaggcgaagccgcccgaggccgaggacgaggccgcggtcgagaatcctacacttggacaaaggatcaacccgcaggaaacgagcacgaatattgcgagttgcataagagttacggccatcatacttccagatgtcgtagcctcggagcaaagttggctgcaaaattcctagctggagaaatcggtggaggtttgaccatcgaagacttagaagcagaaaagggtaaaaccgagcaggtcaaccctgtggccaatcccgagcaggcagcccccgcggcaaacctcgaaggacccacaagaggcagaggtaatcgcgaagcagacgacgatgagccaaaagctgctcggggaaggatcttcacaaatttaggggattcggctttctgtcaagacacggcggcatcaataaaggcttatcaaaggaaggctgacgcgaatcataactgggcgcggccatttaacgagccaaatgacgaagtaacttttcacgaaagcgataccaacggtttagaccgtctgcacaacgatcctttagtcattacactgaccatcggtgatttcaacgtcgaacgagtcctagtcgacacgggaagcacactagacatcatttttcttacaactctgcgagaaatgaagatcgacatgacgcaaatcttaccaactccacgacctgtgctcggattctctggggaaatcactatgactctcgggaccatcaaattaccagtccgagccaaaggggtaacaaaaatcgtcgatttctctgttaccgaccagccgaccgtgtacaacgcgattatcagcacaccatggttaaatcaattccgagctgtcgcctcgacgtatcatctctgcccgaaatttcccacaagcgacggcgtgaaaaccatctggggaaatcagaaaaatgctcaaatctgcttcatggcagcacacaagctcaggaaccccgtcactgaatcgacagccgacgcgaatcataagaaggccaagcttggccgagctgaagagaagtcaatttctgagcagttatagcagctaaggatcgaggaggctcgggaatctacaacaccaactcccgatccggtagtcttaatctgccttgacgacgaaaagcccgagcgatgcatagaaatcggcggagatctaggagaagaactaacagctgaactcactgccttcctcaaagaaaacgtcaatacattcgcctggtccccagaagatttacccggagtaagtgttgacatcgtatcgcacgagctcaacatcgatccgactttcaaacccatcaagcaaaagaggaaaaaattgggtcgggagcgagcagaagccgtgaaagccgaggtagagaaattattgaggatcggatccatcaccgaggcaaaatgtcccgattggatcgcaaacccggtcgtagtaaaaaagaaaaatggcaaatggagagtctgcgtagatttcacagaccttaacaaagcctgcccgaaagacagcttcccattaccacacatcgatcgcctcgtagaatcaacttttggaaacaagctactgtcattcatggacgctttcgctggttacaaccagatcatgatgaacctcgaagatcaagaaaaaaccgctttttacacagaacaaggcatcttttgttaccgagtgatgcccttcggactcaagaacgccggggcaacctatcagcgcttcgtcaacaaaatcttcgcattacagattgggaagacaatggaagtttacatcgacgacatgttggtgaaatctatgacagagaaagatcacatatcccatttacgcgaatgtttcaagcagcttaaccgctacaacgtcaagctcaatcctgcaaagtgccgcttcagagtaagatccggcgagttcctcggatacctagtcacgcaccgcggcatcgaggcaaatccaaacaaatcgaggcattgttgggaatggcgtcacctcagaacaagcgagaagtgcagcgcctaaccggaagagttgcggtccttaaccgtttcatctctcgctcaactgacaaatgcttagccttttacgatgtgcttcggggaaacaaaaagttcgaatggatgacccgatgcgaataagcttttcaggaactcaagaagtacctggcaactccacccatcctcgcaaaactcgtaatcggagaaccactatacttgtatgttgccgtatcggatactgcggtcagcggagtgttagtcccagaagacagaggcgagtagaaaccgattttttacgtctcgcagactttcaccaacgcggaatctcgctatccgcaaatggaaaaacttggtttagcagtcgtaatgtcagctcggaagctgcgaccctacttccaatcccattccatcataataatgggatccatgccactccgcgccatcttacacaatccaagccaatcaggacgtctggctaagtgggcaatcgagctcagcgaatacgacatcgagtatcggaacaaaacatgtgcaaagtcccaggtccaagccgattttattgtcgaactgcccacctaggaggcccgggaaaatccgctcgacacaacttggcttctacacgtagacggcttgtcatcgaagcaaggctcgggtgtaggcatccgcctcacctcaccaacaggagaggtcctcaagcagtcatttagattaaacttcgaggctaccaacaatgtggtcaagtataaatcgctcgttgccggacttaatctagctcggggactaaagataggaaaaatccgagctttttgcgactcccagctcgtcgcgaatcaattcaacggagaatacacagctcgggacgaaaagatggaagcctacctgattcatgttcaaaatctagcgaagaatttcgacgaattcgagttaacaaggattccacgaggagaaaatacatcggctgatgccctggctgctctagcctcaacatctgacccgagcctgaaaagagtcatcccggtggaattc

SEQ ID NO: 1342 - DNA, 99291 bp, Arabidopsis thaliana
gaattctgttgttctttgagaatctcacaaagattcgttctttgaagaaacccttaaaacaatttctattgtgcgagttttgactctcacaatttagcgctagaaggaggggacttgagatttctcttactcccggaacacagaaccaaccacccaattcacaatggtcaacaatcaaatccccggtaacacagttgatgcagagggaaacccaatccctccaatccagacagacgttcctgaagccgctgctcccgtgaccctagcagaactaagaagtatgatggctcaacttctgcagaaggtgaacgatcaagaacaggcaaatcgatccttggcacaacaactcgaagtagctacctcccaaggacggatcaggactactcgtttcggcgcgaggcaacttcaggatcgacgagcagcaacagatctcaacccaacacggctcgtgttccacacgcctggcaatactacaaggcccgtcagcagaaccgcaccggaaatcggaagagatcgaaccgagccagcgatcttgggaaatcgggaaacgaatcgaacagaaagaaacgaaccgcagctccctcctccccgagcagaagttgccgaggccgatcagatcggggtctcggacgatgaagattcggaagagaacattaggtgggctgaggaatacgccagagaacaggaaataagggccatcaagctctccctagccaaggcagagaacgagataaagctcttaagatcccaaatgcataacgcagtctcctcggccccgaacatcgaccgcattctggaagagtcccacaacacaccgttcacacacaagatctccaacgcgataatctcagatccaggaaaactaagaatcgagtacttgaacggatcttccgacccgaaaggacacttgaagtcattcatcatctccgtggcccgagccaaattcagaccagaagaaagagacgccggtctctgtcacctgttcgtcgagcacttgaaagggccagctctgtattggtcctcgagactcgaaggaaattctgtggacagttttcaggagctatcaacactcttcctgaagcaatattcggtgctaatcgatccgggcacatcagacgccgacattatggtcactatctcagcagcctaatgagccacttcgagacttcctccggagcccataattaccaagctgatacacctcgaggcgaagccgcccgaggccgaggacgaggccgcggtcgagaatcctacacttggacaaaggatcaacccgcaggaaacgagcacgaatattgcgagttgcataagagttacggccatcatacttccagatgtcgtagcctcggagcaaagttggctgcaaaattcctagctggagaaatcggtggaggtttgaccatcgaagacttagaagcagaaaagggtaaaaccgagcaggtcaaccctgtggccaatcccgagcaggcagcccccgcggcaaacctcgaaggacccacaagaggcagaggtaatcgcgaagcagacgacgatgagccaaaagctgctcggggaaggatcttcacaaatttaggggattcggctttctgtcaagacacggcggcatcaataaaggcttatcaaaggaaggctgacgcgaatcataactgggcgcggccatttaacgagccaaatgacgaagtaacttttcacgaaagcgataccaacggtttagaccgtctgcacaacgatcctttagtcattacactgaccatcggtgatttcaacgtcgaacgagtcctagtcgacacgggaagcacactagacatcatttttcttacaactctgcgagaaatgaagatcgacatgacgcaaatcttaccaactccacgacctgtgctcggattctctggggaaatcactatgactctcgggaccatcaaattaccagtccgagccaaaggggtaacaaaaatcgtcgatttctctgttaccgaccagccgaccgtgtacaacgcgattatcagcacaccatggttaaatcaattccgagctgtcgcctcgacgtatcatctctgcccgaaatttcccacaagcgacggcgtgaaaaccatctggggaaatcagaaaaatgctcaaatctgcttcatggcagcacacaagctcaggaaccccgtcactgaatcgacagccgacgcgaatcataagaaggccaagcttggccgagctgaagagaagtcaatttctgagcagttatagcagctaaggatcgaggaggctcgggaatctacaacaccaactcccgatccggtagtcttaatctgccttgacgacgaaaagcccgagcgatgcatagaaatcggcggagatctaggagaagaactaacagctgaactcactgccttcctcaaagaaaacgtcaatacattcgcctggtccccagaagatttacccggagtaagtgttgacatcgtatcgcacgagctcaacatcgatccgactttcaaacccatcaagcaaaagaggaaaaaattgggtcgggagcgagcagaagccgtgaaagccgaggtagagaaattattgaggatcggatccatcaccgaggcaaaatgtcccgattggatcgcaaacccggtcgtagtaaaaaagaaaaatggcaaatggagagtctgcgtagatttcacagaccttaacaaagcctgcccgaaagacagcttcccattaccacacatcgatcgcctcgtagaatcaacttttggaaacaagctactgtcattcatggacgctttcgctggttacaaccagatcatgatgaacctcgaagatcaagaaaaaaccgctttttacacagaacaaggcatcttttgttaccgagtgatgcccttcggactcaagaacgccggggcaacctatcagcgcttcgtcaacaaaatcttcgcattacagattgggaagacaatggaagtttacatcgacgacatgttggtgaaatctatgacagagaaagatcacatatcccatttacgcgaatgtttcaagcagcttaaccgctacaacgtcaagctcaatcctgcaaagtgccgcttcagagtaagatccggcgagttcctcggatacctagtcacgcaccgcggcatcgaggcaaatccaaacaaatcgaggcattgttgggaatggcgtcacctcagaacaagcgagaagtgcagcgcctaaccggaagagttgcggtccttaaccgtttcatctctcgctcaactgacaaatgcttagccttttacgatgtgcttcggggaaacaaaaagttcgaatggatgacccgatgcgaataagcttttcaggaactcaagaagtacctggcaactccacccatcctcgcaaaactcgtaatcggagaaccactatacttgtatgttgccgtatcggatactgcggtcagcggagtgttagtcccagaagacagaggcgagtagaaaccgattttttacgtctcgcagactttcaccaacgcggaatctcgctatccgcaaatggaaaaacttggtttagcagtcgtaatgtcagctcggaagctgcgaccctacttccaatcccattccatcataataatgggatccatgccactccgcgccatcttacacaatccaagccaatcaggacgtctggctaagtgggcaatcgagctcagcgaatacgacatcgagtatcggaacaaaacatgtgcaaagtcccaggtccaagccgattttattgtcgaactgcccacctaggaggcccgggaaaatccgctcgacacaacttggcttctacacgtagacggcttgtcatcgaagcaaggctcgggtgtaggcatccgcctcacctcaccaacaggagaggtcctcaagcagtcatttagattaaacttcgaggctaccaacaatgtggtcaagtataaatcgctcgttgccggacttaatctagctcggggactaaagataggaaaaatccgagctttttgcgactcccagctcgtcgcgaatcaattcaacggagaatacacagctcgggacgaaaagatggaagcctacctgattcatgttcaaaatctagcgaagaatttcgacgaattcgagttaacaaggattccacgaggagaaaatacatcggctgatgccctggctgctctagcctcaacatctgacccgagcctgaaaagagtcatcccggtggaattcattgagaagccaagtattgagctcggcaaagaagaacacgtcctcccaatacatatcagcgcggatcaagacgacctagatgactgcaactcagaatggatggaacccatcataagctatatatccaaagggaaattgccctcggacaaatggaaagctcggaaattcaaagctcaggttgcacgtttcgttctagtagatgcaaaactttacaagtggcgattatccgggcccttgatgacatgcgtggaaggagtagcgatttgcaagatcatgaaggaaattcacggtggctcgtgcggaaatcattccgggggaagagctttagccattaaaataaaacgccaaggatttttctggccgacaatgatcaaagactgcgaaaatttttcaaaacgatgcaaaaaatgtcaaaggcatgcgccaacaatccatcagccggccgagctctagtcatcaatcgcctcgccgtatccattcatgcgatggtcaatggatataattggaccaatgcatccctcgaagcagaaaaactagttctcgtcctgaccaactatttctctaagtggatagaggccgaatcttacgccagcataaaggacgctcaagtcaagaactttgtgtggaaacatatcctatgtcgccacgggataccttatgagatcgttacggataacggctcgcagtttatatcgacccgcttccaaggcttctgtgataaatggggaattcgacttagcaaggcaacaccacgatatccccaaggaaacggccaagccgaggccgccaacaaaacaatcctcgacggattgaaaaaacggctcgatgctaaaaagggctcgtggtccgacgaactcgaaggtgttctatgatcgcaccggacaactcctcgccgagccataggagaaacccctttcgccttagtctacggaacggaatgcgtaattccagccgaaatgatagtactgagcctacggcgaagtctatctcccgagaacgatcctgataatactcagaggctcctcgacgaactcgatctaatcgatgaacgaagagattcagccttggttcgcatacaaaattatcagaatgaaacggctcgtcattataactcaaacgttcgacagcggagattacacgaaggagatcgggttctccgaaaagtttttcggaacaccgccgaaccgaacgctggaaagctcgggacaaattgggaagggccatatctgatctctaaggtcatccgacccggagtatatgagctcgccgacctaaacggcaaagccgttccaagatcctggaacgcaatgcacctaaggaagtactattactaaatccaaggtgacaaaacttgaactacgaggtggcttgatccctgaaaagggtacgtaggcagctcgtctttagacgagttcagctaccccccattaaaaagggggggagtgggtccgtatatccatactcccatttatcatcttgtaagtttttaactttggtgataaataaaaatcaattcacaatttctgaacgtattgaacaatatgatgagcgactgctcggagtatcttttatgcctgctcggcaacagtgcgctatacaaataacgagataaaatctatcagataacctctgatcagaaatttcatcttcagatacccggttatactataaacgccggtattctagctcatttctaaacgctgaaaatgaatcggatcgggtcgcaaccgaaatgtttaattccaaaatccaactgtacttatcagaaaaaggttcggatttaaataaagatcgaaaacttcggaattgattaatggataaagccatccaggcatgaattcataggttctaaacaagggataaagccatccaggcacaaaagtaaaaagaaaatcatcaaagtttattcttgaggctcggaaggaaggacatcagcagccataagctcggacaaaggggaaatcatgcgacctaagctaggatcgtaaagaaatcagctgggccagctcgcccaaagctcaagctaagctggaaggagtgacggttactcaggtcgagttacagtccagctcgggcagctggacgagtgacggttgagctcgaggtagctggacgagtgacggttgagctcgaggtagctggacgagtgacggactagctgggcggttatgggcgaagagatacaactcctcagaaaggtgcaactcttcggaagggcgcaactcttcggaaaggtgcaacttttcggaaaggtgcaaggaacggatgtgttgattcgggaagcatccattcgccccctatataacgaagggcgcccaggaccattccactcaccacaacacaccgaaaacacaagaaactcatcattaaaactctctccctcttgggagaataaatagtcttaggattcggtagccgggctgtggccggcaataaagaaggagggtcggatcgaccaaaggaaggtgagggctcctagactttgagtctaagggttctaggatgtgagttagtagtcggatccttgaaaggattgactagtgggctgggtagtatccgagtcatgtgcatcctacacaagactcggtccgggtagggatcggctgaggcggggacgcgactcggcggaggaccggcgggtcttaactgacctgccgagaatcggccggactgatgcgcgatcttcccctctctgaatcctctccacggatccgagtagtgtatggcatatagagcattgcatggacttgcatatgactaagtaaatgagattacttatggctcaatgactttcaggaacgaatggtgatcgtgggaaggacttggcttaggcgcgagagactcaagaccgggatgatgggtggtgatagttcggatagtttagggatcgattatatgacttgtaatagcttatatgcaaactcataggttgtatcgaatcctttgcttaatcaataaagtatccagttgtttgtttactctattcgtctcatatattgaatcacggaatcatatggaacggattagactaggaaagaacctcataaacggttagggctgagtcacttagtggcttgggtcgagagaactcgtccggacttaggcagtcctgatcggggcctttcaagttggtatcagagcatgcttggttctaggactaggtgttgggttaaggggtatcaccactcgtcggcttgagaatctcgcggtagttgttctttactcttttgcgattttactaggagttatgtggattaactttggaggtttcgcagatgggtaagagcagcaaaatgggaaagagtaagaaggacaagggcattgtcgaggatactttggttgaggaggaaacgatgatcaacgagaaaaccagagtcgggacgatgctcgatgggacagactcggccggacttgaggccgggaagaagtccataaatgaggaagcaccggagagtagcggtgcaagggacagcacggataaccggaacaatactccaacggcccaagaacagtgggatttgatgaaaggaatgatggcgcaactagccacattaaccaaggccgttgtagcagatccggtggtcaaaagagtggataaccaaaaggacgatgattcggaagttgtggaagtgaatccgcaaccgaatcatgggcggaaaaggggagactatctgagtcttctcgaacatgtctcaaggctgggcacgagacacttcatgggcagtacggacccgattatggccgatgagtggaggagtagactcaagaggaacttcaagtctacccgctgccctgaggattaccaaagggacattgcggtccacttccttgaaggagacgcccataaatggtggttaaccatccagaaacgcagagggaacgaggtccggtcctttgcgaatttcgaagacgagtttaacaagaagtactttccaccggaggcttgggataggcttgaatgtgcgtacctcgacctagttcaagggaaccgaatggtgcgtgaatatgatgaggaatttaaccgcctaaggcgttatgtgggacgtgaacttgaggaggaacaagctcaagtgcgccaatttatccgtggactaaagatagagatccgcaaccattgtttggtctggacattcaactcggtttctgaattggttgaaaggacagcaatgattgaggaagggatcgaggaggagaggtacttgaatcgagagaaagcaccgatccggaacaatcaatccaccaaacccgcagataagaaaaggaaatttgacaaggtggataacaccaagtccgatgctaagaccggggaatgtgtgacctgtggtaagagccacaacggaacttgctggaaggccataggtgcatgtgaccggtgtggaagcaaggaccatgcgatccaaagttgcccgagaatggaaccaggacagtccaaggttctcggtgaagagacaaggacttgtttctattgcggaaagactggacatctaaagcgagagtgccctaagttgactgcggagaagcaggccggacaaagggacaatcgcgggggcaacggactgccgcctcccccaaagcggcaagccgtggcaccgcgagtttatgagtagtcggaggaagctaacgatgccggaaacttcagggcgatcactggtacgttctcacaactccctattcattatttcaataactgcatttgcattgcatcatgcatatgggaaaggggaggtactcagcattctaagggaatgtgtagggaccttgagagtaggtgacgtagtaacgcacactctatttgattctggggctacacattattttgttagtccagaattggttgaaacaggtggattcaggaaagaaccaaacaccgattatggaatggtacgagcggccggcggacaggcaatgtatccgaccggatttgttcggggtatctcggttgtagtgaacggtgtcaatatgcccgcggtcctaatcattgttccactaaagaaacatgatgttatcttagggatggactggttggggaagtacaaggctcacatagattgtcaccgaggacgtatacaattcgagagggacgagggtatgttaaaattccaaggaataagaacaacctcgggaagcttggtaatctcggcaatccaggctgaaaggatgctcgggaatggatgtgaggcatatttagccacgatcacaaccaaggaagtgggggcgagtgcggagttgaaagacattccgatcgtcaacgagttcttggacgtgtttgcggccgttagtggtgtaccaccggaccggtcagacgcgttcacgatagaagtcgagctcgggacaacctccatatctaaagctccgtaccggatggcacccgcagaaatggcggagctaaagaaacaattggaggagttgctggataaaggattcatcaggccgagtagctcaccatggggtgcgccggttctgtttgtgaaaaagaaagatggtagctttaggctatgcatcgactatgacttgactgaccggaaaagacaccgcattcaactggtcggatgagtgcgagaaaagcttcctggagttaaaggccatgttgactaacgcaccggtattggtcttaccggaggaaggtgagccctatacggtttatacggacgcatcaatagtgggactagaatgcgtactgatgcaaaaggggagtgttatcgcatacgcatcaaggcaattgcggaaacatgagaagaactaccctacgcatgatttggaaatggccgcggtagtatttgccttgaagatttggcgatcatacttgtatggtgctaaagttcaaatctatactgaccacaaaaacctaaagtacatattcacccagccggagttgaatctaaggcaaagaaggtggatggaacttgtggcggattacgacttggacatagcgtaccatccgggcaaggccaatctagtcgccgacgccctgagtaggaggcgctcggaagttgaggcggaacggagccaagtggacttggttaacatgatggggacattgcatgtgaatgccttgtctaaagaagttgaacccttagggttgggagccgccgatcaggccgacctgcttagtaggatccggctggctcaggaacgggacaaggagataaaaggatgggcactaaacaacaagaccgagtaccaaacctcgaacaatggtacaatcgtggtgaacggtcgagtatgtgtgccgaacgatagggcattaaaggaggagatcctaagagaggcgcatcaatcaaagttctcaatccatcctgggttgaaccaaatgtaccgcgaccttaaaggtactaccattgggtaggaatgaagaaagacgtggccagatgggtggccaattgcccgacttgtcaactggtcaaggcggagcatcaagtaccaagtgggttgttataaaacctacctataccggaatggaagtgggaccacataacgatggacttcgtcactagactgccaacggggatcaagtccaaacacaatgcgatatgggttgtggtagaccgattgactaagtctgcgcacttcatggcgatctcggataaggatggagcagaaatcattgccgagaagtatatagacgagatcgtgcggttacatgggattccggttagtatagtgtcagaccgagacacaagattcacgtcaaagttttggaaggcttttcaaaaggccttaggaactcgagtgaacttaagtactgcctatcacccacagacggacggacagtccgaacgaacgattcaaaccctcgaggacatgttgagggcatgcgtcttggattggggaggaaactgggagaaatatctaaggttagtagagtttgcatacaataatagttttcaagctactattggtatgtctccctatgaggcgttgtatggccgagcttgtagaacaccgttgtgttggacgcccgtgggcgaacgtcggttgtttggacctacgatcgtggatgaaaccatggagagaatgaagttcttaaaaatcaagttaaaggaagcccaagatcgacagaaaagctacgccaacaaacgtcgaaaggaattggaattccaagtaggagatttggtgtacttaaaggcaatgacctacaaaagggcagggcgatccacctcaaggaaaaagttaagcccaaggtatgttggcccgtacaaggtgatcgaacgagtaggggcggtggcatacaaacttgaccttcctccaaaactaaatgtgttttacaacgtcttccatgtgtcacaattacggaagtgtttaagtgatcaagaagaaagcatggaagatgtacctcccgggttaaaggagaacatgacggtggaagcatggccggtacggatcatggaccgaatgacgaaaggtactcgggaaaatcaagggatttgttaaaagtcttgtggaattgtggaggccgtgaagaatacacttgggaaaccgagaataagatgaaggccaattttccggagtggttcaaggagatgggtaaagatcaacttgatgcggattcgaggacgaatccaattcaagggggggagacttgtaacgcccgcgatcctcaataggatcgttggctaggacttgatccaaaagaagaaggtggagtctcggacaagtgagaaggagcaagccataagctcagacaaaggggaaatcatgcgggctaagctaggatcataaagaaatcagctgggtcagctcgcccaaagcttaagttcagctggaaggagtgacggttactcaggtcgagttacagtccagctcgggcagctggacgagtgacggttgagctcgaggtagctggacgagtgatggttgagctcgaggtagctggacgagtgacggactagctgggcggttatgggcgaagagatacaactcttcggaaaggtgcaactcttcggaagggcgcaactcttcggaaaggttcaactcttcggaaaggtgcaaggaacggatgtgttgattcgggaagcatccatttgccccctatataaggaagggcgcccaggaccattccactcaccacaacacaccgaaaacacaagaaactcaccattaaaactctctccctcttgggagaataaatagtcttaggattcggtagtcgggctgtggccggcaataaagaaggagggtcggatcgacctaaggaaggtaagggctcctagactttgagtctaagggttctaggatgtgagttagtagtcggatccttgaaaggatcgattagagggcttggtagtatccgggtcatgtgcatcctatacaagactcggtccgggtagggatcggctgaggcggggacgcggctcggcggaggaccggtgggtcttaactgacctaccgagaatcggcgggactgatgcgcgatcttcccctctctgaatcctctctactgatccgagtagtgtatggcatatagagcattgcatggacttgcatatgactaagtaaatgagattacttatggctctatgactttcaggaacgaatggtgatcgtgggaaggacttggcttaagcgcgagagactcaagaccgggatgatgggtggtgatagttcggatagtctagggatcgattatatgacttgtaatagcttatatgcaaactcataggttgtatcaaatcctttgcttaatcaataaagtatatcccattgtttgtttactctattcgtctcatatattgaatcacgaaatcatatggaacagattagactaggaaagaacctcataaacggttagggctgaatcacttagtggcttgggtcgagagaactcgtccggacttaggcagtccggatcggggcctttcacttctcggcttctaaagacccaccctcctcaagcaccttgatcagctgcgcattggctcgagcttgagacaaatacatgaactgatcgttggcgtcctcgagaagagccattttctcctcgaccaccttaaacttggcgaggaagacctctgaagcttctcgccttgctttctgcgcagcccgagccacctcgttgtctctgagccccctcgcctcggcaagcatttgtttacagcggacgacctcagagtctatcctcagattgctctcagctaatttgagagcattctccttgttcacataggcttccctcttagcctcctcccttgccagtttcgcctcggtggcctcagagactgccgcatctctcccgttcggctttctcttctctggcctcagtcgccgccagcttgttgactgcatccagattactccgcatagccgagtcgtaagactggaccattcggttcattgaacccacaacctgaaatttacatatgcaatcatactcaaaaacggctcgtaaaataactattttcagaaacggctcgaaaaatacttacccggagaaaatgagatgccgtctcggcatattttctggactcaagtagagtgtccggaggcggaagcaggcgacccgcgcactttccgacgaggttcgccgaagcagctctgtcctcaaaaataggaggtttatcctccttcgccagcttctttttcttcttcttcctcctcttctcctgggaggtgtcgatctgaggactcttccccgaggccttatcgcgcgcaggaagcgcgattaccgcctgtgtggcagtttcgatcggaggatcagccgggacttggtcgacaacatccggcgcggcgggtgcagcaacctctggaacaacctcccgagccccagaaggttcagcagggccgctctcttccacgacgcgtctctcctcggccgcacgtttcttctcagcggcaagtctcttcttctcgtaaacttctcggatggtgggattagaagtttgcatattgacgaaaaactgcgttcggtgatcggaggattctgaactggatgggcaggaaacaccgtgaaatagcttgagtgctcttttgactcaatctcgggagaagtgcttcgtccagtgacacttgcggaccgacaactctcgatgacaggaaataaggtcgtcgggacacggctcgagaaacctgatcgggcgatctgcagaaacatcaacgaaataatattagcataaatcacaataatcacctcgggcacaaacaagtcaattcacggaatatctaaactacccaaaattccccatttcgtcagaactttcccgacgagatcttcaaggaaagcgtcttccagagccacaaagaagaagtaatcagtgtaggcatcatccttgctcggaaaaccctcgataatcttcatgttcttagccggagaaacgtagtatctatccgcctcggattttggaactcgccgaatttccaaataatttcagaggtgagcaagcgttcccgatgagatgtctaagcgatcgggcagtaatttgtgagagggcaatttgatacgaggtcacgtagtccaaaatcaacctcggaacaggcaaccagagaaaagaaaggtagaaaaatccttcatacagagtaagaaagccctcgggaggatcgtcggctcgttcatttgggctaggaacgcgaagggtgacgttgccaaaaccgaaccgagcccttaagtcaaacaacgactgctcggtggataaagttgagcctcgagggtttgactgaaccacctttttgtttttcttcctcttctttctctcggctttctcaaaagcggtttgctcgaacgctcgaacaaggttctccgtctcatcaggcccgaaaaacagatgctcttcgattttaacttcgggataaaatggctaggtcacgtcctggcaattcgaagcactggtctcatcaacagctgggacacggagcttacgaacaagggacggctcagaatcctcaggcaaatctaatttgcgagcaatatcagcagtagcgtcctcccgagccacaaagggagtcgcctcggatgcgttcgaagacgaagctgcatcagcttcggagccctcggatgaagtccaaaccatccgacgcttgtaaatccggggaagatcatctctatgattggaatcgctagagtcggcgagcccactggaaaccaagagagatacgctgtttcgtggaaaattcatcttcggctcggaatcaactaacgaaacaaggatttggaagatttctagccgaaaaaatcaaaatactaacaaacaacgtcggaagactaccggaaaaagaaaaacgatgcaaagaaatcaagatcagagaaaaagaagcaaacctcaaaaattttcttcggcaacttcagataaatgaatcctgaggagcagctcgatatatatagagacataaaggcgcgtcgggtctgacggagaaattaaaacacttcaacagcgcgtgagctcggtaggagaaaacacgcgcgcaaacctcgggaataagcaagacgcttccacttctcaagaaagaaggcggccacgcatgaatggaagtttgaccgtccgggaagtcgaagcgccaaggatcgtgaactgaaaagatatactgccggctcggttatttaaccgcacgaaactcgtcgctcgtaaacgaagacaacgagctggggggcaaactgttggggtcggatttggtctcgtaggaaccgagccaactaaacaaactccaagaacgcctcggaaacatctgtcgggtatatttggctcgggagtcgtttcaagacgcgtactccgggccgatgacaagtacctcgaaaatcgcatcaaggaatcatcccgagccagattagaaaacaccttggagaccctgcaggtaatcttctgacccgaatttagcagcgcctcgggtacttcaggataccaccccgaggcgaatctcgtaaacgcttcgggtaaacggtctaactcgcacgaaacgagccgttcgactacaaaccgacaagagatacccggctcggaagaaaattcacacttaaggccaaaacatctcaatcctaaaggaaagatatagacccgacgcatggtcaagataccatatccgaaagacctggaaatgatatttggaaatcatttcaggatattaacaacaaagagaaaatcctgagaaaatctccagaagataaagatttatcactgccgcctcaaagataacaacaaatctcccaagaatatcgcgaggggcggctcaaagccttatataaagcacctcaagggatgagagaaggggcacgcacaaaaacgctctcaacttcaggctatcaaaaacgctctgactttgaaggcaaaaacacttattttcatattctagaacacttgtacgataaaatcattactttctcattaatacaatcaagaacaccgtccgcggtaattgagaattctgttgttctttgagaatctcacaaagattcgttctttgaagaaacccttaaaacaatttctattgtgcgagttttgactctcgcattgacttaacttagctacctctcgacgagcttgaaaaaagtttatactaacaaggaaaggaagggattttcaaagaagaaatttggagtgcttgcaaaatcataagaaagagaaacaaataaaacaagtgcttgcaaaaagataaagagagtgattttttcgactactctgatggtgcctcatctgatgataataactttactgtatacggcgaacctcaaaataaagacgaagattcacaaactcttcttcctaagaagagacctcagaacattgaaacgaccggatcggctgggaactctgaggatttaaggttggagttgtctacgttaaaccttgatgtaggacaacgatacgtgagcaaagacgagttggactatcgactcaaacttcttgcggtaagggatggattttattttgatgtaccaatatcaaatcgactacagtaatttgtaagtgctagtttgatggatgtcgttggttcatgcatctacacagggggatgagccatattgttttgttcgtatatacgattcggaacacacatgttatgtgacggaacgttctgatcgatctcgaaaagcaacacttgatgttttgggagttctttacaggactttattggtgacgttggtctggatgttaagccaaaacgtgtcggaataattatcaataagcattttagaataaaggtaattacaatattgtgctgacttattgattgtgttacggctgacttattctcattttggctgatctattaatacattccgactgacttctagtttacaactgagttataaatatatgattggcttataattatattaaggctgaattattttttattttggctgagttatcatcactttacggctgagttatgtttattttagctaatttgtatttcagtgtggctgagtcatagatattttatagctggcttatcattacgatacgactgagttatttatatgttggtgtcaatagatggattattggaagacacgtaagacgtcaaagtttttaacaacttagtattttaatcatattagttgatgttgtgaaaccatgttaaccataaatttctgatttgagttttagagatcgtttggtaagaacaacaattactatagagatatttcaaatatcatatttggtagtagaagctatacgtttgttactttagaaaatgatattaaaaaacgactgatttaaaatattaatactcttaagtttttaaaatctttgttgtcaacgatttcttttttttggaaaaaaaattagtacttgttctattatagtaactatgactcaaatctcatgcgatatcacgagaaaactattctaaatttgtttatataataattttttttaaaacaaatcaaattcgaaatgatgtatattataaaattttagtagttacttaagaagaaaaaaatatgtaaacctatttgtaacaaaacataaatattagtacgaaaagttgtgataaaaaacacgagtataacatacatgacgaaagacacatatttaaacgaatggatgtaattttcttaaaaaccacaactgtaaaatgtaatctggagtggataaaacttttgattttaaaattattgaaaatatattttacgaaagattacaacaaaaaataataatacaatattagaatatatttattaggagtacctttaatctttttgacatcaatcatctctttttaactaaaacttgtcatttttaaattagtgtagagattgaatatttgttaaacaaaataaatagagttcagaagatatgaacaattaaattgacacaactctttgtaaaaactataatttttagagataaaaaatataataaaaaatacaaataaaatatggtgaaaagacataattttaaatgactagaagcaacttcctaaaaagacataagtgtaaaacatattttttccaattcataaattaaaatatgtaacaaagagttatgataaaaaaaatatgcaaccaaagaaaatattaatcaaaattaaatatatattatgaacgggtttgaagaaaagacgaaaatgggtgaaaatacacaattgttcaaaatatttttctaattattaaaaaataaaataaaacaataatgaagggttacaatcaaaagatacaaccataaataaatcaaaaataaataaaaatattttatgattcattacgatgaaaagacacaactgttataggtatttatataaattatttttaatgtataaaatatttaacaaagagttatgatgaaaagacgcaaccatataaaacaatttcaaaaaacactaaaataaaaatagtttacaaaaggttacataataatttgcgagtatacatatcaaactagttcgtcaaataaagttaataattcagcatttcataaaacaaaccaaatataataaaaataaccctaattattttaatgaaaagatgtgatagaagacacaattttaaataactatcgtaaatattgtaacaaaaaaatacgataaaaagatgcagcctttgaaaaatgaaaagatacgattgtagttgaacaaatataacagtaaaataaatagggttatttaacgcagcccttgcgataagaagacgcaacctttcaaaaccaaaaatataagactgtagaagaacaaatataattgtaaataagaaatagccgttaatattttattggaaagatgcgataaaaagacacaaccgtaaaaaaccttaaaattttagagaatattgccctctaaggcactttttcaaaacattatacgtgtttcaacacttaaaaaaacattaggcactttcccttgtcaaagttactattttaccctaaccgattgtcttcaaaccaaacccgcattaaccaaaccactcgtcggtttaagcaccagatgaatttgcagttaccttatttgactttaaaagactttttcagaatcgtgtaaaaacctaaatccagtaaaaactgcaaattactgtttgttgaagaagacgactccggcgacgtcatcctcttcagcttttctggtgactgtgcgatgcagaagattccggcgacgggttctctgttcttaaaccctaatttctacagtttatcgaacatgacgacttctaaattctctgacaaaccctaaaaatcttcaacttctccgtcactgtccaccaccactgttgcacacgactttctctcttctgatctctccaccggtatttcccccaaatttctccatgttcttatatcgaattggatttatttttcatgtaaaatttgtattatcgaaactcgatacagttatacttgtctgcttgattattaatttctagattctatcttcggttctcggttctcgtttttcgtattttagttacaaactcatttgattgacaaaaccatatactctgttgatgaattttgctcactcttgttgtaatttctcgtaaagccttaatctttttgggtttctttcacttactagtctttgttaggttcttccacttcaccttgatcctatgattattctctcatgtttagctttttacttatggtggttgtgtctatctgtttttttttttttggattttcggttcatttacgggcctaaatactgaccagagtgttctccaagttcaggtgagtgattagtggaattgcttgtgtcttataatgtaagctagcaccaatatgactcattgtgtgttatgattttacagtacctaattagcagtcgccctttttgtggacagggcacataatcaattcacattgtgttatgattttacagtaactaatcttcagttggtttgtgaactttgttttgtttactctctgatattttggcattttcaactttggttgtgatcttaaacatgttggatatgatctgatggtcaactatatttggataacatctagttatttaatttctaatgattttggctgtgtatgtcagttgaaatacaactttccacaataacatttttctttactcaacaatttccagatttcccgtcacttcagttggtttgtgaactttgttttgtttactctctgatattttggcattttcatttgtaacttgattttggtttttggagaagaaaaaactacttcagatttagacttgttttttaaaaaaaaaggtctgcatatagttataaatttaatttcctatatctattgctgtcatatctaagatgagttgatttgtttgtgttacaggatttggaagatagtttttcgactaaattgatagcattggcagactagtttattctgttactctatggaaggtactcttaatctgttaatctaatctaagcaagcaataaacagacgtttgtgaactcgttttatttggtcctattatctgttaatctaatctttcttgtctttcactcgtttcttgctaatgacagggtcaacgtctcagaaaccatcttttcagtgtgattcaaaatttcctaatagactctttgccaccgatcaatatccgaggagaaggctaaatatatactcaagaccatatattctatcctttatcaggaaggtttttcatgggacaaaggaattggatttcactcttcaatcttgctttcgacctctattccatttgccggtcagtaggtgtgcgatgtcgggtaagcttatgcatgccttgttatgtaggcagctggtaacaaagaaaaagtatgagctgtggacagtatttggtggacacccaatgagattttcattaaccgaatttgcttgcgtgactggattgccctgtgctgagttttctgaggattacgatccagatgatgattcggtttttgttgatggtatgaagagttactgggacgagttaattggtccagacaagactgttaccttaagggatgtatctgccatgctaaccaacaaacgcaagaccttgtcatctgaccacagacttaagcttgcgtttctacttattgtagatggtgtcctcatagcatcgaaccaaatttgtaggcctacatttaaatatgtagagatgttggcagatcttgacaaattcctttcatttccttggggtaaagagtcttttctgaagacagtagtagggatgagacccaacaaacgaaatctcggtaagtccactggtaaaagacagctgacaactgaccctatcaagagtttggtgaatcaacttcagcagaaaacattccgtttgaaaggtttccccctagcgttgcagctcatagcatttcgtaacatacctggactgttagatttgttgttcgatgactcaacctctaagacaatcctccattggaaacgattaactcatccaaaacaagttatatcgctttctcagattcatgctttagaaagcaaccttaaggtattcttttacacttcaattatatatatggtgtctataatattctctttctataaatccagtcttatatactattaataatcttatatttttggacagctgccagtggatccgcttatagttggagacattaatgctgaccaaagttgggcagactaggacgatgaggtaaaagatatgaaagttgcatacatgtatgatttgataatggcatctcatcaattcaaaaaaagcgattggccaggaggtgatgacacattgcctccaatttcaatcccaaagaagaagctatctggtgttcataaaaagcacattgtggaccgtaagaagaaattaggtgtgaagtttgaggctcccaaatccaagcaaaggtattcaacttgtagtaaaccggaactcaagctctctgatgatgagaagtccaggctcctcattgaactacaaactaaggtggaagagctatcgaaccgtgtaatgaagcttgaaaaaacaagaaaagctgtcagattcaagcggtacacaaaactctcctccagttttgttgcatgttcttctagatcaaagcgcaagaagacaatgaatgtgcctatctaatctcaaacccctgaggtattcaagatttcaaactgttttaaatatttgaacattatcatattcttgtgcatttttaaagtttatcgcataataaaacttgtaattttctcatagacttcatctcagtcacacacgctgtctgagcatgtatttggacagcaagaagttggacagcaagtcccaaacgataatttagatcaagctaaagactctagtgatagtaccccattgacaaacacggttagtgtaatagttaacttcaactatttccaaacttggtagaattaacgacgtcaacacatcttattgcaagagattactgatgaccccatggatgtctttgttaccccactacaatcagagcactctaataaggctgatgcaaatgaaggcaaccctatttatgacactgatgtcaaagatccaaatgccaatgaagaagatgttgatagcaaaatgcaggtacttttataaatacaaacacaacaaatcaaagcctttctttaaccatcaaaactacatattcttttgtgatgtcttaatgttaatcctgagtagacagttttcttggacacccataatgacttatatatataagagacattgactattgtaatttccaatcaggttgatccaagttcaaaccaaagcgtcgaaaaactacttcctctcaaccaagaccatattattgatgtaagataatttagtatttgttggacctactgcgcagaccaatggttatgtgttttttttaccaaatccattctacaatttctttcaggactcatcagagagagagttcctgcaatacattctggtttagatctgccaaaagaacacaactctgaagaacagcaatcgaatgccaatgaagcagatgttgatagcaaaatgtcggtacttatataaatacaaacaataaatcaaagcctttatttaaccattgaaaatacataatctattttactctctgtatctttaccacaacaaattcattctacaattactttcaggactcattggacagggatcctgcatcacattctgatttagatctggcaatagaacagagctctaaagaagagcaagcgaaggtattactttaagattatgtctgaactatgaatgaactaattatgttcttaaaaagtcaagattatgtctgaactaattatgttctttaaaaatattatgtgtttttttgttaccaaattcaatctacaattactttccggactcattggacagggatcctgcatcacattctgatttagatctgccaatagaacagagttctgaagaacagcaagcgaaggtattactttaagattatgtctgaactatgaatgaactaattattttctttaaaaaagtcaagattatgtctgaactaattatgttctttaaaaagaaggtcaaccatatgttgaactaaattttgctcgcaagttaaatttttatattggacaggtgtttgttgatacgttataatatgcaaataatatttgctaatgtttttctcaccatatttttgtgtacttcaacattcaggacaacatggaggcggctcagcatctcattcattgttagggtttgcaaagttcgcaaaaaagaaggtaaaccttatgtctatactaaattaggctcgctttaattggacaagagtttgtggatacgttataatttgcagctaatattttcttatgtttttctcaccatcttattggtacttctacatttaggtcaccttggagtcggttgcggtatctcagtcattgttacagacgcaaccagaagtcaacttcgatggtgatcctatgaaggtatacagtaacaataaaaaacagaatttggttttcggttctttttgttattggacatgattatttggttacttaataatttgcaggatatttttcttataataggtctcctcattttatatttgcaaaagatattctaatacattttcaaaccaatctcattattacaggctatggtaatatattctcatccaatttatgataaaattccaaacccgacaaacagtcagaatcttctcccacccatagtgccaatattgaactaactccaacaaaggttttttattataatataattctgtccatctctgcaaaaataatttttttagagatcagtttcaataatttttcttacaaataattacttatcctttttgacatatcctatcaggatcaaattactgattctcgagacattggtggacatgatcttgatgataatcaggtatgctctaaacaagataatcacaacttctttaatactatgcactaatggtcctactttcaaaccttatgatggttttcttctttgcactaatattatattataatgtacaggaagaaggttatgttgctgtttcagattcatctccagcgcgagaaagagagaaaccaattctgtctgaagcagaagtttttcttgtagcagagttgttatcaaaatcaaaatcgggctcatatgaacttttaccttcaatgagtaaataagattttgcattatttcgcaataccctctccgttgcaccgaatacgtatggttatacattcattttatttatgtccactacagttataatcttgttataggcttatgctgttttttctcctcgcagtgagcatctcacttcgtgtggattcttaatttcaaactcattccttctaacatttgccaagtctacaaactgggtttcaactctagtataaaatcaacaatttttttacaaatatagcctttaaaatctttagtgtgacagtctaatctcttattgtttattgacctagcatatggaggttttggtctccttactttctcaaaagtttgcgaccacacttactaaccagcttgccgcttttgttcaaccatggttcgcaaaccatctacaaggaaaattcaaaagcttcaaagctgccaaattcaagtcacgcgtccggtggtctgaacccatgaaacagttcatcgttgggcccaacactgaatggtttacagaaattgataccatttacttgcctatgatatgggattcaaaacactaggtaggacttgcaataaatctgggagtctggtccgttgaaattcttgatccaaatacagatctttacgaggaagatgaggttcaacgtttcattgaacctgtggttacaattttgccctatctcatccaaaggtactgtaagcccgaatgttctcagaatcatagtcttcagcctttttattggaagcgattagatggcttatataagaattgcgatctggtgactttggcccgatggcaatgaagttccttgagattcaggcaagtgataatctcccagaaaacatggcgaaaataacaaataaacacgttgactcttttaggcgtaaatatgcagacatttatgaggagtttgtctgtcctatctatgcatctgactttagtaacaagttatcactttctctgctttttgtaatattaaccatctttactttccttttgaatattatcactctgtaagctattttctgaacatgtgtgttctattttgctttgttgaatagtaaacataatctaattgttgttttatgaattaggtctatcctttatttttcattattcccaaaaggagcaatctctattttatatgatatacatggatttaatgtgatatgcggttttagaatggatagagtttgatcatattattgtattccatccatatatatctatccaaaagttattagatatgtggcaaatgacacgactacagaatcaagaggtattaaaaaggtcactattttactctatgcttctacatttttgtattctttaaggttatggcaatggattttatgtaatgaattttcgtttttatgattgtctatagatgtatgatgagttctgttcaatcttactaaatcaattcaaatcttagacaataaggttatatgggtcttgaatggataagcgcagacttatacaataactttggtgtagaatagatatggctccgtaaaaatgtttctgtatggacacatataaatggactcgttattatggacatcaaaaagttattattctatactaaccatataataaaggtttttacttatttagtaaaatgatccaaatcttaaatactaaaaccagaaaaaagaacggagcgaatacatgaaaaacaaaggttcttaatggttcaaataaaaagacaacattaaaattgaacttcacatatttggacaagttttgtgtgctgcccttttgcatcgacagcaccctgcattcattgctcgcactcagggctgagcccagtaaactccatcgatttgtacccatcccccgtcctgtccataaggctccacccataaaggtgccctgtagcattcttcaacgaaattctcatatgctatccctttgtacaatacatcagtcaaggcatggggattgtttgcttcaagacatttattgaaaaaatgataatagatcgagtgtggcattgaccaccacatgaaataccgagatctgtcaagtcggacacagcgtagtgtttcctctgaatacacagccgccttaaatacaggacctaccttaatcaaatttttcaatgcatccacgccatcttcaaccaggtagctaacaattttaacaagcaatgaagcgggcatgtgaaattcttgaatgacggtctcctggccaaaaaataaaaacccaataagacaatataaataaaagtataaagtaagagagattttgaattttttgttgtttgcaaaaaccatttttacactacagccggctgatggttcaatgttgcgtttttgtcttttcataattaaaggaataatttctaaaatggggaaaatcgtggatacttataaaaaaaaggatatggtttatattcttctattcttttacttccttttattttgccccacaaacagaaatttgaaaaacagaatattccctgtcttaaccatttcgcaagtgttacggagatcagttttcatttggagacacaatgtaaaagtaaatattcctaatttacttaactaaaaatcaaaaaaattatgtggatatgtagatcatgtggtagttatccagagaatattattattctcttttaccttgaaagaccaatctaaaaattataaaaaattaatctaaccataataatctctagctacaaaatcccccacgattcgtttaagttggctccataccccattccatcagtttcaacttcaaaacacagaaattatgctcaagttaacgaaggtcaacaagagtgaaccctcatctgtttcaggtgtcaaaaaggtagtgcagcgtatcataagctatagttttctacgtctgacattcaacgtaaacaaaaaccaattgtttgcttccgtttttttttactcaggttgctgttatccctgaaattcacatctcggcacccgtacttgctaaaattgttagctacgttgctaaagaaagcgtggaggctttgaaacccttggtgaaagctggaccattatttaaagcggctgtgtattcgaaggaaactctaagttgtgtccgccttgacaattctcgttattacatgtggtggtccacgacgcactccatctattatcatttcttcacaaaacgtcttgaagccaaaaatccacatgctttgaatgatgtattgtacaaaccaatagcatatgagaattttgctgccgaatgctatagagctaccttatgggcggagctttacggagagtatggaggatagaaatcaatgtgttcataatgtgatgttcatagttatcttgtcatgtacatttctatacttgatcaatcttatatctttaggagtttaatcctaggtaaattcaaacccccaactaactgtgttggttgacatgaaagtgttagctaattccccggaatagattcttaattgctaacccttttaggtcatataacacagatcaagtacttattgtaaatccaaacggcctgttatcggtggacatgttattttggacagaaaattgtaatggaaaaagtttatgaacacacatattaattgatgatatccgcaacctgcttcaggacgaaactccaaggtcaagacgaatttttacttagtacaagacacattaaatccacatatcgtatttcaaactctattttacttttaataaacttaaaaaaaacaacgtttttttattaaaagttacatcgtttaattccttcgatgaatcaacgcgtcgatattacagtttacatcgtttcactgtttatgcttccatcaaataaaccctttcactttgtataaatacaactgctactcgcgacttcatcaagacaaccacatcacaaacgcaaagcaaaagcttaccatatttctcagttttcgttactctttacttctctttttcacgatggttcaacatcaccatctgtacgagttgtctcctatgattactggttggacgatctgtgtcatggtattgaaaatttacaaaacatttgtcaacccgaatgctttcgaaatacgtcttgtcttggccgatgaatgggtaaacaaatttctccaatttctttcgcaatttgcagaatttgtctttacccgtgtatctctgacccctaaaatgttgttttaccagggcacccaaatagaagcaacaatcggacctcgcttctctgccttttactttgataggatccaagagaatcaatgaaaaacgataactacgtttctcgttcgacctaactgcgaaacaataagaacaactcctcatgagttttgcattctattcatggatcaaaccattgtcacttcttccacaccaagagaaaccggtttactcaacaagttcactccatttgactacattgttgatgatgttgttggcagagataacttggttggtaaataatagcttcttcataaactctattcacttttttcaaaacatttccttttttaaaaatatttctccgacatatcttttatagatgttattggtgcactcgttaatgttgggattccgactaatatcgcaagtaacgggaatgatatggtcggattcaaactgttgttcatgatcatggataaaaagtacatttcttcaacatcaatttacagttctttttcaaacatatcatgtttatacatttttgtagtaaggtgagtatataatctcatatttttactgattttcagcaatgatacattggtatgcgaggcttatggagaaattgcagtggacttggagaaaagatttagagcatttcgcaagaacaatgttgttattgcacttgcttggtggaagactgttagatattatccatgttgtaactgttttaatattgttagtcatgcgcctatatcaaccatgtatcccgaacctgatgttaaggaagttgaagaaatcaaaatggttgtcgactaatggaagatgattagaactatcacagtgcttgttgcttaaaattgttttttctcatttttttttttttacctcttatgtttacctccaacaaacttgtaatattcttataaatgatattatatattaatatattaataaaaaatttatttaataaaaaatttatttatttattaaaaatttctcttaaactgttttatagctgaagaattacccacatacaggatcataactatttgtaaaacgtcaaactataatcacttactaaaactgtttaaacttgggatgttattctcttgtgcctttatgtgtgaaaatcttttctcctctatccccatttattctacacacccttgtactcttactataattctctttttgccctttctttttaatttttgaattatttaaataaacttaaaattttaaattatttaaataaaccaaaataaattaaaaacccaaaaaaaacaaagaaccaatcacaattgatctcttctcttcctctccaaaacatccatacaatccacgccaccaaaacggctccaccattgaagctcaatagaaggtaatttctttaccgaatctactgtttttgttcaatttaagtgtgtttcaaacttgtttatagtatagaaacaagtgttgacgttagatttataatgtaagactagggttcttagatatcttgaaaattttgtttcaaaattatgtttattgagttcatcctgttaattatcatttgctttagcctattatagtcggattacgttgataatttatggaggtatgtagtggtaatcgagcaaaacagaaagaagcatttctccaatctgtagttatggtactattgatgttacaaatacaactgggactactgatacaacatgaattacagagttaacaagacaactattctaaagttagtttttattctatttcaggtgataatgagtaataaccatcgcacattcatacattttgattatgggggcaattatttaaagagtggagatgaagtacaatggatttcaagtgaagaagttcgtcgagctcttttgatgaaggcacctattgaggagatcaattatttagcattggttgataaaataggcagaaagatgatgctcgatacaactacgagtgagatgagattcagttacatgccaatttcagtgaatcctaagaaaccaatatatatctccaatgatgatgatcttttgtgctatttggaatggaataaaatagaattcagtgttctgcatgtggagttggtaaaagatgacggcgagaatcaacggtctgagcaaattcgagttagtgaaggtggtgaagtaggtgcaagtaacaaggagtttgtttcttgtggaataactcgaagagatcatgatgatgtcatgattctatatgaaagtgagctgtgtgaacagaataagcaagttgaaaacagtgaagctgtggcatgtgaagaacaggaagagatggcatgtgaagaacgggaagagatggcatgtgtagaacgagaagatggcatggataaccaaggtattggggtatgtaaacgggtaaacaaggaatgggaagatggtgtgaatcttactataggtcaagaatttggaagtaagaaagcagtacaagatctacttgaaaagggtgcacataagaactgttttgagtatgatataatgaagtcggatccaatgttgtatgtggtaaaatgcactggaaaaaaatttggctgcaagtggtttgtaagggttgctaaagttaagaattcagaatgcttctcagttagaacttacaataagatgcattcatgttatcgttcaactacaagtacgcaaaaaataaaataaaaggcacgccacggatagtagcatcagttttgcgtgacgattatccgtgtaagcttaagactccatttccaaaagttatcatcccgttagttcaatcaagagttggtgttaaagtgtcatattcaaccgcatggagagggaaaagggatgctgctaatgaggaaagttacaagacgttgaaatcctatttgtaaatgctagagattacgaatgaaggaactatatcatttgtggaattagatgaaaagaagaattttcagtacttattctttgcgttgggagcttgcattgaaggcttcaatgctatgagaaaagtgatcattgtggatgcgactcaccttaagattgcacaaggtggagtacttgttgttgctttagctcaagatcttgaacaccaccattatcctattgattttggtgtacttgatggtgaaaaggatgtaagttggagttggtttttcgagaagttgaaatcagtaataccggacagttctgagcttgtgttcgtttccgatagaaatcaaagccttatgaaatcacaacgtgaattgtatccgctatctcaacatggttgttgtatatatcatttgtgtcagaatgtgaaaggagcatgcaattacagcaagaaaaaagtcgttggaaaaaaattcatggaatgcgctaaagcttatacagaggctgagttcttgaaactctatggtgattttaaggaaaggtatccagctgcagcggtatatcaagataaacatgttgaagaaaaaaaatggagtagatgctgttttccaggagcaagatacaacatagacacgagtaatagtgttgaatctattaatcatgttttcgttaatgctaggaagttacgtctgttaccaatgattaatgctattgttgagaaagtggctgagtggtttaacaaacacagaaagactaccgcagagacaccgagttcgcaaatgatggtgcctcttgttgagagtgagttgcactcaagatgtgaagaggcgaagttgttaccaatgtttgaactaaacagcttctttctcgaatacaatgtgatcggaattgatggcgttgattatttggtagacctgaaaaacaaaacttgctatcgcaagcgatttgatattgaccgcatgcattagctgctttgatggacgtagctaaaaaggtagaatatgagattcatgttaaagattataactccaaatattattggatggagcagtggtcattggcatattaccggacgatatatctagttccacatatgtcttagtggattgtacctgactacatacaagagaagtattcctttcctccggtttatgttgctcaaaagaaaaaaggaagacctcgaacaacaaggtttccatcggccggagaatatcgaggaaggaagaataaatctactggaggcttgtacgagtattttcgttgtagtcaaagttaatttctatgttgctataactgtttgtctttggttgctacaactcgtttgttctgtaaaattgtgtgaaattgtagtttaatcacctaatataggaaatacaactgtaaaaaatgaattgagttaaaggtactactgatggtaagtgtttaacacaaaaatacaactatgttcatgcctttacaactgaaagtttgaggacagctatttgatgttttttttacatatgggtccctatttatccaaacaactggtttttcatgggtcctattttcctaacatattgttttttatgggtcccatttgtccaaactccaaatatttgggatggtttgtaatggatcccatttatgggtttagtcgatttattttagagactcaaatttcacaataatacatttgtacctattaaaaagacagttgtaccataagaaacatttgtacctaataatttttaaaacacatgttccaaaatggaggatcctaaaccatcatccagcaaaaccaacccgggattacaaaaaatagacaccctaaaccgtccaacaaaaaactaacatgagcaacatacaatcacggtttacttctattactcctcctttgaattgtccatggaggcttttgatattgtgaaggattcctggatctcttcctcttcttaggagaagtctttttgccactgcttatttctgcaacttcttctttttcagccatctcatcatctccttcttctactccttctctatttgatgcatcatctccttcttctggtccttctctatttgatgcttcttcttctgcaccttcctcatctgttgcatctactttttctgatgtttcttcttctacaccagccatctcatcattgtctccttctgctccttcctcatctgttgcatctacttgttctgcatcttcttcttctacaccagccatctcatcatcgttttcttcttttgcaccttcttcatccgatgcatcttcttcttgttcttcatttccaaaaccagatcctcctatatcatcactagctttttttcctgttgctcctacaccagccatctcatcatccagatctgcttccttttgaaagccacatcctcgattatcatcgctagcctgaaaattcaacccaccaccattcatagcattgttcacacaacgttcatgatctttcacccttctctcacagagatcaaaccgctttccaatcctcttttcgagctctttaaaccctgcattcatcgccctcatcagtttttttcaagggatttaagatttttcacctatctagaagactgtggctgctcctcttcttactgcccatcttcttgcggtgcatctttttgctgctcctctgttgtatttgctcctcgagaagccacgtccaaatcatacagctctttccagaatatcttctacattttaacacatatgtgatgctcccagctcactgcaattatattacttgattgtttctcatcattttcgtttatgcgaggcataagaggttcctcacaaaattcaggttccaaaatgctatgaattacctgtgaacataaagatgtccaaaataaaatatcaccttagatttacaatgaaaagctgatataattaaagagagaggagaaatctctaaccgttgtagttccaagggtgtcatttacatcttcaattgggtagcctttcatgtgactacttatccatttctgtttgcacatccttggacagtttgtgtctgcgctttatacatctactcggaaccttcttttcataaccggaatgcattcacacgccaatatctacacaagtcacaataatcataagaaacataaatgatttacataatatagagttgtgcttcacaaatacctccaaaggaattaagaaacccggaaaacaccatgtttgctgcacacgacccttaaaatatttcatcatatggaagatgtttttaatgttatcgtcaaatgtgtatctcccccacggaaacgtttcacaagcatctagatcatccacaattcgatatataaaagcatcgatgaacccaaactttttcttaggtgtaatgacagtgcttacgaaaaaaaggatcgccatttgtttccgctctccacattctcccatggaatgtagcttctctctcacagctttgatgctgaccactatttttttctcttttacttgttcttagtcttcttcttcttcttctccttcttctttaaaatagcttctcacaaacctttcactccccaaattcttatactttggtggataaatataacagtcaaatccacacaacaggccatgttccctaaatgaataccggacgggaacaccgttgacaacaaaccaacagacactatatatttccataggagccgtgcaaagcaacaacatccacatatgcgtatacttgtggttctcctccctatgcatgtgccaaatatgcttaaattgtagatgtgtgcggaaccaattcttctcatcttctgcaaggatatcatcccactctttcatcgttctgttctcttcagaccttgaagatagcttacaacactctgtataattggtttgcttaaaataaaacatctcaggtggaagtggttgggtatcctccatatctttatcattatcctacaaatccaaacaaaactgtcatgaatagttgtaacaaaatttttagttgtatcaatctcgatagttattccaaaacaaaaagatgattcacttctcaacgtacttgtggacacaatggaggagacctctcatgggcagtagcttcatcatcttctttgttttctgacggaggagagcaatctgttggttggagagtagcagtttcaactggttgaagagaaggatgagtgtcgtctagctgaagaggaagatgagtgtcgtctggctgaagaggaagatgagtgtcgtctggcggaggaggaagatttgcgtcgtcggatccggtgtcgtctggcagaggaagagttttttcaagtgctgcaggggtcttcttcttcacatttaaaccattactagtacgaaccatcctgcattaccaaaatgaaacgcaaaattaaagagatttccaaaatttcccaacttcaaacccaaattttgaatataaaccctaatttggcaaagcctaattttacaaattaatgacttacctttgatgtttgatagtctacgatgaagaaagcaacaagatttgacgagaaaattgaaaaattgaagagaagaaattggaagagaagaagactcgggtaagactccgacgacggagagaaagaaggttttttcttttgattcagaacattgattaaaacagatggatatccagttagaatggataacccaaatgtttgggtagtaacccgaattataactggttgggttggtaaatatcagaaatcgtcaaagttttatggtctttacctaatttttggattaaaagaaaagacaaaaaataaatttattataacagagggatataagaaatagattttggatgggagggcaccggggaataagatccttaaacttgtgtttctgcagttttttgttatgtgaattcttgtttgcatcccatctacaattctatataagtgaagtcttatccttttaactatattgtttgtctttaatgaattcggtctatgaatgtaaaacctaatctcttctcatatttacgaaaaaaatgaaaaaaaaaattagaacctaaatccccataaatgaatcccggttgaattggctgtaacaaatcactgtagcacgtctatataatatattatcgaccatgcgtatatatattcttggacgtgttaatacggacatatctaatttattatacttatttccatgaacaattttttggaatatttgtaggacccactaattatattcagtaacccatcgctcccccacaccccaccctcttcattgatccagagtattagggttcccattttatcacgatctcaaatccgtttcccttcagcctggtttgctcctctttaattatcggggtttcttcaaatttcttagatcgatatttgttcactttcaatactatcctattcgataagcaaaaatgccaaaaatcgtctgcgagaaaggaaaatgtatccaccctcgaccaatgtcccttactagacattactggcgacccccaagcgcccttgcccctgttaggggaaatcaatttgccgtccagcctcttagtcaacctttggttcattttaacctacaggtaaggtttactcaaaaaaattctcaatccaattgaggcactcattttatatagactgaaattgatccaaaaattgcgaaatttagttttgaattcgtatatagcctccaaaatttagtgttaacattggtactcattttctctcagcctcctccgttccctgatttccacatgcctgatcacgtagctgctaaaatagtcagcttagtttttgaggacggtgtagatatgttaaaggcttggattcaatcaggaccagatggaaaagccgctgttttttcaagtgaaactctttcttctgttcgactagcccccttttttattcatatggctgaagaatcgtctagttatcacatgttttataccaaatgcctcaccgcagaaaatccgtacgccctatatcttcagaggttagtgctggcatttcatatgtttgagctccaggaagtaattgctatattggatggcataaaagacgttttctcacatgctggtctactttatatcatgctccacagttgcgatggatcaattccgtgggaattttatattcagtacaagcgaaggtactacaaatttagtgaagtcgacttattcgcaaataaactaatgttccatatcaacgaggttggtccacgtcgccaagggacatacaaaaaatgctgggagttcgaagattatagtgagtgttggtcggaccataagaacctcaatgagtacgagggacagtggtgtaacacatgtatttactattacatgtcccaggaaattgcactcatttcataagtaatacttttagaagtaccaatttcatttatgttcatcttatcgttcttctcaattgcagacaaaatatttgaatctaaatttttattcttgattttatgtattagtttgttttgcatatttcgccaactttaattatatattaacttcattttaaacaaagctaccacttcaactttaaggtgtaacaattattatacacataattagttttgtttcagaactatgatttgcatttttgtatatgaattagctttaatgaaatttcaagtagaagcttttatatttaatataaaactgaacttgtactccctacaaagcttcatccctcacgattgtgaattattaagagaaacttccagttagttactctgtttttattactctgttttaaaccgttttgctcagttcaaaaacttctctctccaacacatcttactctttcgttattcgcaacagattgacaaaatgagtacatcatccaaatgtctacactctatcacacaacctatcaacacacatgtttaatttttcatccatttaaacaatatagttttcattcattccacaaagtatatgtaacttctctaacttttcatttgtgttgtcaacagaggaagattgcaagattatacattccggaaccaattctcgcactaattgttagccacgtttcagaagaaggaattgaggctctgaaaaactggattaaatctggtcatgatgggaaatctgcagcattctctgtcgagacactctcccgagttcgtttagataaaagccccgacttcatcaacatgtcttcgcccgactctgttcacttctcattctactcaaaatgtcttgcaaaacgaaacccttatgctatgtatctccagagcttgaggctagggttccgttctctcgacctgataggcgccatttcattattgaatgattgtaaagatgtcattcctatagccaaccttctttacgttgctctaaaccgctgcgcaagtaatgaagtattagacgcttttaatactttcaaacaagagaaagtgtgttttaccaatgtagatatcatggccaagacactaattggccacatttctgattcggaaccaaaacgattcggatcttacgctgagctctttcattatgaggattctccagactgttggctcatgcatgaattttacaaagaatataatggtgagagatgttcagattgcatctactacttcctcttcggagacatccttttgatttcctagtttattaagaaacatcagttacccactttcataatataattatttcttttgttttcctcgtttatctagtttattaatgtaatcttattatgaagttgtatttaacttataaactagtgaacatctttctcgtttatcatgactgatagggactctttcgattttggagcatgcatagcgaaatgttccgtctatactaattccaaaaatactaacaatcggttatatctgattggtcgggggtatatggataaaaatataaatattcatttcctatctacatgtaaatattcagagacatccatttcattaccaagtttttttaaggtttttctattattaaaaactaagctatatgaaatgaaatcacatgtattagtcgatattctctattctataatatccaattcactaaatggccacatttttttattcaaaaccaacaaagttctaaccttacatgcacttttacattacgatgttttttagcagaaatttggcaattggataagttttaaaaaggaatataatgagaaaagatgtttgtttacatggctgataggttctacttccatttttaaaatctgagctgatctgaaaataatttgctcactataactattttttcaacatatatttatttatgtaactaatagggtatctttcaatattgaagcatgaaaattgaattaattttacaaatagatctaaataagtcaaacaattggatatgatcttatggtaaactatatttggatagtaaacataaatattcgattttcatctacttttacctattctgcgtcattcttgtgagtccctggtgtaacataagcagtataaatgataaacctaattagcatccaatacccaataaatatttagattttctacacctacgcattacattacaaaagaaaaacaattaatatactaaatagcaatctcaaagtcatccaccgtaacaacttgttcaaattggatttgtacaacttgccctgttatgacccgtgcctttgcacctcgagcaccggttctgatgcgtccttccagtcttaggtttctacatttaccatatacaaaccacattatgcattaggttttaacaatcaattagaaagtactactttagcttaattttttcctaaccttgtattcccctgttgatggaattccggctacctatggcctccctgatggtctccttgtatatggtggcaacatcgatcggtgttcaagctcttctagtatttcttcgtctcttccaatagcttcagggaatattgcttcccggtaactcgaaacacatgtgtggggcttgaaacagtcatcaactaaagccttgtaggaaattttaaaactattcgcagccatcaaagcatgactgcaagggatcttgagttgatcattcctcttgcaagtacattgcttcttctcaagatcaaccacatttcttccacctaacatgccatttatctcgtagctccagctggtgatcctcccaaccttggtaccattagttgttaacatggtttttgttatttgcttgtcaacttccggaggaacgggacctttacgttcgagagacttcttccgacgcgcattaaaccatctagttaacatagacctgataaatcttatcaactccacaatatgtgacaatcgacctttgtttaaagccttgtttaacatctcagctatattgctagtcatcagattgaaacgctatcccctgaaatatagccttgtccaattagccatccctatatcatgtagatacttaccgcaattttggttcgtggattcaatctgaccataaagctctttaaactttgtaccggtaaacgcatatcctgcgttttttactaacagcgtcatagctttgttcttgtacttagcttggatattcctacaaaggtgaataatacaagccccatgatttgcttgcggaaaaactctcttaacagcgacaaggattgacgagtgtctatctgataatatagtctgagttttgatgtctgcaatgattcgttccaacttcataaagaatcaagtccaagaattgtcattctcgctgtccacaacaacaaatccaagtgtatagacttggaagtttgcatcctgaccactcgctgttagtaacacccctttgtactttcctttcaaatgtgttccatcaacaacaaatatccttctcagatgcttaaatcctgctatcgaggcaccaaaagctaaaaacatatacaaaaacctctctttgctttcatcttcaacatctctttcggtttctatatgggttattgttcccgtattagttagcttcagtagatgtaaatattcagccagatagcagtatgattcttcgtcactcccggcaacattagttaaaactgattccctagctctccaacactttctgtatgacgcaaagactctcaaatcttctagaactagttgttgtagatccatcgggacaggaccggacgtaggatcactgtacttagccttaaagacggatgcaataacttttgatgttgccttctgcatgaactgtcctctagtatctaacgaacatgtgtgatctagacttgctttcttaatttcatagtagccagtacctttcatgagtgtcgccaaaattctgcaatcacatttctcatctgaacaactaagaacaaaataattccactttgttcttgtttgcttgaaatgatacatgttcttgatcgcatatattgccaaaccaatttggcaatcttctttgcttgcatacacttttcccttgcatatccctttgccatcatcctctatatccaaatccggtatgttctctacctcatactcgatatcttcaaataatggtgggatatcagactcctcatcatcaatttcctccaacttccttgctccacctctcaatccgtgagagctcccagctctacaaccaaccttagttttcgcagcctatttcgtttttaccttctctgcgtttacacttgaacctccaccactcacaaacagagcgtggtcaaagactccactacctgtgcactgaacaactttttccgcactagtacctaccttatcatttaaaccctgaaaactcacgtctattttattttttcccttgtaccttgcatctactccacccttagacatcaactcttcagcatttgagtcaccataatcatccgacagaaaattaccccaaaactctttatcatatccgccacagggcatagtatcatcagaaatatctatcccgtcttcggtatcctctgttttgttgtccataaataagtcatccacaaagatgtcatcttcatcatcaacaataacatcttcgttagatttcagcccaccgcttcttgctattttttcttctacatcgtgtaatgcatccatgaattcttcatctacaggggtcaccagaacattagggattttgaaacaccagaagatatatccccagaacctgtgtcaacatttctcgaaccactagctgtatcatacaaactttcaactttccgttttgcactacctcctagtgtttcactactcaaatttggtgtatcaaccttctcttcaaacttcacaaacaagtttagacccatgttttctctaagggtctttagatagtattgaagtccaacctcgcttgtaaccagaaccggtggagtcttatcctttgttgcaaacatgtttttattcggtacagagtaacttaacagaggattaacacccttgacgccaaactcctgcagaattgcttcgttcaacgcaaccaatgttattccctcatgaattggtacaacccttgagaaaagttggttatatatctccaatttccattctccattcgaagaacaaaaccactctccacaaataaccatgatatagtcgtccatcgatccatgtacatataaacaaaaaaataatttggttatattctgattcccgtaacaaatagactgcacagaatttcgttttaatttgatgatttcagttttcaacaatcgtacctccttcgacacgacagttggccaaagattgatgattgaaacccagaatcttcttcgatcaacctagaatctcgtgtttcaggtttttgttactagaaaagcaggggaagttataatatttaatctcagccgataacactattaaaatccgctctttcctaaaccgctgattacaaccgtaaattttaaacaaattctaacgaaaccataaaccagtttggagtgatatctcaatcgaaattgagggggtatatatgtctttttttactccaaaaggaaggcaagtgcctctagtttttaaattgtttgaagtgcataatgtttctcgaaaagtgcctcattatgctacattcccaatattttaactaaaaactacgattaatagacgtaaccgtttttttctggaagacgtaaccgttcataagtacaaaaggcatttattgtgattgttattattagtagattgttattgaaatttaagaaatttactcaatgcaaaaataataatttataacttaaaataaatctcatttaaatgttaaaaacacttattttagcatataagtccaaaacattagaacaaaaactcttacaaatatttattacattatcataggacttatttgattaaattactattgagttttatgtataaaaacagcatgtgcattctttcatacaaaatccctctccttttagcttaggttttcttagcttctcctgacatgcagtttgacattctttgggaacacatttcccagttttaaattttatttgaaaacaccgattgcctcttaattgctcatcatttcccataactcctgttattataagataaaattttaaatcttagttatatatatgttttgagaatctttgtgcatatacgaaaaatataaatataggaagtacatatttcaaatcattgattatttatgaaaaaacataacattaatcatataagttatataaactaaccatataataaacatatataaaaaaatgctaagaatcaatatttttgaaacaaagaatgttgtttcatataatttatcttgagttaaatagcttactaaaaagaaatatatatctatttctataaatgataagtgtttagattaccattataaacaaaacaaaaagatattagtaaaatatggggcccaaatataacacataaattttaaattgacctttaaaaacatctttaattttttttttttaataatagatatattaatatttaatgagtataataaagatacagaaatccaaaataatatatagcatgagtaggtcttggaaaataaataccacttggtatattatatgtaaattgagaatttacccaaacaaaaaaacatacataaaacatgaaataactatgtattatacaatacatagcaagtaagagaatttgctcaaaaagagaaaagaaaaaggaagtaagagtatacatatgtaacaactgtatctgatataaattcggttttcacaaagaaaagtaacatagaagatgaaataactaagcatttcacaacacttagaaaatatgagttaacataaataacaactttatatgatatattataagtgtgtacaaaaaatattgtccactaatagttaagtgaaaagggcaaaatagttagaatatgctttacaccatattctctacttggaaaagaaatgagcagcttatgttttaagtagttaattgggaaaatgagttgatatttttattttcatcttctaaagttacttatatatctatgaagcatgattgagaaacaattgacgttaataaaaaaaacaaggagcaaagaaaatattttgaaatatagtgaaaataattctaacatgaatattatattgcatgcatatttgaattgatattcttaatatataagatgctagctattaacgatcatatgtgatataataacatgatccaattgcaaatacaaaccttgccccagaatgatgaatatagttagaatagttaacaagagtagaaatgatctcttcatcctaatgatataaattcactcttttgttttgtttttgaaaataagaaagaagaaaggctacttatttataagaagttaaaatattccttgttcaaacatatggtttctattttaagttatctatctctttaaagtccaaaaactatatggttttcccaatttccagggttatactaataaagtggtatgtttagcctaagactcgctcatataaaagaaaaatattccaattcagataaaattcaaaacttacaaatatactcgtattcaatttgactacatgcatggtaatttcgtcgccaacgattaaattgcaatatcaaactaagtcttagactttttggcaaaaccttaaaacgttaaccctcatattcctcttgaaaaatagttttttatctagtttaatagccttaactttaattgttgacagtttgagggtattcggaagtataactctttttttctcctaaatttcagttgtggtcttgttagcttgtgtaggccgagaccatctcattggagcctaaatatgacaaacacagtctaataaggatctctagaagcagcaaagtatagacactaacatagttcaagattcacattttacaaatttattgattatcttaaagaaggtgtatgccatcacataaagaatgaaccgataattcggaataacctgaacactttcacgaaagaaataaagtagagtgtgaaggaatattatttggagaagtagtaacaccatttgtagacaatgcagacagttacatttataacaaaaaaatttggcacttcacgttgcttatattttgtctctttattggctttctctctaagaaaattttagaattggtaattttcgtgttaattttggttacgctgttttttttaacaaggccatatatgtgctttatattctttttaccttttcattttcgttatgaattgttttaagagtgtgtttgagatatagtacgtttatcaaacataattagtaatgtagtacatttactattcaaaatgagtgaaaagtcattttttcctgaaatagagatagagtttgtgtgagatagaaaatatagtggggtaaggaagggagggtggaaattacggttgaaagtttgactgtgtttaaaagaaaaatgtggtgggtaagaaagagaaatgtgggtcatgtttttttctaatttttttattttatttactacttcatttttttttttgtctcataactaaaatgctctttaatgaatattgtttttcaaaaatttatcagatacataaaaatatatgtttttttctctatcatttgatatgcaatttgtataatatttttttttttaattatattataaaccattatatataaacaaaatgtctgtacagtggtgtacagatatagaacatctgtatagtggtgtacaggtacagagcaactgtacagtgatgtacaaatacatttatatagtggtgtataaatgtatctgtacaccattgtacaaatgtgtctgtatagatataaaccactgtacagatgtatagagccttattagtggtgtaatatctgtacaagttctttgttaagtactactactagttatttgtttagtgccttgtaaataagttgtttaatatctatacagaaaacttatatttaaatgttgtactttgttgattgagacaatgttggttagtcttctgtacatacaaagagctgtacagatatgcaatctgtacagctaaccgacagtattaaacgagcaatatacaatataccacccataataatattttgtacagctgtttcaaaattcagagtaaactgtacagctattttgaaattctaaaaaactgtacagtatgactacgaaaacaaagggggtggagacaaacgaaaatataactttgtcgttagactgttgtatagataactttgtcgttacactgctgtaagttctttgtaataaaaatttgaaaaatcattaaacttttctttgccttcctttgcctcatttccaaagcacactcttcttcctcttcggcttcaatccaccactagacccgtctttcgcaaccattgtcgtctttttcgtctttaagccgtccttgctcttctctagcttcacaacgtctggtttcaccttccccttgaccgctgtttcttcattggtttctcaacatatggtttcaacttccttttggcagctttcttcatcgcttctcactctttgcaacctcattaaattttaataactctgaaatatagatattttttaaaaaattatctcccaatatatttcgcattcactcccaatatatttcaaatgaatgtctcttcttacaaaaaaaaattacatcacaacccaaaagattgcctattacacatttcatacaaaacaaacatgatgcctatagtcttttaacaccaaattatacttcatcacgatagatcattacacaaagttctgaaatttctacttagcataaaacagaaaatttaaaaatagatcacattagagtgtaagagcatacccgagccattacatcagttttcacattccagttattaaaatcttcgatcagtaatgctgcctatagaagcataattcagaaaaaaaaaagtataattactttagaatcaaagaagacaaaattggtattccttttctcaaacaaaatagaacaaagtgactatttgcttacttacccataattttatcatgaaaaagtctattgatgtactgatcccgctgcactaagtcgctacaacttcttgtctgaaatcttgaagtttccggataaactttttagacgcgtcatattgatatgtgtgcactaaatcggtcataaatcttgaagtactgctctgattgccctgaaattaccgtcgttggaaagctaattgaatttcctataacttttgtcaaggactctgaagctaaatctcaaggtaaggctttcgtccgagttaatcttccagacactggagatcatcgtttctcataaggcacacaagacatataccaaaaaatacccaaaaatactataagagtatatcaacaaactttaaaatcttccaataaaacttttaatctttgttaatgatgtgagtgtgagcgatacacaaaattgttcggattcaaaatgaaattgagcgaatcagatgaagaaaacttacactttcaagagatttgagaacatctgccatagcaacgttggtcgtataggctgggtttttgttcctcttgcatagacattgaagatctcttctcaaaaggctgtggaaccccttttccgcaaatttgagagaaagagagagattgagaaatttctgattgggagagaaattgaaattagcaaagaaaacaagactaaatccctaaaattgcatgagtgaccattgttgttggagtggaggtttgaattttgagaagaggaaattgggagaacttccataaatttcattttcttgtagaagactaaattatttttgttttaatttttacattttttaataaacatatcttaatggcaaattatgtaaatatcaaagctttttgaggattagaaagtcttataaacagttgctacaatcgtatatggggggttttcccaattataaatcgtacttgtactatttttataattaaggttgaataacgtattattttacaacatatctctttttttttatcattaattccttttttttcaaacatacaaaaattaaatcaactatataaaaatatattcctaagttagttaggaaatatgtttatctctacaaaccatatgatgaagcataggtcgacaaaaaaaatatgaagaagcatgtcttatatgtacatcaaatttgtcatgcccgtctccctcaacattgagacggcgtgctttcactttacttatatctttcttctattccactttcttaattcaaatacaaaattgtcttaaataataatcgtaaatcattgaaaactctttaataaatcgtataagaaaataacaatagtagaaataaaaccgaggttcccaaaatacaccataagccagacggacttgagcgactacacacgattctcaccgtgacctggggaaaaagggaaaagaaaggggtgcgtaaagaattactcagtgagaggatcctttccgcccactggaaatacgatacacgattctacctttaaaccacaatcaacaatcacatagaaaatagacacaacactcttatagtctgcatctctatacaaaactataacacacaactcattcttgcttaagcatgatctccacatcattttcaggttcgatcatcttcctgacctttgaacctatctaattcgactggactcctcagtcttttattgagctactaagaatccatcaattcaatgtagaccatttccactgttccacttttcatcatcttaaaattgcactttcgcatataacacatataattacttgttatcacaagtacaataattcaatcatcctataatagtagaacaatcatcatatcatcaatcttaaataacaattcattattactaagcacataaatctattcatgtgcaatgaatcaagaagcataaaaatagaaacatgtattcgaatctccatagatcacaacatcacctgaatttgggatgatataaagaggttgaaactccttgacaatatctgaaacttgcagcacaagaaaacagcacaaagataaattagggtttctacagttttgacaaaacaggtgattcttgtccaacaaggaatcaacgtggcaggtagggtatatctttcctagtgacgacgaagggtcccatggcttctccaacatttcctctatttgtatacaccatcggcttgtcctttgataatcagatctgaccgaaatctgttctccaaaaggccaagttgaatctgaaatctgatatttggttatttctgggttcagaaactgttacttttgtccaactttaagcttgaattgtggatgtagtttacctcgtaacagagagccgtttgttgctgtggattccttgaagtgagatgtatccaaagacactaaaataacgatctgattccttaagatctgacgggaaatcactcctttaaactcctacttcaacagttttcacccttcttcttcttcactaaaaatctaatagtttgatattaagtcacgaattcaaagtaccaaaagagataattctattagcaaaaagcattactcggttaggttttccttacccaacaaacgacgacaacggctcacgaatccggtggtgaaagacggctccgaagacaaacggtgacaagtggttactactttctcaataagaaagaacaaggatggcccctgctcaaggttgatcaaagaagaatgatgatgcttctgctaaatgctttcgagatcgtaatgagaagaagcggctaaaggtagagggagatatttacaccatatatatatatatatatatatgtgttcaagtttaggttttcgtttctaatggaaatgggcctttgttgggtttatatgggattaggtcttacaattctcccccacttaaagagaattcgtccccgaattcaacacttcttgttcgactatactttccattcatgcctttagaaaactttatttattccaaacacaatttttaaaataattcaattgaccattaaagaattgaataaaaaaagcatatgccaacaactgaaagctccaataaagaaagaataaattcctaaaagaaatcttcacttaatacgattaaaccgtccactccaacatgaacttctacgaccttggaatttgaatttcaaactttatcttgctcaacatcaagccccttttgttctacggcgtacacacgaggtcctatggcttgcctcttaggaagtgtttggtttccgtcatttatgttccgctgattcccttccgctataaacgtagtgcactcccgtgcataatggcctggctgcccacacttcctacaattattattaccttccggacaattctccctgatatgacccacttcaccacactgaaaacatttgcctgaatccatccaacaaacccctccatgctgcctattacaccttgtacacttggggtaacggttctgacctggtccttcttaacggttatcccatgtacgcttttgagatccaactacctgagttgtcctcgcttgagtatttttcaagtacttagcttctagaacaagtccactctctatccttgcagccttctcaaccaagtctatcatgctgaaaaattctcgggaagcacatcgagtcagaatgtccggcctcaatcctctcattaatctacgaatcattgactgctctcctcttccagctctcactgaaaacctgctaagatggctaagttcccgctcattctctctaactttctttgtgtcctgacgaagctcctcgaagtcatcctccaaactatccattgcttcctgaggaaaaaactttctgttgaactcttccctaaaatcctcccagaaaatcacatgctgcactggtgtgttccccagtacaccatcccaccaatgactcgcctcctctctcagaaaatgaactattatgtctttttggaactccactggacacctagcattctcaaaattattctccaacaacttcctccaatcatctgctttgacgggatcaataccaccagtaaagtattctgtgcccatggtcctcatgaccttcattatctcctagtaagaaatcgcaggccctaccatctgagctggtggtggtggcggtggaggtggtggcggtggaggtggtggctgttgttgctcaggtagaacattttcttgtggttgctgagtacctgcagctgctggtgttgcctgacggattcggttcattaactcttcaaacattcctctcatcccttgaatctgtcctaacagtgatgcattgatggcagcctgatctccgactggaacatcacctactggtggttgagcttatccatcagcgggtgcatcctcaacacggttaaccctttggttcgcaacacgtcctcttttccttaagggcgccattctgaccaaacaaacatcaatatcagaacaatcacaacaattctgattaacaaaactaaatctcaagtcttacttcttatactaaaaactctttattcttaaaacatttcgttaaaatctatcttttaagaaaactcttcgacttaaccttccgggtcagcactggcttgactttaacctccgctctgataccatttgttacgcccgtctccctcaacattgagacggcgtgctttcactttatttatatctttcctctattcaactttcttaattcaaatacaaaattgtcttaaaaaaataatcttaaatcattgaaaactctttaataaatcgtataagaaaataacatagtagaaataaacctgaggttcccaaaatacaccataagcaagacggacttgagcgacttcacacgattctcaccgcgacctggggaaaaagggaaaagaaaggggtgagtaaagaattactcagtgagaggatcctttccgcccactggaaatacgatacacgattctacctttaaaccacaatcaacaatcacatagaaaatagacacaacactcttatagtctccatctctatgcaaaactataacaaacaactcattcttgcttaagcaagatctccacatcatttccaagttcgatcatctccctgacctttgaacctatctagttcctctggactcgtcagtcttttattgagctacaacgaatccgtcaattcaacaaaggcccattggtttagtagtaaaagaaggtaattctcaccatctaggttcgagtagtattagacaccggagttcaaacaaattaagatagtttttccagatcacagaattaggttttgggcgtcttgaaaacttttagcatcttttgatcgtctaggagagcttttatgcattagttagtaaaaaccaatcaccttgcgtttttattttggaggcgattcagttttatttaaattatgttttgaggtggacctctcttttttaaggcaaaccttatcttttaaattaccaggtgaacttcttctctgtttatttgtgaagttatcttgtcattttatttgcgaggtggaccttggcttactttatttcaaggttagcctaatattttcatatattcaccaggaggaccatgtcatgtcatgtcttataatcaaagtggaacaaagttcgagtattaaagacaccattatgtactaactcttttcctatagaaggcttaactatcatatttttatgggtatgagacttaattatcatattttaggttattctcaaatttaaaagaaaaaataatcttgttagatgtgtctcccatctatccgctttgttagtagaatgatccatgtatttcctatgttcattgccacctctacattgattcctttttcataccattattttgatcatcattttctttttgataaacttgattggtaaaatgcgattatcttaacccataaattagttaatgctcgatcaatgtcttaaacttctttattttcttctcaggaaacttcttcttaaggctcatgcattatctttgaggttcttatcctccagctctttcttcattttgtgattgtttggtggaatcaatgacatacagtcatcccttattttctcgtcatccatgactaataatcatttacgccggcattcattacaagacccaagaccaacaccaacttacaacaatatataatgctaatacattcatttgttgtgtagagctcctttttctctttaggtataattaaaatacacccttttcattatattaaattaactaaatctcaaaaagagcaaatcgtaacacagccacacaaaaaaagagagagaacaaaactgacgaagtcatcggaattcgacgatatattacatcctagtacaccttcctactctaagggtccgaatggtaacaccgtatttgaccatgtggaaaaaacggtttggcggtacggtacgatctaactgcggtatacacgggagaaatatatttgcggaacagatgcggtttttataaaataagcgatacaaaacaatgtttgactggtgaaaaaataatgtatggaatacatataaaatttaaaaaatatttactattattataacaaattacaaatataataattcaaattttcattaatattttgggtgaccaaataatggatattaataaacttaaactatattattgagtgctaaaacatataaatatactcatatatatatatatatatatatatattaaagtataaaattttaataaaatattaacacaaatttttaatgttaacagattttttcatttaactaaataaagcaaagaaaacaaaatttgtttttgaaaagagaaataccatatattagttttattatattattatatacatgattttatttataaatagttgcaccaacctaaaaaacaaaaaaaatatataggtgtaccaacatacagataaactatttaaacaatatatatatatatatatataattagattttattcctaaaatattaagtaagtataatacttttgttgtaaaaaaaaaaagagagtataaagcgttttctttggaccacacttgtttgcatatggatagaaaattaaaaagtgcatcacacttgtttgcatatggatagaaatttaaaaagtggatttcatttttgtgaggtatagaaaactgtgcgcgtaaatgggaaactgtgattagtgatttgaaagcgtttttaataaagttctgaaaaccgcacttctttaatgttgtcattcacagccttagatttacaagtatttgatgagtggtttgaataaatgatagagaattttaattctgatttcatgatactcgagtctctgattggatagcccatagcaagcttgtgaaatttaatggtttcattctctcttttttctccccttatatatatattttgtttggaccgcaaaatactccataaaagatgggctttaagagccaaccaccccggaacctggaagtttacattggaaaaattaacatctcgagagcgagccccttttgcaagagtgtcagctcaaatatttaacttcctaggtatatgtgatatcgcaaaacatcaaaatctattatgaaaaagattaaaagaatctatgtctgttgcaaatactggccatagatcttcttcttcgacaatttttaaaagttcggtgcaatctgtcgcaaaataactggaatcaaagccattatgaatcgcataatccattgcacataatagggactccaattctgcatgaacaggagataacactctggacttacctcttgatcctagtaatcggctatttgattaagaataaagccaaccccgtaagtgttactgtatgctacccacaaggcatcgaattggcacaagaattgtccctcccttattggggggtgggggtggtgggggggggggggggaacttgagtctccaaggccaacacttcatcattttccactatttgttcaaggatttgcaccatcttccaattaatagttccgcggttgcaagctgcaaggtatatggaggaaggatatctttgttattaaagactttatcatttttggctttccaaatatagtagaaaatcaatggaaatgtttccgaagtgtccgtagtcactcctgtctattttgctgtccaaagaaggaaatcaaagttggcgaacagagatctactcgggaaaaaacccggattaattggttggcatatttgagagtgcctagacctgcattgcaggtgggcattcaaatagaaggtgatttaacgattcttcctcttcaccacatgtcatgcaagttcgatatgaaccacattggcggtctacaagtctactagaagactctaggcaggccactagggcttgccacaagaagtgtttaatcttcctagccgttttcaacttccaaactttttttttcaggctcgtcgtacttggcactgagacttcatactctttcgtgatgcttttcttgctatgatataacctgatctcatcgtatagtgccctgatttagtgtaggtcgagtaataatcatcgacttgaaagcttctactcggttttagacctaggataaggggaatatcgctcggtgctgtaagttcttgaatcaggttcactttccactcttttgtatcaaaatctatcagatgattgacatatagatgaggggaacaaaccatcgttatctttcgcgggacgggacgggatggttgagatccaattatcactccatactttagtgctaaaaccagatttgatattcttatattctttgtaatataatgttaagactacgtaaatccagaaaaagaaaatgttgattttacatatgtaaattcatgacatgagtgtgcatggcctgcatattcgattcttcaatctatactattatttgagacgtacgttaagtgattctcagttaaaaaaatttttaccttaaaatcatatgtttaaaatgttaatgtcatagaaaaaattacctttaactgagaatcacttaacttacgttataatcttggccattcgattgaattgtttgtgtccgttcgatttctcgccttcacttaaaaaacacgcggatccttttgacccgggtttacaatttttgggtcatacgttataatcttggccattcgattgaagtgtttgtgtccgttcgatctctcgccttcacttaaaaaatacgcggatcattttgacccgggtttacaacttttgggttatacgttataatcttggccattcaattgaattgtttttatccgttcgatttcgcttaaaaaaacacgcggatcattttacccggtttgaaactaatgggtactcgcctctaatcttggccattgaattgaattgtttgtatccgttcgatttcgtatttcccaaaaaaaaacacgcgcttctttttatcctgtttaaaaaaaatgagattctccttttaatcctggccgttgaatagatttatttcaagctgtccgattttgtagtttcatgcataaattcatccgactatatttcaagaaactaatcgtattaatttcattcaatatcttgcgtatcttcgttaacaattaagtatatatcacttctccataattatccatgaaacaatatttcgtttggatcttcttttggaattatcttacattttttccataattataacacatataatatttcgtttggatcttattttggaattatcttatattttctccataattatagcacatctaatatttctttgccattttcttttggaattattttacatttctccataattctatatatgaaacgtgatatcttacattttttataagtatatccgatattcatacctacttttacggaaaatgataaatattttcttataatttttcggatttttgatatggaataaccttgaattccaaggataatagtttttgcgcatattgttttgacctaaccactcattcttataaatatcggacgcctcatttcaatctactcactcagtttacactcacatagtttcatttccaaattcatttttaaaaatgatgctcgccaatcctcttccattcactcccttgaaatcactaaaaccttacaagaacgcttggcgtattcaggttaaattgcttcatgtttggaggcaatattctgtaaaggctggtgaatccatcgaaatgattttggttgatgaagctgtacgtattatagtttcaactttatattttcgtaaaccttatagtgtgttcaagcatcattttcctttactaattattatttaaaattatttttgtcatatagggtgataagatgtatgctgctgtgagaagagagcagatcaagaagtttgaaaggtgcttaaccgagggtgtttggaagatcattacgacaatcactctaaatcctacaagtggcaagtatcgtatttctgacttgaaatacaagattggttttgttttcaaaaccacggtctctccatgtgattctgtttctgatgctttgttcctctcacttgctaagtttgatgtgatcctctctggatccgctaactcaaatatcttgcacggttagattcaagttttcattttatttttgaacatacatgcattatctcttatgtagtcattatattcatagatttattctatttgtctatacagatgtaatgggtcaggttgtcgatcggtctgaaatccaagatcttaacgctaacaacaagcccaccaaaaaaatcgatttccatttgaaagatcagcagtacaaacaatctatattcatattaattcttatttaaagtttgttgtttttttactttttattaataaatttattcttttcatatttagtgacactcgcttggcatgtacactttgggggaagtatgctgagattgttgaccaagcttgccaagagtcaaccgatggtattgttgtttgtttaatccgatttgcgaagattaatctctacaacggtaattatattgttatgtgttactacatatctatactattttaaaaaacacgaccttatatttttaaaacagatagtaggagtgtttccaattcttttgatgtttcacaagtcttcgtggatcccacgttggctgagttggctctttttaagcaaaggtaattgtatttatttgtcactaaatatatttgtttctacataatattaagcaaagtattttttcttgatatataacataccaactgatgggttaactttgggaagttctagatcttttcataagaggctctatgcaccaagaactggggatgacgatggtgattatccaaggcaaacaatctcagcatataaataaagacattttctaattattatttgtcaaaatttataattcatttacatgttaatgacatacacgaaaactacatatacaaaatatacaattacgtacccaaacgtacataccaactatagacatatatttttcatgctacaaaccgaggaaactacatatagtaaacaaaatatagtttgaccagactaaatatatttagttggtactaataatacatgataaacaaatacatgtttaaagataataaaaataaaatagagtttttgtggaacacacagaactgagatttgattattgattaaaccaaaaataccgtgcgtaacatggatagtgatctagttgaaaactataatcaaaaacaaaaaaaaaaaacatgaaagggaatttgttcttctttattcaacaatgatcatagttatatcactaaaatatatatacacattacaactttaattcaacaaaaatagtctttaaaccaaaaaggttcaatgaataatcatatgcttaaattagaaaattatacttgtccccaacatgtctcaaccataacactccttacgttgcacactaacccaaccaccgttacgtacacggttagcatcccacaacctcacaacatttccgttaatcaccgttaaatccacgtaacggtaccaaccttcatctccatttctcatcttcaccactctctcccatctctcccaccattctccactctcacctcctccatacttaacggccgttgtctctccgtcatcttcttctctctctccgtcaatctcttcttcgtagtacacggttagcttccccttcgttactccgtccttacacaacaacaaactccaatcctcagtctccgttaccttgactctaggaggtttcgtctccataaggagagcagcctttgtcgcttgtggttttggtggctcaagaaaagattcatctattaagccattgtctctaccacctccgctggtggtggtagtggtagtggctcggatccgccagaaactaacggcggccgtcacgacggcgatccatgtccaaagattgttaaagacgaagttaacgtagtcgaaagccaaaacctctaacggagaatccaaagtcgccatttctgaaatgtttttattatatcctaacgaagaagattgaatcagtggttatataaagggagaaagaaagagaggattagtatggggagagattgaatcttagccgttggatggatctgaagagagatagatggtgagccattggatcttgacaagttgaacggtggatctttcatagatgctgaggatcaagaccgaagatgcttgtagtgaagaaagatgccctaataatgcccaaaatctgattcttaattgtatttttttagttttctgacacgtgtttggtgagaaactgaactcctgacactgtcgtatattccttcatgttttgccggctggtttttgccaagtgtttatgaaataagacacgtggtttaagtttattggttgtgtctggatctcactgcatgcaatgctttagttttttctacttaattatcttaaacttagcattcattaccaatctcaacttcgcaagaaacgactattatctccttttttttaaggaatagaaaaattatcctttttcttatcggagtacagtaattcattattgtttaagtaataaatgacgacaaaaaaaagaatcaccaaattaaaaactgatcgtctgtaatttgtactcaagagaaaacaacggaaatacagtcttgatattattataattttttgccaaaagtttttgtttttaagtagagaattatttgtgtggtttttgcttggacaatgagtagaaaaagtttgtgtggacggaaaatataacaaaatctcagaacgaaaggagttgagaaaaaaatgtaattaagatataagattgttcattggtaagaattatttgattggttattataatgaatgaaacaaaaaaaaaatgaaagaaacaaatatataatggcttatacgtgacacaaaaggaggtgaacacatcattggtgttcttcggtaagaattattttattttggaatatataatgaagttcaaggtaagacatatcgtaaagaaaatagagtatctaaatattagtcgcaatggttgttgaaattagccaggaaattttgatttagcagccgtcatgtatactcactcacattgcacttcatggttgataagatatgttccgatgttcgtatagtatctactgatgacctttagtcctttatcagcgacatcgatcaaacattgcactatgccactatgaaataaattttgttctcttttgcaagattatatatctagatgatacgagaaaaatatgtggtcttttttggacgtcaaactatcacttaatctaattaaccatgcaaaaaataaagaagtctcaagatatgaccaatttggcatgatagtgtttagaaaagagatgaaaagactccacatctatagacttcgctaaaaacatttattgtaattaagagttatgcatattggattcgtatccctaaattgaatgaatccatatcgatgagattcataaaaattactgattggaaacacatttttagtgcacctcacgttggatgcaatttaattatccttaattcggtgggttactttcttccaattaattgttaacaaaaatttataggggataatatattaagagtaacaggatcatttgattattttctataatctagaattagaaacagttacatgcgacagtgacgggaaggccaagaaaagtttctgttatccaaagaaaatcaacgaaattacgaatccaaaataagaaaattattttaaaattagaactttaattttgattttgttttgctagttcttgttacttgaattttctctcgtcatcatcaaaaccaaaaatccttttgaaaaaaaaaaaaatcttccggagcttctaactttttttctgcatggcgtttcctcttcgtgtctaagagcgcttcatttctgtttccttttctggtatgtaatagtcacaaatggcgattgataattatcattaattgattttgcattctcttgttaacaatttttattgacggatttggatcttggtgtgacaataaatgaaaatggagaaaaatgtacaagaaaacataggggaaatgttttggttctttgcatgaaatctaaggacaaatattgttttggctttgttgtttctaaatgtgtgtcctagttcataaaatttgttgcaaaaatagaaacatgttcaatcaagttgttttgtctaactaatatctaaagcgcaagctgcaaaaaccctaaagtcttgagaacttgacttggttcaaaagttattaacatatgtatcttgctctgatttgatcaagtgtttctgttattatataacacagcttgcctgggtagatattttatatccttaaaaggagaaaatggatgaaaacaacgcggcaaagttaaccgggatcaagcagattgtgagactaaaggagattcttcaaaaatggcaaactgtcacaataggttcaaagtcagatgatggagagttgggagctagaaaacacacagctatcatttcaccggttatcaacaagaggctattggatttgaagacttgtgactcggacgaggaaactacttgccaaagccctgagccaccgcctgatgtccctaaaggatatttggcggtttatgttggacccgagctccggagatttatcatacccacaaactttcttagccattctttgttcaaggtcttgcttgagaaggctgaggaagagtatggatttgatcacagcggtgcgttaaccattccttgtgaagttgagactttcaagtacttacttaagtgcattgagaaccatcctaaagatgacacctcgggtaataacctcttcttctttcgcatagtaatatataatttggatatggataaatcaacaatgtaagattacaattagattcaaatgcatattgttatgagttatgatgataagagtgaatcttgaatacaatttctaatggttttggggagacttgagatcttatagaatgtttttttctttgcagctgaagatccagtagaaacggaagagtaaataataacacatactaatataaactcttcttttcctcttttattaccatccccctttaaactcgtattagggttgatgacactcccaatggtaattgtaaaatcagtttctctttgtatttttctgactatttttcttcctcttctacttccccgttgtttttttttctaaaaggaagagtagaggtgatttgttttgaatgtggtggaattgatggttaaagactcgatgtgagtacatatggttttattgccaatctatcatggactcactatggatgtgaaaacccaaccgtacatttctggtaatatcgaaaatagattatgatgtatgagagatagacctaattaaaatccaccacttataaatagtttcactaaactaattaggatataatctgtagtaaactgcgagttaatttttttgttacaaaaagaacaaatttgaaattgtatttgttttgtttttgtttagtgtttgagattatataattgtatttttattgtcaattctaggatatcatccttgatatatctttttgtattaatatcgactcaaacccgtcctaccatataactctatcctaaacccgactcaaaaaaccgctgcccatatttttagaattgtttaatttgtattgaattgttaacttcggaatatattttttgtttgatgtaaatttacgttgttattatgttaatgacatcgtgtcattctaatattttgaaataattaataatagtgtaacaaatagggcaaatatcttttggattttgttttaaaaaaaatccagtcattagacaaaatgaagtgaaatattaatggtacgaagacaaactgttctatgtctcactttctatttttgtttagatttttcgattatactcagctatgatcctataatattcgtgaccaaatacgaaataaaaaatcggagactctatataaaataataccacaattaactttaccaaaaacaaaatcgttatgacaaataaacagcaaaaacgactatcttatttaaactttctcttgaagatactctttgttgttttttgttccgcaaagccattcatcaaaatttcgtagtcaaggtgtttaaccatgtctttttcaatccataacatagccaaacattttagcgtattttgtgatgttgttgatcgcaagtaagacttgatcaactctagctttgaaaagcttctttctaccgaggcgactgatatcagaattatgagcataattcttatgcaatccatgtattgggataacagtccttcaacctcttcaaaaatacctcagcagtcgttttgatatattctggtagaacttctcgaaataccttaatatcgaagaataaatcatttccatcaatatctgaatgtgctccatgcttaagagacacttcaagattggtacataaattctttaagctctcatcgtttattgagttctattttcttagatcaaacaaaaaagcaaaagttttttcatactcttaaaattggtctgaccttgttttaagagaaactagagtttgatccatgattttgatgaaatactcgattctaaacttctcctagtcgctcagaattacagtttcatcatcaacttgtctttgctcttcatcagaataggttcttcttttatttacgcgcttcctttccacatggaaaatgagtttgatatccataacaacatctttttttgtgacttcaacttttgctacttcaaaacctgtttctctatacttttgaaagaaagagactaacccttttagttgagtaattgttgcaacaatatctatatcttcactttgaaaagtcttgctcaccatattcacggcaaccaaaatctcataccatataacaataccaaatagaaactcatatcattctattccataagttttacttatcacaagacacaccacatctctctgcaatttaggatcatcaatgttatcaaccaagaaaacaaagcatcacaaatttttggagcttagaaatctatagctttaacgctttcgggatgactttcccaacgagtatctgaaaaaagtttaagtgttggacttcctaccatattcttgtatataacactccttgttgtagaaggcgaaaataaataatatgaactttgaatgatccgaaaaaacccaatcgcttttgtagatgatttagccatatcacaaatagccaaattcagattatggcaaccacattgcgtatataacgctcgtacattaacaacaagcattcttttttgtactcctttattttgcccgttcatatttgagccattaatatcatagccttgtcctcacagtctcacacatcatcaatatccaagttaagatacaccaatgtatcacaaagttgatcaaacaacccttttcctactttatcaacaacttccaaaaagtgaatgaaatattatgatacctgagttgaatccgtagaaacatccacacatcgaatgaaaagggacatttgctccttgtgactaacatcaggactacagtccagaataactgaaaaatgtgttgcctcttgaatcttcttaatctgaaacttaacttctgatcccaacattgctatcaattcagtctgaatcttgtggctgagaaaatgatatttagttttttttcttctctttgataccgttgatgtgctccttgatcactggataaatctccaaatatttcaattaagctaaggaaattcccattgatattcttgccaaactttttgttgcttccacggaaagctatattgcatttatcctcagtcttcattagtgagaataatctcaataaaacttctctccaatgatttttctctttctagatattttcttgggcgcacttatcaattcttatatccttttgcaatctcagctctaattccatccattggcccatcacataatgtgactatgattactctcatgttggcaaagcctatttttcttttagtagatcaacggaagaaaatttcccaaaaatttattatgaaacttcaaagaaaaactatatgggcgcttgccttggtcgcgtggacccaagcgcataatctcttagcacagtaacacaatcaacaggaacaaccttcaaagaatgaaaacctaatggcaaagaaaaaacatagttggctaacttgtctacaagacggttagcttccctatacacgtgacaaatccaaacaatccagttttttgagataaaaccattgaacaatcgtacaaggaaggatagcggatgcaaagcatctatcgttgtcttgagaaaccctaccaccaattctgagttaacttccaggtgaaccctcttgaaacgattctcccaagctatatataacccataatacaccaccacaactccgccaacggtgccgagcatcaaccaatgttaaccgcaaaccctccacaccaagtaccagctccatttcgtaatacaccacctgttgttgcttaccccgaataccctagacgatagattcaaaaccagatcaaatcactatagtgacagagaacctcataactttaccaattcctaatctcaactctcgttgatgaaacatagcaaagcaggctttaagcaacaatttatcaaagtcaataagcagtctaaacatccaatatcttgggctagaatctacaaatctttggatttcgtagatcagacatccatttgaacgtcttttggacgcttgaataccttggatcgaatctcaaactgaactgagtgaaataagcattagggccaatgaatacagaagggatctgacctaatcttaaacacctgactgataagtaggtttttatgcctacttctatgctgaagtgtggtgtgttcagttcaattctaacatgtcgatgcagctataaggggtgtcaatccagtctactgttattgctagcaattaagatgtgtatagaagcaactaagtcaagccagattataatgatggtgggtttctattaacaatcctaaatcaggattcaaacaacaaaaatgggaacttaagagccctacttgatcattgggtcgagtagaactaacatgtgacaaatttaaaaaccaaaatgcaataaaaggtaactaagcaaaatgacacaaataacaggtgaataaaagtgcaatcatggggtgaatacaaataaatctaagaagaatagaagtcctaaggatggattcattgataagggaaactctagggttcatcaggtagctaacaggtgaaaggcaaataccctagacgatagattcaaaattgggtcaatgcactatcgtgacagagaccctcataactctaccacttcctaatctcaactatcattgatgaaacatagtagagcaggctttaagcaacaatctaccaaagtcaataagcagtctaaacaaccaatctcttgggctagaatctacaaatctcaggaattcgtagctcagacatccatttgaacgtcttttggacgctggatacctatggtctaattcccatattagccagcgaaaactgcataggagccaacgaatccagaagggatctaacctaatcgtaaccacctgattaacctagagattaccctaatctaatccatcctcaagaaccctaatcactactcaaggaacataactaagacactataagaaaacaggcgatttgcgagggaaatttgcgatggcaaatacgactcacaaattgctacagctttgcgagatgtttgcgagatcaacgagcttccacgcaaatccgtcgcaaactttgcgagggataactctgttgcaaaattgcgagaagtttgcgaggagtttgcgtggacagcaggattcgtcgcaaagtcgtcgcaaaattgcgaggcaattacgggtacaaagaagacacacaaaatgcgacgtatttgcgacggaactactaggtattggcgggttaaatgagcacgtttgaaataatcttacctaactggttggttggtgcatttccctcgcaaattcctagcaataaagctcagttcctagcaaatccctcgcaatccgccttgcaattccctcgcaaattttttttggacatctataaataaccaacgtaacatgtaagaaatcataactcaaatcacaacaacatttacttacaaacaaacatatttattctaaaaaaaatattatttacgaaaataataatgtcttggggtggagagtatgagatttacatattacgaagttggatgtacaatcatagagatcaagcgaccggtgaggtgacgagagagtattatgaaggactgtgcggtttcatgtatcaagcgacaaacgaaccatttgctcgtgagaacggcacaatattctgtccatgtcgtaagtgtatcaatgagaaaacatttgaaatttaatgtagtgaagaagcatctttataatagaggatttatgccaaactactatgtttggttacgtcatggagagggttgtagtgatagcgcaggaactagtaatacaaattatggtgtcgagcaacctagtaattttaataatgatgcgaattatggtcagcaagtacctgatcaatttgtttatggacataaccaggaaaatagattttatgatatggttacggatgcatttcatgaaactgttgctgcatttcctgaaaatattagtgaagatcccaacgtagatgcacaatactttaatgatatgttagatgctgcaaatcaaccaatctacgagggatgtagagaagggctttctagattatctttggcatctaggatgatgactattaaagctgataataacttaagtgaaaattgcatggattcatagacagaattaattaaggaatatttgccaccggataatatatcgactgagagttattattaaatacagaagttggtttcgagtcttgggttaccatcagaaacgattgatgtatgcattgactattgcatgatttttttgggagatgatgaaaatctgcaggaatgtcaattttgcgggaagccgagatatcagactactggcggaaggacgcgagtgccatataaacggatgtggtacttgtcaataactgatagattgaaacgcttatatcaatcggaaagaactacgacgaaaatgagatggcatgctcaacatacaactgcagacggagaaataacgcacccatcggatgcaaaggcatggaaacactttcaaacggtatattctgactttgctaacgagtgcagaaatgtgtatcttggcttaaacacagatggatttagtccatttggtttgtctgggcgacaatattctctttggcctgttatcttgacgccatacaatcttcctccggatatgtgtatgtaaagcgaatttctattcttaagtattctagtgcctggtccaaagcatccgaaacgagcgcttgatgtcttcttgcaaccgctgattcatgaactcaagaagttgtggtatgaaggtgtacacacgtttgattactcgagcaaacaaaatttcaatatgcgggcagtgctaatgtggacgattagtgacttcccggcatattgaatgttatcgggatggacaacgcatggaagattatcttgtccctactgtatgggtcgtaccgatgcgtttcagctaaagaaaggcagaaatcatgttggtttgattgttatcgtcggtttcttcccctacatcatctgtatcggaggaacaagaaattgtttaggaagaataaagtagttcgtattcctccgccatcttatgtttgtggaaatgatttgtttgagcagatcgattattatggtgctcatgaaatatgcaaacgtggggggtaattaacatactacaacgaatatgcctgatgaatatggaagcactcacaattggcacaaacaaagtatcttttagcaaatcccatattggaaggatctcctcttgcggcataaccttgatgtgatgcacatcgagaaaaacgtttttgataatttcatgaatacacttttgaatgtgcacggcaaaacaaaagatagtttgaaatcaaggttggacttggcggaaatatgcagcagacctaagttgcatgttacacgagatgggaaattaccggtttcaaaattccgcttgtctcctgaagcaaagaaggcgttgttcgagttggttgttgctgaagtgaagttttcagatggctatgtgtcaaacttttcaagatgcgtagagcaaggaagaaagttttctggtatgaaaagtcatgattgtcatgtattcatgcaacgattactgccatttgtgttattcgagttgctaccggcaaatattcatgaaacaattgcaggtaatatatatatatatatactatatatattcttttactcaattattacttgacgactattaacttacattaaataaatacatgataggcaacagagtatttttcaggaacctatgttcaagaacattgacaacagataccatagaacaattagacaagaatattccagtgttgctctataacttggaaaaaatatttccccctgccttttttgacgtgatggaacatttgccaattcatcttacacatgaagctgctcttggtggaccagtgcaattttgatggatgtatccttttgagcgattcatgaaatctcttaaaggaaaggcaaaaaatcttcctagagttgaggggtcgatagtcgcaggaagtttaaccgaggaaacgtctcacttcacgtcgtattactttagtccaagcgttagaaccaaaaagactcgtccacgacgatatgacgatggaggtttgcacctacatataacgttcctgatgttccagatacctttgcccaaataggtagacttgcagggaagttgaaagaagtttggtgggacgaccatgcgctttctcgagcagctcacaattacatactccgaaatgttgattacattcaaaaatttgaaaggtataaagccatacagttttattcttaatttttttatattttatagtgactgtgatactaattaaggaagctaaagtgatttccgattaatttgtaggttatttgattcacaaatctgtgaagcatgtcctggattagaagaaaaagaatatgaaacttacaaagatcgtgattttgttggatggttaaaacactatacacgtataagaatgtttggaaaattcgtttacttaacaacttataaaaaatgataattaaacttaatattttctttgtatacgttacaaacggatgtggaaacgaaccattaccactttggttgcatgagctcgttcaagaacaaagatctaagatcacaacttctccgatgtacttcactcatggctatactttccatacgtatccatatggaagtcgaagggcaactgcgaattatggaatccatgttgaaggtgaaactgagttttatggaattctacaacaaattctagaagtcgaatattcgggacttttgaatttgaaatgcgtccttttcaagtgtgattggtatgatcctgtgatcggtcgaggggtacgggtaaataacttaggggtggtcgatgtcaatgcaaacaagacttattcaaaatttgaaccatttatcctagcatcacaagcagggcaagtaagctttctatctcacccgcgtgagaggcctaggcgtgaagtgtggttatcggttattaaagttaatcccagagaccgtatagtcggtctagttgatgatgttgtgatgcaacaagaaagtatcagagaagtttccataccaaacataacaacagaagatgttatccacattgacctacaaaacagagaattagaagacatcactcatgacgattccgaagaagaagaacaatcagacgaattcggcgaatctgatgaagacgttgagtctgaaagtgattgtaataattcagaaaatgaatcagaatgaatattattattgtttaattatcaactttttacaaaatataacaaatatacgaaaaaattctgaaaatcttttttatatacttccaattttttaattttaaagtttttataaattcagaacttagtgatttcttatttaaaatttttgaaatttgttggtgttcttattatattttttaaacttaattttaataaatttgcgagggagttgctgggagtgcacgcagattcctcgcaaaattgccgaaaaccctaaacaactttgtgagggatttgcgagtcttcctagcaactccctcgcaaaattagcggcttttgattagttatttggtcggctcctcgcaaaactgtagcaaagtttgcgagggatttgcgggtcgttttaagtttatatatacaacgcgacccagaccaaaaaccctaatttccttcttcttctttcttcgtctccgtctccgtctccaaacaacgcaccggttccattcttgttcgtctccgtctccgtctccgatcttcttctccagttccttctttttccatcttcgtctccatctccatctccgtctccgaccttcttctccgtctccaatcttcttcgccgcctctctagtcccatcgatctcaaaatgcaaggtaaagaatcttctttcgtttagggtttcatgcaagtcgatttccgtagatatgattagggtttttcttgtacttaatcatttttgtctaagtttctaataagggtctcgaatttcatgcaaggtgaagattgaatgttctgaatcgccgcctcattccttcttctccggcaataacccgatctactaagccgtctctccctcttctccggcgataacccgatctactaagctgtctcaccctcttctccggcgataacccaatcttcttcgccgcctcttgagtcccatcgatttgcaaggtaaagaatcatcaaacgtttagactttcatgcaagtcaattttatctgtgtttctaattagggtctcgaattttgagttgggtttcattagatctagttagggtttcgcttgtttctgtacatctaatgactttgatctgttggatttcattagatcatattagggttttatattttgtgttggatttcactaatgttttcttttcatttgcaagatgagcttcttgggaaacgagtatacaaggtatctgtctcagcagcagcaacaacaaccagtgtctcctcacacgagtgtaagtgatgggaacacctcagcggttggaggaaatcaccgttcctctgcacctcagacgccaaccagtcagaaccttcctccaaatggtgcttctactcaaccagaaaatcagcagcctgcaccttctgtcaatcctactaatcctctagctgtcaggctcaacaacatgacaatagaagagttgcttgaaagttctgggcgtgcgtctttgcccagattagaccctaagcgtccgtcgggaacattctggtaagtataagtgaaagttttggtttaagctatgttattactgcatgacttgtatctgtctgattgaatatatgcttgtaggttcgacgatgactattcagttgcagacattgtccggagcatctttgaaagagatttcaaagaacctcatgctaattggacaaagacaccaggaccagttatcgatcgccggtttgaaacctttgctgtaagtattttaagttgtgtttcattttgtaacttaggcttttttcttgtttatttttgatgtggcttatttctgttttgtagcaagtgtataactgggacaggacaataaataagagagttagggttgagtttgaaacaaagctgaagggaaggatgtctgatcaagttggtctgtggaagggaaagtggaaggaaaagggagatgtggctaaaccgcggtggattgatcctgaagtgttaggttttggaaggatcctaagtcggagttaaagagtatcaacagtaggaatgcgaggtatcatgatccggatggcctcgggatacataaacaccgctctggccagacttcctacaaagcccgtgctcgcaaacgtgtaagtacttttgtattttacttgtcaattaccttgaacagatcaaacaactaaccttatttatttttgttgtagtgtgagttgaccggagaaactactccagattttcttgtgctcttagatgagacacatagaaaatctgatggtagtttcatcgatagaaagtctgaggagatttacaaggaagtgtccggaaggattcaggaggaggagtcgcagatgtgttcaggagacactacggagagcatagcttcagggggattatttgttcaggccaagaacaagatttatgcctaggtaaattttctctttcaactcaataaagtttcagttgagccagtttatgattactatggattttggccattgtgtcttagtcattgtgtttcaaactgatttgattatgttgtggcttgcattttttcataacattgtgtttcggatgcgctttgattattttgcttcttggcctttgtgttatgacattgtgtttcaaacttctatgattatgttgtggcttgcattttttcctaatgtcattaagtttcagcctgctttgattatgttgtgttatgactttgtgtttcaaactgatatgattatgttgtggcttgcattttgtcataatgtcattgagtttcagcctgctttgactatgttgtgttatgactttgtgtttcaaactgatgtgattatgttgtggcttgcattttgttataatgtcattgagtttcagccttctttgacaatgttgtgttatgactttgtgtttcaaactattatgatgtatgtgtttttggttgtgttgttatatcattgagtttcagcctgctttgactatgttgtgtttttttttgttgctccaaagaagaaaggcaggatttatggtgctggttcattgcagcttgaaacatcttcagctcatgctggtccagttcttcctcgagaagatccggttgcgctctcgcaaaagctggctgccgctgaagcactcattgcaaaccaagctgagaagatcacaagctttgatgcctactttgactatcttgctgagaaggatccagaattcgctgcactgtttcgagccaggtcctctacaaggactgaaccggtcagctccagtctgagacccgaagagcctaatgccacagctggtacatctgttgggaccggagtcggagctgaggcagttgtagctgacccaagcactagatcctctccatctcaagctttctaaatttctgtactttggttacaaacttagacagttttgaagtttgtaattgtataattacttgttctgtttaacatttgtgcttgaatcttaatatttcagctttgaatcttaaagtttaaagttttcaaatgacttttcaaatataaagtttagtaacaagattaaattaagaaaatcattaattaacgctaattacaacagtaatcactaaatacaacaatattcaagcaaacattatatacaaaaaatagtcgcaattatcttgcaaatccatcgcaattattggtagggacttgcgactactctaaaagagccacgcaaatccatcgcaaattttgctagggaattgcaaaaaccaagcactctcgcaaaaccatcgcaaaatttgcgaggaagaagcgagatagttaatctgctacgaatttattacggattattcctctcgcaaagtgcgagtgtttcgcaagatactttgttcctcgcaaaatttgcgaggaattaactaccgcttccactttgcgatgcacgttttgcgaggaaccggttttcctcgcaattccctcggtatactcgttttccgagggattcgctatagattcttccgtcgcaaatgacctatttttttgtagttaacacaaacccagaaattaccgaaattatatcaaaatgtagatttaaacaagataaacatctttgctcaaagaactaaatgtaaaaacgaaatagattaagagtaattaaggtttcaagattctaaaacacaaagcaaaactacaaaataaaagcttggtcttttggacaaatcccaaagaacctatttatactaaaatctcaaaaaccctagattcactagaagacaagagacttgaggcggtttggattgatgctcgatcttggggatctagtaaagagggtgctgcaaagtctgcgccttttcctccatgctctgagtgatcaattggtcgagtagatgcttcttccgctcctattcgtatgctcagatgtctggttaagtggggaatgaggaggatctgaagacgctttgaatgatcaacaagtcttgtagagtaggttgcccttgatcgagtaactggtcgagtagaggatcgagtaaaaggggagagtagattgatctgcggcttcctttgtagctgcctggatcgagtaaatgggtcgagtgaatttctctgctgtttccctcctggtttgatagagtagggggtcgagtagattccttgtaagctccttctgcacctgaaaacacaccaaaacatgcaatatgtatgcaagatgatcctaaatgcgtaagtgtgcaaaataagctaaatgtgatgcaaaatgatatgatacaatgagtgatcacttagctaaatgatgataaatatatgcctaaaatgagtaaaatacagtgttatcaactcccccaaacttatttcttgcttgccctcaagcaaacaaaaaatcttgagttgaaggagaggtttgaaggtggggattcaaaaaccgaagcatgcatatagagcgggtgagatcaatgtccaaggtagctaattctaggttgcaaggtgatagatccttacttcaaaattttagccatactcgacacaatgcaacctaacaactgccttaatctattcaagcattcacatcaaccaattctttttaacttttattaagcacgaacagtggatcaggaaatgcaatggttatgaactcatttagttttgggcttaggctaagagacaaaaatggtccctctaatgatatggtcgagtaacaggggactctcatagaaaagattgagctttaacagaatgccaaaggtaaaagccaacagatacatacaagaacagactcccatctagctatgatatataatgcgatagctcagaagatgatcccagtcccttagatgtcctagctctacccttattcccattctttctcatttttggttcaagttctcaagggtgtttctttaaaacgattcaagagtctagcgggtttggttttaaactttgataaacttaaggcttttcttctaaacttatagcatatacgacgttttacccttttttttgaatcacaatgcctaactttctttgaattctaaaccctttactagactaacacttttttgtatcccccttaagaactctaaactattactctcttttattttctttttttttcattcccattatatttcccattaattccatacacaatcccaatcccaaatacaagtctccacctagtcctacctaacccaaaaagcgtgggtaggtctacatgaaagattactcttgtcggctcatacctaacacgttataccaagctcaatcggaaaaagacctcacaatcacacacaaatgatctttcgcttgaaataaggttaggcgcagagtatgggaaacaactctaaaagtgagagtcagctacttggattaacaaagggtggtgaagtgaataagataatccaagtatgtatatggtagccatgagttcacaaacaatgcatatacatgataattgcaaatttatttcaggttctaatagatagagaatgacatcagattagcgagtttcgaatcaaagtagtatagtcaagttgtaaattcaaagcagggtgcagttttactttagagaaacaatcagttatgcaacagagaactaacaacctgggcattgaacttacttcgctgaatctaaacatgcttaacggtttgaaatcatcattatcccctatgcaaatgagcaatcctaaatgcaagcactctatatacaatcccaaaataaaatgcaatctacatgacactctgtttttgtgaagtcattttctgaaaaattttaaaattttatgggttttttatgccttagatgatgcaaaatttgaaataagtaaagagaacaaaatgtcaaacatgtcttgaaccctccccccaaacttaaattacacagtcccttgtgtaataaaaatctgaaaaagaattcaagactaaaacacaaaacacaaagaaaaataaaaagctatggtataaacaatggtggtggtggtgttacctcagcgatcaggtgaagtaggcgaagacaaggtcatccatactctcctttatgtagctccagggagcgggttgtgctggacttggattggttggatgctctaccctttgctcgggttgttgatcgagtggcttgccccagcatccgatttccttgtctttctgcgcttctttaacttactcctcctctccttctccctaggttcaaagtctgattgcctcggtggtgaaggtgcagcatggtgttctctcggctcatatgaagactgtcttggtggcgaaggcggatcatattgcataggttcatgtcaagtggatccgcttctcctaaaaggcatgtcttgtggcatcgccgtagtagaagaaaacagctgaacttgagttggagagtgttaaacttcttgttgagtgctgcgaaagctttgtcttgaagtttacactagattcggaggaaaccaaggcgcttgcaaatttcctttgagtctttactttgccttggcgcggagtacttctcaaagtaaaattgttgtgatgcataagactcgtccataggttctgcctcattatctgaatgtcgaattggagtttcatcatcattcactccttccattggcacaacttcatcacctgaaccatagaggttctctattggtgggcaaaactcgatgttgctgccatctctaatcgaagtggaagcgggatttgggaggagaaaaatagattatcctgcttcagggcgatcgaactgatatttatataggtcattcttctgttgcgaccaaaagttcttggaattgataaggtgctgcatatcaatccatctcggagcaattggatttaaatgcagaggtacattgcatgctctcaaaattggggtcataactcctcccacaaccattcttcctggtttcttaagtcccttagcccatcctttgtagctcagcagatgttcgattaggtagaatgaaactgaagcgtctgtctgatctcttgctagaacggtaccatctgatgctaaaccaagcagctcctgcagcgctggctccatcaactctagctctccattgacaaaggtcccattcccctctcttgcaaatagtgcactggccaaagacctatgaaagtatttaacaaccagactccttatttcctttcttttggttctagaggaggaaaatccatgtttaaacccaagcgtggcccagaatgactggagctctttcttgtcaaaacgatgattcgtgtccttttcgcttggaaatccatacatcagctctagatgcttgattggaagccgatattctaggtcatacacacagaactccaagtatcccaaacttccgtctggcctgactccgtcgtcctcttactcttcatatatgaataattcgacagatgaaagaaactggatggtctcttcttcatatccctccattggtcgaaatatgtgaatattcaggttgcactgcttaaacatgtagtttacatcatcatagatgccgagtctctccatggtctcaggatgagggaatcgagttcctaaaaacgcgttgcgcttcagcaacctatagtactcgtttcgagtggcgcacttttctgattccaaatcatcaccccctcctctctccgtttgatcagcgtcctcaggtgaaaccatttcttcctcagagtcttcatctacaagtttcagccttctcccacgggcttctttcctcgggatcgagtgtttttggcaggagagttgaaagtttcttcttcttgcatcgcttcctcctcttggcttgattcgttgtgatcgatctcgaaatttgcttgttctctcctgctcgaccccatggatgatggttcagagagtcctcgagctgctgcatgcaaagaaggtgttggatatctcttcgatggtgagagagctctgttccggatccttgacaagagcgtgcacttgtttgtcattgagaacaagaatgggagagactcaaaaccaaaattcagtaggttaagagatcgaatgatggaaataacaaatgaattttgcaatatttttgataagaaggggaagtgaaggaaagagagagagttataagaatttgagaatgctttggtatgggaggtggagatatgaggttgttgagttcgggaattgcgatggggggggagggaccaaagtgattatgaggggacaagaagacaaagagacatcatggatttcaatggaggcgggtcacgagccgtcggagtccgcaaggtagtctctttggtttcttcactcgatcggacggtggaaagtacttcactcttaagcactcgatcaaacggaccagattaaacctcatgaatttactcgatcaaagggtggggatgattcctctatttggtcattcaatcgcacaactcagaacactcctctttgttttactctatcaacggttgagatgattcttgacttgatttaaatttactcgaccgttgacttcctcaggatcaatgaaataaacctgaaacacataaacgaaaacatcaaaaataaaaatgaaaatagaaagttatatacatggatagacatgggactgcctcccaagtgagcttgttttaagttgttgaatcaagtgttcttcttcaatagagggtttattgggctgtttaggcactcatggagaataagtcagaaatagggatttcctcctcactcaacaacttactctctaagcttctttcctctaaatgaactcctttctgatcttttggtgcaaaccattctgttctgaaatcattgtcctctttgatagctagtgtagtttccatcttctctagatcaattcccattaaatacttattaactcttttttcaaaatcccaaagttaatctttcagcttcatcactcttgaagacaatccctctatgactttgctctgccatttaaattttttcttaatctcatattagtcatcttctgtagggtcttcagtctgagctaacccttttaaggttttattctggtggccaaaagttctcttcagcttgctgagttgagaagtatagttaaatcttggtgggtttccaggttctgtttctgcatcaacatccatgtcctgaatcccaaaattttgacctcctgttgttgatgatttccctgaagctttgctgatgtcaaatttcatattgatacctttttcaaagtttagatcaatctttccattcttgacatctatgactgctccaactgaagctaagaatggtctgcttaggatcaggggatcctttccttcttcatccatatccagcactacaaagtctgtaggtatctcaacatttccaatcttgacaggcagattttctattagaccatgaggatgtacaacagaaccatcagctaagagtaaagctaggttgcagaacttgtattccatcactcctagccttttagctgtagagagaggtataaggctaacaaatgctcccaaatcacaaaggcacctattgaatgtcaatggtcctagggagcatggcagagtgaatgaatcaggatcatctagcttttcttggatgactttcttcttttaaatttcttgagtgatgacactactaatcatctcttgatattgatccttctcgagtttttccactttaattttttttctgaatggtgagtatccagcaaaggtgtgtgctctatagtacagatgaattgctggatggcaggtgcaacaatttgagttgaatcatccccttcttgaaccatactgtccttagtattgttgagctgatgatttggtggagactcttctacttgttgaatggtgatagcattagcagtagcatagtccttaggattctgaactgctttttctggaagttgctgaggatgcttcggagcagaggtggatgcgaactgactctccacatacttgactttggaattcaaagcttcaaacttaacatttagatcgttgtaagaacaacctatcttgttgtgtaattcagctatcttcttgtcaaaagccatagctccagtagcttgtccctgaatgatctattgaataagtttcttaatttcaggatcttgtgttgttggggcttgttgtggttattgagtgaactttggtggtggattctgctgttggtatcctccattgaactgttgtttagggacataaccttggtggtggatacacttgatcttgggggttaactacattattgcttatgtaggagaggtttgggttgggcttgtagttgttgtagcccttgttgaaccctccttggttctgaatatagcaggactcttctgtttggtcattctccccttcttgcatttggaattgctcttcatcagtcatgtagtgtatctgcttctgctgagccaaaaatagtttgtctagcatttcattcagggccttgatatctttgctctgtctatcctcagtgcctccagttcctctcactgagcgatcatagtcttcattgtagcacccatcatattgtgctagatttttgagtaactcccatctttctgctacatccttgttcagaaagtttccatttgaggcagtgtcgagttgcattttaatttttggtaaagcccctctgtagagtgtgctcaataatgaagctttcttaaaaccgtgatgggggcactgagtggtgtagcttttaaacctctcccaagcttccgagaaagtttcattgtttttctgggtaaagcgtgagatctcgttcctcaatctagctgttcgagcattagagaagaacttggcaagaaaagcttttttacaatcatcccatgagttgatggagcctaggggaagagtcttctcccagtgatgtgccttgtctccctaagagaagggaaatagtctgagtttaaacccatcttcagtgacaccattgatcttggtaaggttacagagcctatcaaagctatcaagatggtccaggggatcttgcataggcaaactcttgatttcaaagttgttgtttgagaccactcttgatttcaaagttgttgttttgcactggtggtggcactatcccttgtctttggtgatgattcctaggtgcatcaccaacaccaatgtttcttggttgatcaactataggtggatcttgatcctcaactcctttgtcctcttgatctatagcagctggtctttgctgatcacaggctgcctttgctttggtttcttgtaactcacgacctattctgtcaatcctgtctttgaaaggtagtaggtttgcagaaccttcagaccgagtttgcatgcacaaagattagtacctataccacaaaaacaagcagacgaaaagatgagttagtaacttgagtattataaaagaacttgatcttaaatttttctgatatcttgaatgtaacaatgcaacaatgaattggcaacgacgccaaatagataagtaggtttttgcgcctacttatatgctgaagtgtggtgtgttcagttcaattccccttagacactaacatgtcgatgcaactatagggggtgtcaatccagtccactgttattgctagcaatcacgatgtttacagaagcaactacgtcaagccagattataatgatggtgggtttctagtaacaatcctaaatcaggattcaaacaacaaaaatgagaacttaagagccctactcgatcattgggtcgagtagaaccaacatgtgacaagtttaagaaccaaaatgttagttcatcaggtggctaacaggccaaaggcaaataccctagacgatagattcaaaatcgggtcaatccactcttgtgacagagatcctcataactttaccacttcctaatctcaactctcgttactgaaacatagcagagcaggatttaagcaacaatctaccaaagtcaataagcagtctaaacaaccaatctcttgggctagaatctacaaatctctggaattcgtatatctggcatccatttgaacatcttttggacgctggatacatatggtcgaattcccacattagccagcaaacaccgcataggggccaacgaatctagaagggatctaaacttatcttaaccacctgactaacctagagattaccctaatctaatccatcatcaagaacgctaatcactattcaagcaacataactaagaacacaaacccaaaaaattacagaaatcatataaaaatgtagatctaaacaagataaacaactttgctcaaagaactaaatgaaaaaaacgaaatagattaagagtagttaaggtttcaagattctaaaacacaaagaaaaactacagaataaaagcttggtcctttggacaaaccccaaagaacctatttatactaaaatctcaaaaaccctcgattcactagaagacaagaggcttgaggcggtttggatggatgttcaatcttggggatcgagtaaagagggtgctgcaaagtctgcgcatttgcctccatgctacgagtgatcaattggtcgagtagatgcttcttcctctcctatttgtatgctcagatgtctggttgagtggggaatgagaaggatccaaagacgctttgaacgatcaacaagtcttgtagagtaggttgccctcgatcgagtaactggtcgagtaaaggatcgagtaaaaggggcaagtagattgatctgctgcgtggatcgtgtaaaggggtcgagtgaattgctctgctgcttccctcctgttttgatagagtagggggtcgagtagatgccttgtaagctccttcagcacctgcaaacacaccaaaacatgcaatatgtatgcaagatgatcctaaatgcctaagtgtgcaaaataagctaaatgtgatgcaaaatgatatgataaatgagtgatcactaagctaaatgatgataaatacatgcctaaaatgagtaaatacagtgttatcactgactaacctagagattatcctaatctaaaccatcctcaagaaccctaatcactactcaaacaacataatcaagaacacaaacctagaaattactctatacatatcaaaatatagatctaaacaagataaacaactttgctcaaagcactaaatggaaaaacaaaatagattaagagtaattaaggtttcaagatcctaaatcacaaagaaaaactaagagataaaaccttggttctttggaataacccaaagtgacctatttatactaaaatctcgaaaatcctagattcactaggtgacaagagacttgaggcggtttggatagatgctcgatcttggggatcgattaaagagggtggtgcaaaatctgtgcctttgcctctaagctctgagtgatcaattggtcgagtagttgcttcttcctctcctcttcttatgctcagttgtctgattgagtggggaatgaggaggatcggaagacgctttgaacgatcaacaagtcttgtagaatgggttgcccttgatcgagtagtacatcgagtagagggtcgagtattgtctgttgcttcctctgtagctgcctggatcgagtaactggtcgagtgaattactctgctgcttccctcctggtttgatagagtagagggtcgagtgatttgctctgtatactcattttgcaccttaaaacacacaaaaacatgcaatatgatcctaaatgcctaagtgtgcaaaataagctaattgtgatgcaaaatgatatgaaacaatgagtgatcactaagctaaatgatgataaacacatgccttaaatgagtaaaatacagtgttatcaactcgccaaacttatctcttgcttgccctcaagcaaacaaactatcttaatttgaaggagaggtttgaaggtggggattcaaaaccaaagcatgcatatagagcgagtgagatcaatgtccataaaaaaaccatatgtgctctaggaaaccaaacatatcctcaagagttttgatggccaaaatatagtcttttccatagactttgaagatgatataccccaacccttcttctctcgactcatggcaaggtagcccccgaaaccactattgtaggctgagtgagggttggccatgagacccaaaagaccactcttttcaaagaggtactcgacatattctgttatgccaagctctttcatggtttgggggtgagggtatcgagtgccctgaatatcgtgaaccaccaaaagctcatagtaaccatttggcgacaacttagtcttctttatcaaggatttggtgatccttggagttattcagggacatagtcttcatccccaccaaggtcttcatccacaaggcttctctcctccgccatggctctcttacctcttgcaatctcagctcttcttctattgataataggtttttaagatcaattaatcctaaaacactatcttgtcgttgtagtattttaggtgtcaatcaattcaggtgtgatgcaaacagatgagatgtgatcagaagtcactaagtcaagccaagtaataacagttttgggatttctaacagtcctaagcgaatatgcaaaaaacagaaactttaacagaattactaaaatcactcgaccacaacaggctgatgccagaagcaggatgtggtcgagtaagaggtcgagtaatgagacaactgtactcgactgcacagtctgttgccagacattgggtgtggtccaataagttggtcgagtaattgcaaaaactaagaaatagacaatgagagattaagcgataacgataaaacagagaaatcagatagacgagaaattcctaaggatgggataatcgaatagagtggtatcctagccaattcgaatggttaacaagggcaatcaggctatccctagacaacatgttcaacaacagatcaattcactctcgtgatagaaatcctcaagcaaagctagcccagactaattctcattaacgcaatctaactttgcaggaggtcgaagggttttcttgaagacctatcagcaaggattaaagtcagatcgcaaggcctctactgagtgaattccagcttccttgccacagagagtggcattaagcttactgaagctcctaaatctcatggacaatttctgaaagccaattgcccaatagaacatggtagagtgaaagatccaggatcttccagcttttcttgaacgctcctcttaacagtggctctagacggattatcatcacattcatcttctgaatccttatacatcttgatcctttccagaattgaatttctcatatctttgtgagggttcgggatcaggttgagaacttgtattaaaggcatcaccacttccatctcatcaagctgcttctttgcaagagaactgtatctttctatccatgctttcctgaatttccatggaagagcacgtgaaggtaatggtgctggcttaaatcgttttaccatcctctcaatgatggctgctttctcgtccagggtagactgagtttgaaaacgagatcaagctgaatggtcgagtccaataactgaaattgcaatctgagtaaaagcctcccctttctgaacatcactgtgagttggagacatgtcgagttggtagctctcgatcatgacatatagtgatagcgtgagcggtagcgtattccttcgggtttgggattgatttccttggaagtcatgttactttgggagcagaggttgaccctgtttgtccttccatgtatcagaccttagaggtaagtgcctcaattttgatgttcagatcgttgaaagtgcaatcaaccttgttgtggatttctgccatctttttggcgagatccattgctcctgctgcttgtccttggagaatctggtataacatattcttcaaatctgaatctagagttggtgaaggttgttggttttgctgctgtgcaaacccaggtggtggaagttgctgctgatagttgccctagtactgctgcttaggaacataccccagaccctggttgtatggaacaaagggtttggattgattctgctgctatgaagggtagacttggtcctgcgggtttgcaacaattgtacttctgtaagacatattgggatggttctgcttgaagttgttgaaacctttgttgtaacctccttggttttgcacatagctgacctcttctgattgccaagtctccccatcctggacttggaacgtctcatcatctccctgaaaatgaacatgcttatgttgcacaaggagtaggttgtccaacttgtcattcataactttcatttcccggcggtgcttctcatcaaaatcagagctggagcagatgcttctatcataatcttcattgtagttactatccaattgagccaagttctctaccagctcccattcgtcttgaacgtctttgttgaggaagttcccgttagaagcggtatcaagaagcatcctgatcttgggaagcacacctatgtagagagtgctgagaagtgaagctttggagaaaccatgatgaggaaattgcgtgtaataacctttgaagcgctaccatgcttcacagaaagtcttagtgcttttctgtgtgaaaccagaaatatcattccgaagtcttgcagtcctggagtttgagaaaaacttagccaagaaggctttcttggagtcattccaggaggtgataaagccttgaggaagcgacttttcccactaatgggctttgtctccaagagagaatggaaacaatctaagcttgaagccatcctcactaactccattgatctttgttaggctgcagagcctatcaaactcgtctaggtgatcgagtggatcctccatagggaggccgtgaaacttgttgctctgaaccatggcaatgagaccgctcttgatctcaaagttgttgttctgcactggtggaggcacgatgccattacgctgattgtggttgcgtggtgcatcgcctgcaccaatgttgtttggttgcacttgctcatctacaattgcagccattgtatctgtttctgtctgtgttctgagttggcgagcaatacggtcgatgatatcgttgaataggagattctgatttctttgtgaccgtgtttgataataggttattaagatcaattaatcctaaaacactatcttgtcgttgtagtattttaggtgtcattccaatcaggtatgatgcaaacagatgagatgtgatcagaagtcactaagtcaagccaagcaataacagttttggtgtttctaacagtcccaagcgaatatgcagaaaacaaaaactttaacagaattactaaaatcactcgaccacaacatgctgatgtcagaagcaggatgtggtcgagtaagaggtcgagtaatgagacaactgtactcgactgcacagtctgttgccaaacactgggtgtggtccagtaagttggtcgagtaattgcaaaaactaagaaacaagcaatgagaacgattaagcgataacgataaaacagagaaatcagatagacgagaaattcctaaggatgggataatcgaatagagtggtatcctagcctattcgaatggttaacaagcgcaatcaggctatccctagacaacatgttcaacaacagatcaattcactctcgtgatagaaatcctcaagcaaagctagcccagactaattctcattaacgcaatctaactatgtaggcaataaggatagactgataaagtcaataaacgctctaaacggccaatcccttgggatagagacgaatatcacaggaactagtggatcaagcattccatcaaacaccttctgggtgcgggaatgccttggatcgaattccagttgattagaaagaaataagcagtaaacataactagtcctgaagggattcaatcaattctaaaccttaaccattctacagactaaggattccacaaccattctatcccatccttaagaactctatgtcactactcagacaacatgctcaaagacataaatgcaggtaaacaagtatattgcataagtgaagagataaagactagagaaacaatatgacagatgaaatcaaatgcggaatctgaataacttggaaaaatctcgaattacaggttgtagaaacaaaagcggcgcagccagagtaaaacagaaaataaaactgaaagcaaaaactcaatgtcgactagatgtcccaggacaaaaccctaagacacctatttatacaaaacgaaataaaatgacagtagatgggccgggaacctaatcgccctggcccatagagtgataatggaccgagatgggcttcgtgattggatgaagctccggaccgcttccaaacacttcttcttctcctcttctcttcctaatgctcagcttgtctggttgagtgcggatttgagtagattctgaagatgtgatcgagtgcttggtcgagtggaggtattggtgttgagtgatgatgcacgaccagggggtcgagtagtgtggtagagtgaacagccgagtgtggttaggtggtgtgacgaagtgatactcgaccagggggtcgagtggtttcatctagtggcctgagctgcggttactcgaccacggggtcgagtagatgggaagaatggctccaatgtcactcgaccaggtggtcgagtattgtgctggatgtactcggcctgggggtcgagtatgtcttttggttctggctcgcttcttccaatttgctcgccaacagctctaaatcacctgaaaacaacttagaaatacaatatgtatgcaaagctatcataatcatgcaaagtatgcaagagtgatgagaaatgatataaaacagtgatgaatgatatgaaactagactcaaaacgatgatgaatgaacataaaaaacattcaaattatagacatatcatctatcactagctagagcttcggcggtttgttgattgaactgcctgtactcttccatctctctctcaggcctagtagaccaagactcagcctcatccaggttgaaatcggtgtccattgaagatctgttgctgtttgaactcatggtgaaactgaactcttagaaaccaaaactaaagcttagtaggtgagtcaaaaacaaaaggaaaacgtttatggctttggtcgagtaaaatgggggggggggagtgatttctgaagaaagctgaaaactgaaatgttggggatgatttggaacataaatcaaatgagagagatgatagttgggtgcgcacaaaggagaaagtgagggatagtgatatcttagctttgatgttgatatgaatgagtggaggaaaatggtctcccatgctttcttgttgatataagaaagtttaaccgaatattattgaacatgatgggtaaatgctttatccaccgagtaatagagaaatgggggaactagtgggccactcgataaccatgcttggtcgtttgatcacgccactcaaccaattgatggagtaaaatgatgaagcaaatttactcgaccaattgatagagtaaaattacttctgtaacagatatttcttgatcacagactccacagttctacaaatcctgatttatttcttgaattttaaaaacactaaaaaacatatcaaaatatcaaatttaaatatgtacagagatagacatgggacttcctcccaagtgagcttgtttaaagtcttaagctagactccttactattttaggcattaatgggctcctggaggtgaactgtaattccttcaggaatagggcaatctaccatgtaacgcttgaccctctgcccatttacagtaaattcaaaacttccatttccagtaagagtaattgccccatatggcaatacttctttgattgtgaaagatccaggccacctgaatttgagcttttctggaaacaacttgagcctggagttgaatagcagaacttcgtctccaatgttgaaatcttttggtgcgatctttttgtcatagaaggcttttgttatttctttgtagatcttagaactctcatatgctttcagcctaatctcttccagttcatgcaggtcgactgcacttttttcttgagctcctttgatttccaagttcaagagtttggttgcccaaatagctctatattccatttctattggttaatgacaagatttcccatatagcatctggaatggggttcttccaataggcgttttatatgcaactctataggcccacaaagtctcatcaagtttagttgaccaatcccttcttgagacaccaacaacttttgtgagtatagctttgatatgcatgtttgacacttccacttagccactagtctgaggatgatagggagtggcaaccttatgcttaaccccatgttttctcaacaaactttcaaagaccttgtttatgtaatgcgagcctttatcacttattactaccttggggataccatatctgggaaagataatgggcttaaacattttcagaaccactttgtgatcattggtcggtgctgctatagctttgacccacttggagacgtaatccactgctaccaggatgtaagtatttccatatgaggaagggttgaacggatccatgaagtctatcccccatacatcgaaaacttctacctcaagaatgggattctgtggcatctcattcctcctggatatgttcccgactctttggcatggatcgcattttcctatgaactcttgagtgtctttaaacattgtgggccaccatagacctgcttgcaacactttttgggcggtcttaaaagtggcgaaatgccctccataggtggagtcatggcaatgttccagtataccctgaacttctccttcagagacacacctcctgaatagcccatcatttccctttttatacaggtatggttcatcccaatagtaatggtgtatatctctacataacttcttctttttatatgcatccagactctgagatatcataccacttactaaataattgactaaatctgcataccaggacaacttttcttcttcaactgcatatatttcatccagtatgtcctttgtgctgatatttttgttaacaaggtcgtaaaacatcagcttttcttcgggcataatgtcatctatcgggattgaatcctcaatcctcattctggagagatgatctataactccattctctatacctttcttaccaatgacttccatgtaaaactcctgaagtaatagtatccaccttagaagccttggcttggtttccttctttgcgtagatgtcccttagtgttgcatggtttgtgtaaaccttcactttggaaccaaccaaatagcttctaaatttctcaaatgcgaaaaccacagctaacagctccctttctgtggttgcatatcttgtctgagctttgtccattgttctactggcgtagtagatgacgtgaagtttgccatcaaacctttgacctagaactcctccaacttcataatcggatgcatcacacataatctcaaatggatagtcccagttgggtgcttgaacgataggggcagacaccaacgcttcttttatcgaatggaaggccttaagacaatcttcatcaaaattgaactcagtttccttgcacagcaatctagtgaggtgtcaagcaatctttgaaaaatcttttatgaatctcctgtagaatcctgcgtggcctagaaagcttctgatatccttaactgttttaggggatcgcagctgaatcatgacatcgatttttgccttatcgacctcaattcctttaccagaaatcttgtgccctagtacaattccttcttgaaccatgaaatgacatttctcccagttgagtaccaaattgattttctcacacctttctagaaccctgcacaaataacaaacatgaggagaaagaggatccatagactgagatcatgaatactccattatctcctcaataaaatccgagaatattgaagtcatgcttctctggaaagtcccaggagcattacataaaccaaaagacattctcttataggcaaaagttccataggggcagatgaaagtgacttttttcttgatcattagggtgattgcaatttgaaagaaaccactatagccatcaagaaaacagtaataaacatgataagctagcctttctaacatttgatcaatgaatggtaaaggaatatgataatttctagttggagcatttagttttctctaattaatgcacattctgtgtcgagttatagctctagtgggaatgacttcatctaaatcatttttaactacagtcataccccctttcctaggtacacagtggacatgagagacacaagtactatcaaagattgggtagatgatattagcgtcaagtaatttaagaatttcctttttaaccacatctttcaaattcagatttaatctcctctatggttcaacaatagtatatgattcattttcaagatggatcgtatgagtgcataaactaggtgaaattcctttaatatcagctaatgaatacccaatttctttcatatactttctaagctcttttaacaactgatgcacttgttcatcacttaatccattattaataatgacaagataagtatcatttggaccaaggaacgcgtacctcagaccttttggaagaggcttaaggtcaacctttggagctttgagttctgacaagtcatctgaacttgcattttccttaattcttttcataatcagatttttgaggtacttgtgggagtgtggaatgaacatgaaagcatccattaacgacattcttagttcaatctcctttagctgcttatcaaaaatggctttgtatttttctattcatccctttttgaatcttccagagaaaggcatagtcggtttgtagggtggtagagcaaattctttgttcttttctgcaaccacagcttttctttcttcaaaagttggctttgctcgattgagtagagggtcgagtgaggctgatggctatcaagtttagttggttcattaatttgaactttgttttgaagctgatcttctccttcttgaacttcactgtccttagtgatcttttctgtgctctggttatcgagcagtttccaaccactgcgaagtgtaactgcgtgggcatatgctttggggttttgaatggcttctcttggatgtggccctgtatgcttagaggaggtattggaaacagcttggctgtccatgtatatcattttgaatgttaggtcctcatatttgtttcttagctcattgtaggaactatcaactttactattaatctcacccaatcgtttttccaaaactatagctctagtagtttgaccctgaatgatttgttgaagcatttgtttcatgtcgggatcttttcctactggggcgtgttgtggttgttgattgaaccatgttggttgattctgctgttagtatcctccattgaactactgcttagggacataatggcttagacttattatgttggggtgaatacacttgatcttgggggttagctacattagtgtttctgtaggagaggttcgggttgggcttgtagttgttgtagcccttgttgaatcatctggatctaaatatagcagagctcttcagtttgatcattccccccttcttgcatttggaagtgctcttcatcagtgatgtagtgtatctgcttctgttgagccaacaacagtttgtctagcttttcagtcagggccttgatatccttcctttgtctatcttcagcttctcctgttcctctcactgagcgatcatagtcttcattgtagcacccatcagattgtgctagattttcgacaaactcccatcatctgctacatcgttgttcaggaagtttcatttgaggcattgccgagtagcatcctaatctttggtaaagttccttggtaaagcttctctgtagagtttgctcaataatgaagatttcttaaaaccgtgatgggggctctaagtggtgtagcttttaaacctctcccaagcttcgtagaaagtttcataattttttctgcgtgaagcctgagatctcgttcctcattctagttgtgcgagcattagagaagaacttgacaagaaaagctttcttacaatcatcccatgagttgatggagtcaggggaagagtcttttcccagtggtgtgccttgtctcccaaagagaagggaaatagtctaagcttaaacctatcttcacggacaccattgatcttaataaggctacatagcctatcaaagctatcaagatggtccaggggaaccatgaaatttgtttccttggatcatggagatgagagaccactcttgatttcaaagttgttgttctgaactggtggtggcactatcccttgtctttagtgatgattccttggggcatcaccagcaccaaggtttcttggttgatcaactatacgtgggtcttgaacctcaagtcctctgtcctgttgaccctaatctaatccatcctcaagaaccttaatcactactcaagcaacataactaagaacataaacccagaaattactgaaattatatcaaaatgtagatctaaacaagataaacaactttgctcaaagaactaaatgcaaaaaaaaaaaaaattaagagtaatctatacatttgatcgaggaagaagatgctaaattagtagcaaagcatcttccagcaaaaagaaaagacaaaaaacgtgacgtttatcaggaaccgcgaccacactacgatccaaaagaggtcaaacgaggaacgatctttgtcgcaatggattctaaataccaatctccccaaccatcgatgtcgatcgacattgctacacggttaaggtggctaattcgtttctccaagtatttcaaatcaaatactaattatttcgacttctctagcttaataactctaggaacaacattatctaagtctgggggagccaaagggtaaccatatcttttcttttcttaagtcagtcgtgtcgtttttagatttatgttttttattgagtgaaattttgtttgtctccaattttgatctttctctcgagtttattgcctggttgattaactgttacagatttgattcgatctgactaatggaaaatcctgagggcaaaccaataaattagaggacatccattattccaacatataatccataaagagagctaatctcactgcttttcctttttcctcgtcaaaaatgttagtgttcatagaacttgactccttgttcatatatgataatgagactgatatacctagattttcactgcttttagctatgatttaggtatagttttaagagtcattttgttatttgtagagtcttttctactatttttcaggtctttacatgtttgggatgcatttggagattatggagcattctggagcaaaacagacaacttaagctgcggcagcaattcggagacggaaattgacgtaggtgtcgatcgacacaacccctggtgtcgagtgacaccaatacctgacgacaattcaattgcgtaacttattgatgttttgaagatttccaaattcggcccagaactttcccttatttccaaagaaggcccagatgtttttaggacttatatattgatttctctggtcattggttagacctaattcttattatctcttttaaacttgggagcaaaaccctgtggagactccctttagagaagattcttctaaactcctttctcttcttaatttcatcattgatttcttattcaatcatgttttgttcttctatgatcatgcttgagtagtcctcttgttgagtttagggattctcattatggatttggatgaattagtagatcgaaaccctattagcataatatatttagaattcttcatcttagattgttcttaatgctagttttagagtaactaaatagaacttgattttaggataatagatatgcccaccataggtatctattactggaactatcttagatgagcctagtatttagatgcgtgctagcgtccattacttgggtgaacttatcaaacctgattataatgattgcttagttctagggatttacaagagagttgggatcaatactattaagcatagtgaatttcgcggaacaccaccggttactttatattagtgatttgtgttctagaatgattcgataaaaatcttaatttactgctagatctactattctgatatttcctgagaatttccctaagcctgacatcttaatcatctgaatctacaaccaattttaattgctttcttgtcttttacttttataatattttctgtttagctttattcaaaactgttaatctattgtgtgatccgagaattttgtggaattc

SEQ ID NO: 1343 - DNA, 110800 bp, Arabidopsis thaliana
gaattctctgtattaaagaaagataggttttcaaaccaaaaatcttattgacaaacaagtttattgtttatacaaggaacaaacctggctcgatcatcttcaagcaactctttaaatgccttgaactcttcttcatccaactgggggagaggtgtgtaagcaggttacttggttctgctcttaaacagagcactaatcatgggatctacgctatactccgctgtgtcgaggaagcgagagcacctaggaacacgcttatccggaagcggctgacggatattggtcctctcttgaacaaaataagcaggtgatgatgcaacaatcgaggataaattgcggtatttaacctcatcaaaggcaaaatccttgtgcgtgtcgggaataacatgtcataataatagtattccaaaccgaaaacaggttactcaatgaatatataagaatataggaattggatgaggaacattccggtcttcataattctaaacctgagctattggtgttactagtgaacaaggagtcagcgtaggcgaaccagcaattatttcttcctcaaacaatttttcttgagtctctataacagtggggttgggaatgtttggaatacgagaggtagtctcctttgtatggattatttgtgtttttaaaaccagtgtaagagcttcagaaatgtatgattgattaggacatcaaagaactggatacaacgaatattgtcaaagtattacctaagcaaatatatcatcctcaacggcttcgctctctggatcttttgcattggcggttggaataggagaggaagaaatctctgtagtaattttctatattgtccaacaaacacataagatgaacagcaatgggaaattaatacaacaagacataagagggtcgtcaatactttttaagtaatacctctaaaatactctttgcagacccataaagatcccacacaccatcagaggcttctaaattcacattttgtccaccatctctacgaatgtggtcgtcatcttcatctggccaagagagatctccgttcactgcttctgactggtatagtgtgtattccactgataactgtaaaattcataaaacaaaattactaggtaaactatgcatcaaatgaatgtatccatcactctaaaacttaactataccagtatatataaacagtatttaatgttacttacattagcagcgttttcaacgtcaataacatcttactcccggagaaagatggtgcgaccaagatcaactgcaggcctttggataaaatttctgaaatatgtaggctctttaatcctactacaaagagcatgaacggagttgaggacttggagttgaagtgcaagacgaaacccgtattagcaactgcttcttttttagatagctggctcttgagttctgcaataggatatgtttccccagcggaagggccaaacctttccattgttgattcaaaagctactctcccccatgggtagctcataaagaattccaaatcatgaagcatctcgacaaatgggccacttacccgatgttgttttgtgttgctgcaaacaacaatcccatcaatcaagactattaatgcgagactcagcatcttccatgtcgagaatcactttcgagactcagcattaacatctccccttagcatgtcaataacatccatgactgtcattacacacttctccccaaatagacgattccaaacagacagatatgcaggatcttggtgatcttccttctcaaaattccttggaaacttatcacaattcaggccagttgtgatttggaattcccggagagagaagcggagtggaaaccctcaatatacaatccacaattcatgcttccgttgtgtcaaaaattgtgtagcaagcatcgcgtgaatcaactttgcagaatgagaacaccttgcaacaggcagttcaaacaattttttgaactaggaactaagcagcacatcccaagtcttgaagccctccaatagttccaccagcgtgccaagatattccggcttcgagtatatgttgaggcgagctttatctagaaatctatcgggttcgaggattcatcgaccaggagttataatcgtcgacggggtccgagaattcgtcgaccagtgcgaggattggtcgaggattcgtcgactaggtgttggaatcatcgaccggtacggagaactcgttgaccaggatggcggaatcctcaaccaggacgagagatggtcgaggaaaatctatcgtgttcgaggattcatcgaccaggggttgaaatcgtcaaccagatccgagaattcgtcgatcaaaacgaggagtagttgaggattcgtcgaccaggtgttggaatcgtcgaccggtaccgagaattcgtcgatcaggacggcggaatcctcgaccagtgcgaggaatggtcgaggaaaatctatcggggttgaggagtcatcgaccaggagttgaaattgtcgaccgggtctgagaattcgtcgaccaggacaaggagtggtcgaggattcgtcgaccaggtgttggaatcgttgttcggtaccgagaattcttcgaccagaacggcggaatcctcgaccagtacgaggaatggtcgaggagaatctatcgggttcgaggattcatcgaccaggaattgaaatcgtcgaccgggtccgagaattcgacgaccaggacaaggagtggtcgaggattcatcgactatgtgttggaatcgtcgaccggtactgagaattcgtcaaccaggacggcggaatcctcgactaggacgaagaatggtcgaagtaaatctatcgtgttcgaggattcatcgactaggggttgaaatcatcgcccagggatgcagaatcctcgactgggtccaaaattcgtcgaccaggacggccggatgtctgacaaaaaaaaaagttatcgaataactttcgaaaatcatcggatgtgattcaatgttttgtgatcgaaacttttaaaacacatcgataaagagtttaggatgtccagtttgcatcaaatttgcccacggagccccagctagaccatgaaaatccgatgttgtatcaagtcaaatgacctagctagaggtgtcggaaaattacgtaaatttaccagaacataggattcactatccttatgaagcatgccaaaaacaattttcaaattccaagtatttttaattttttggcaccggtgtcacctcagaaatttcaatgtttgttggtgccaagtcggaaaaaggatataaagctatatagggggtgggtgttgagggagtctgggcagtccatgggaacccccttactcggttcggacttgggtagcgatcgagggatactatcggataccgacacgaggaatgaccgaccaaccgtccgaccaaccgaccgtccgactgactgtccgaccgactatcgacttttccgacaatcggcttttttgccttttttgagttttacagcagttttcagacaaaaattgatgaatcgtcgaggagaatgggcttgcctagcgtgggctaccattaattcttcgaggcgttaaggtggcggtggtataaaagtgtcggagttttttctgcaattctcagacaaaaattgttgagtggtcgagaagaatgggcatgtcatgtgtcggctgacatggattcttcgaggcctagggttggcggtatataacttttgcgcatgatattaccgagatgtccccacgggcatcgtttcacctcgtcgccgaagagaatgggcgtgtcatgcatgagctgacatggattctcctaggccgtttgggtggcggtataatcatcttgcgcacgaaataccgagatgtccccatgggcatcgattccattcgcctaggttgaatgggcgtgctttgttggaaagcatggatccgcctaggctgtcacggttgtgggcgaggtgtgagtatcgcccatgggcaataattttgagtagcacttcataatactcggactggagcgattggaatcttcgattaaggtgctttcttcttcgtcatttctctgagatttcggacccaagagagaaaaaaactgtaaaacagttgtctgagggaagagaaatatgaagcgtcaacagggaaacctcgatttcggtttcagtggcattaatcgtaaatatgtgtgcttcagagtggcaaaatgggtctcacaaaaaaatatacagtaacgacctgtagtacaaacaagatattaaatagtaactgtactaattttctaattattttccagaaacgtattagttctcaaacaaactctataattaactgaagtatttttcttccaacaaaaaaaagttagatattaaacgacaaaataaaaaataaatgatgtattttttgggtttttcccctttatcaaagaacccatttattcacccccttttgatgaccaattagaatttgacatgtcatctgattaagaaaattaaaataattaataatatcaatataaaataattaaattaaatcattaaaaactcattcttttgtaaatccaaactaatagataatctcgtttgattacaaaatctaaaccctaattctcatttgtaaacccaaaccgccatttaaactcatttaaccgtaaaaaactaaaccctaatcgtactttctaaacccaaaccgacatttaaactcgtttaattgtaaaatctaaatccgtttctaaacccaaactaatatttaacctcgtttaatcataaaatctaaagcaaaatcgtactttctaaagccaaactaatatttaatttcgtttaattgtaaaatttaaaatctgtttataaagccaaaccgatatttaaccttgtttaattataataattaaatcagaccttttctaataaatccaaaccgataagtaatttcgttttagtggtaaattagattttataattaatttttttattattattattaggtgtcagattctaattggctaaaataaaaggggtgaatgaatgggttcaccccttagggggtgaacccaagtatttttctttatcaaataagtcggaggtctaaaatcaaaataaaagaatgatttgaaaaataaaataaacaagctaagagtacaaaaaataattttagaaccgaacttatagtcttacctcaaaaatccattgttgttggtataaggttaaactgcaaaaaagcaggaaatcaaattacagattttggcagaaacatatggcatttcgattttagcggagaatgcgggtttacgattttagctaaaaacaaggttttgcgattttagcggaatttagttttaatgtatttaatcgtttactcttttattttagcgattaatgtaacattcaccccgccttataggccaagacggcatgttattcatctgatattgccaaaacattttctttaaacttcacacaagaacaaaatattgcacataactcttcacgcttactaacctgaggaaaatgggaaaaatggggtgagtaaagaatacattcatatgacaacacactttttaaacatagaacactttttaaagctatacaaccatcatcactttttattcaactccgccttataggccaagacggcatgttattcaactctgcccactgaaacatagaatactttttaaagctatacaaccatcatcataacatataaacttagacacaagcaaacaaccgaacatgctttaacttctaacaattcattcataacaaccatcttatctataataatataaacatacacatcgttaggtctagtcatccttgtgatgactagaaccgtatgagtggaggctggccctcgtggctcagacactcccatttcgggctcatcaaccgttcttgaccagttgataacccgtcagtctatcactctccatattactagggagaccacagcccatagcttgattctcccaatcattcatacaaacatacataatcatcatagttacatacttatacttaaccttcccatacataatatttcatagttaaacattatcaccatacatatcaatcaataatcatcaaatcatatcatcacataatcttatcctatgcaataagatctagcctacatatcatgagttaggaagcataacaaaagaaaatgataccatgcttcgcaaataccaccctcaccttagtctagtcaaatatgacaacacacttctccttctttcacatttagacaaacttattatctcaattgcgaccacatgctcttaagctctatcttgaatctccttcgaccaggacctcaatacatgagttatgaaagctcctgcaaagcttcagctccaaccgagctcgtttgcgccatcaaacaataaaactcgttacgatttattctatataaatctgcctcggaaatatgcgcataagtcaaagactaaccgttagaaacgtaatcccactgtttattatgtagccagtattatcatgaataactccacaaagtttcatcccgatcagacttcacatgaatctctcccgtgtttctgaagatactgcattagacctgatttctaggtttctacaacttgagatgtttctgtgcagaactttcaaggtcaattccggatagatattagatccgattgacaaggtgtcagctactctgagttccttgaagcgagatatttccatagaggtcttgatattgaactaattctttctggttcatcggaaaaatgcatcacaaaaccagtagccacgtagtgttctgcatttatacttcggcacagattttgacagcttttccagttacttgtccagaaagaaatactcataacttcttgaatataaccccgattaaaagttcgtattgctatggattcttgggaacgtaatctttccatcgatgcttttttctgatctgaatctctctggtgtgttgggaattctccctacaagacgccctcctgaaactgttttgcctccttcctcttgacttctatttttgctttgatcgggtccgatcttcttctgtcaccacttctccttactatcacaaccaattctcccttttctaatgatctacccttggtggtgatggtgatcgatttacctcagtgacgtctcctccatctcctctttcatcttctccgttgcaaccaattctcttctcatccttatcttctctttggagtcatatcatgtcatctttgttagatcaagttccatttcaccatttgtggttcagatctctctctcacatctctccacgtatgatttatcaacatgacgaaaacaaaacggttgctcacgatctcttccttctttttatgaacgaatataacttctcaagtctcaatgattaaagtgttggtgtgctcataggtttaggtttcacattttccgttgacggcttccatgaagagggtgatacaaacaccaatatatatgtacacttacaaaacccttgttgttaggcatcaaaaagagattgggttattcatgggctatatcataatgtcaaaaataaattgacccaaatatgtgggagtggggtgttacagaagtgagaattcattttgatctctagaggaagctttgttctccacagattacttggcgtagcaggtcaacatatttttattgatattaggcaatgcagaaactaaatgtgtgggtttggatacaacaagttaaaaattttaatgagaagatcaacatattcagtttgcttttatcatatccaatgaccatcgttttcttattattatttaatggagatgccacggaaacactctcagccatgggtaccttactctacaacttggaaggtgtacgacacagactaacccttctgctttcgtctacatccaagatcaagactcggttaggaggcaggggtatccatgagttagtagggacacataaagggtcagactttgtgaggtaaatgaagagatcgctcatgtcttgagtgtaaacagcatttgcttcttcgtctagcttgaacaccattaaagcttttgttttcaatttcccaatacccttgatgatctttctagaggattttttataccacttaaccaagaacatttcagtggtggttcttaaccaagtgttcgctcctgcagctcgcgttcggtcttagtcagtttggaaatgttttggtaccgcagcctctgaaacttgggatttggtttagcattgtggagatcccatgatccaatgaggtggcctccggatccaggtatgcgaaacatgccattcttggaaaacagaaccgaaaaagagaagaagcaggggtttttaattttgatattggtccacttggagtggccttcatcgggtctgcaaagctgagttgaggtaccaagaacttgatagccacaacacagtcgtcttcctcgggagaagatgaggacatggccacgttggtgagaatttgggtttgagaatgaggcagctttacaagtggaggcagcggaatgtgtttcggttcagatgtcaaccctaccaagtttggagacgcaaaacttgatgagaaagccaaacttttttagtgaattagcacagaaaccgaagaaaccgggttggggcggattagggttttgggaaattactttattggatagaggtttagtaaacccgtgggtatcggatcggtccggggattacccgttacccaaacaaggtacccaaaaatccaaatataaatttaatccaaaaatattaattatatttaatcttaatataatctatttatctaagattataattataaatctaaatatgtcaattaattttagacctaaatatccaaaacaactaatctatttagaaatgatttgttatgtttgttaaattttagtaaaatatattcaaatataactaaattttattgctttttttaaggtttttttatttgggtacccgctatcaacatacaacatacccgtttcctttttttgggtatttttagggcctgaagtttttacccaaaccgacccgaacccggttagatttgacccggaccaaaaccgaatatttaaaattatcctattggatagtaaattttacctattaaacccgaacccgaatgggttctacctgaacccgaatgggttacccatatgttgagccctatgtgtatgtatatattggagcaaatacatcaatttttttttgtatactttttatgaacgttcacacgttataattagtcgtattagttattattctttattttctgttgtatataacggataaagttgtatatatacaatctcaaacaaatatcttattgcatcatttcaagtatattataattttatgaagaagtattgaaataacatgtctaacataatcataaaatttaaaattcattatatatacaagaaacgatttgtataaaactaacagtttcgactcttttccgattatactctctgatccaatcatattttttttttgatgaagtgagggagagtgtctcccgttttattaaaaaaaaataacaattacactacaacatgtcgtgagcttgcagcgccactagtatcagcagccgagatcgaacatacgcaatccggcaaaaaatcaaaataatgaaaacctacggaaagagaaaacgcatagttcgccaaaccgtcggcaagacgattcgcctccctatacacatgaacaatgcggacaatctagtccttcgaaatgaagccatagcacaagcgtactaggaatgacaatgggtgagactcactaacccctgtccgtaaaaacccgacaacaatctcctagtcaacctccaaaaccactctcgaagccttcttcttccatgccaaatacagcccataatacactccccaaagttccgcaagaggagcagaacgtatccccaaattcacggcgaacccgccacaccaagtacctgcgtgatcccggattacccccctgctgccgctaaccccggatttcctttcgacgcgccatccgtattcaacttcagccactccttccccggtggtatcaacgaaatgagcctctcaatccgagctccaagttgtttctgccctctccaaatgtgatgcgcctcaaaaacctcccgcgatgagttcttaacaaaccgcactctatctctacatctcccattattaccaaacacattcccacatctccactttcaaccccaccaagcagctacagaaaacattgtcgaccatgggcacccaccagctaccccactgtctcctaagtttccatagagccactccaacagagattgtaagaagaacataccttgctttcttggaggaaccagacgagtccagattcccaccattgcggggcagtcccttagaatatgcagaatggtctcatccccacccttacacacttgacaaactcttgtatcactgagatgtcttcgctgcctttcaacatttgtcatgactacctggtttgcgactaaccagagaaagattcgcactctttctgttgttaccactcgccaaatccggccaaacaaactgctcacatcttgctgttgtgacgtatcccgtgtcagacaagagtatgcagacttcaccgtgaaattaccatccgcattatctcgccacgagagccgatccttagcccctgttactgtatcaattactactgcagagagcatgagccgtatgttctccgggagaaacacactcaagcccgcagcatcccagcctctcccattcctccagaaagcccttgcattagcattaatcagctcatctgggacatcaatcagaactgactctagcagaggggtattattcaaccacttatcagtccaaaagtgaattgttctcccatctccaataacccagcctaactccacgagcaccacttctctcagtcccaaactgatacttctccaagtagcagaccagttactcttagccaccgtccaagctttatcatgtgggtcaccaactttgtacttacttctaaaaactcgagcccaaagacttgtcttatcatgaagtagttgccaaccaaccttagcgtgtagagccttattcatctccttcacagctttaatacccagaccaccctcttccttaggcttacacactttctcccatgatagtaaatgttgttttcgcttcttagaggtactcccccaaataaaatcccgtgaagctttgtctaacttcgtcagaatagaagcaggcagcgcaattgtactcatagagtgaaccgatatcgatgcaagaactgacttcgttaaagtaaccctcccagccatactcaagaaccttcctttccaaccggatagacgggaagagatcttttccaaaacatcaccaaaggtatccttattaatccgcttttgaaggataggcataccaagatatttccccagctcccgtgtagactggataccactctccgtgcttatctgtcttatgagatctcgatgaacattctcagagaaaaaaatcttggacttctctaaactcaccttttgccctgaagccacacaaaacctttcaagcaccctcctgattatccttgtttgagcaaccgaagcttccgcaaagaggattaaatcatccgcaaaacagatgtgtgacaattttggtcccccacgcgaaaggcttataggtttccacttcttctcagccacagcaaactctatcagatggcagagacgttccatacacattacaaacaaatatggtaaaagaggatcaccttgacggagccctctcaaaggtgtaaagggttgtgttctttccccattccaaagaacattcattgatggacacgacaagcattgcattatccatttgatccactgttctggtagtctcgctgccttcaacgtatcttctagaaagtcccaccggattctatcataagctttttccaaatccagcttcaataacatccagcctactttgcctttctttcttcgcatcgaatgaacagcctcctgaacaacaacgatattatctgtgcttagacgacctggtataaagctagcttgggctggaccaatcaacattggcatcactcgctttaatctcatcaccatagcctttgttatagttttaaacagcacattgcataggcttatgggcctgaactgagtaatcttctcaggtttttccacttttgctatcaagaccaagagtgcatcattcatctcacgcggcagttgtcctgtctcaaaaaacttcagtacacagctcacaactgagggtcccacaatgtcccaacaatgctgatagaaaactgtttgaaaaccatcgggtcccggagctttatatttccccatacttctcactgaatcttcaacttctttggcagagaattgcttgtccaagttccccagctcctcgcgagtcagccttgaaaaaccctcactaggcagtttctcaacaaccaaatcaatatcatccatagagtacaatcgtctgtaataacttactgccaagttttctagctcctgagaatcttgaatccatctaccatcatcatctggcagagcttctatcctgtttcgacgacgccggataattgttgaggtatggaaatacgtagtatttctatctcctaatgcaatccatttctctcgggacttttggaaccaaagcacttcctcctgctctagcaccaactcaaaatccttcagaagaaaggcttcatctcgagcatagcgtcagtttgtgagatttccaacgagtcctgaacctctttgatttcttttgctaatgagtctttccgtttctgcacatctccaaagacctcattattccacttcttcaatttcacccgcaacgccttcagtgcttcaggggtcgttaagtccttctgccaagaagttgtcagcatctccttaaagctatcgtgagataaccaagctgcctcaaaacgaaatggccttctacttggattacctctcatctccggactcagttgtacatatactggggcatgatctaaggtctgaggagaagaaaggcagatgtgaaacacttgcttcctgccatctcaaccttgtgtgagcactgcaaagaaccctatccaaccgcttagcaatataagtttgcgccactctgcccctccgccacctgaatttgttgccattgaaccccatatctatcaacgccatctcatttatccagtttccgaactccaatgaatccgcaaaccaatcatatttaatctcaattatagaaaaccttaacaaactgcataaatcaaaatatttcaaaagatttcgaaaatattaaatcatttttcagattcaaatattttacgggtgaaacatatttttacacaaaataaacataaactaaaataaataaaaacattaattacatactttttttgttgtatacaaacaaatattaaatctcaataattttacataataatttattttaatggttttattccgcacataatgcgagttattatctgattggtgtttaatttctcattagatagttttggcgtttttgggttatgattaggattgtgtcatggcctatatataatagaagagatctttatgctaatgataacccaacttttgcaaaattaacattgtttaaattttttgtttgaggaaatattactttataatttgttatcttcccttttcctggaagtatttagctctgctaggtcatacaacgtgacttctacggaaaaagaaaactctgattcatggaggaagaaggcactctaatacaaggagatggctcctacggcctttacatcagagaacaatcaacatctagcatcccactagttctggtgactgaaaatcaaaataagtctttttataaacttgcaatggaagcaggagttcctgaaatcagcatacatatgcctgcaatttgccgtatctgtttcgatgaggatgtcaaagctgagcagatgtattctgttgctttatgtggtcaccaattctgtgtggattgcgttaaacaacatatagaatcgaggctactcgagggatgtgtaccgagatgtcctcatgatcaatgcgagtataagctaacatttagaagctgtgctaatcttttgacacctaaaactaaaagcgatgtgggaacaaaggattgcagaggaatttatttttgtgtcagacagagtttattgccctaacccgaggtgctcggctttaatgtcggtaacagagctctatatatcttctactcaagacactcaagttaggagatgttgtgtcaaatgcggtgaacccttttgcatcaactgcaaagttccatggcatagtgacttgtcatgcggtgattacaagaggttgggttcaaatcctagtgcaaatgatatgaagctaaaatttttagcaaatcagaaattgtggcgtcaatgtggaaattgcaaacacatgatcgaacgttcggaaggatgcatcaaattaacttgcagattttcattacattctctagctctttaaaacaaatttgattatgtttctctcgcaattaataacattgttataatgtttatgcatggttgatgaataggtgtggctattcgttttgctacacatgtggtgccgaatggaagcaaggaggttgcactcaccgcttagcagcacgccgagcagcaatcggtacttttatcttagttgttattgccgttttaataattgatctatgttttatggttaacgctagacttaaagtagtttagtaatcagttttttttacattgttcatgttgaatactaataattaaacattatcaatagtttaaaaaacaatggtgaagcatatcataaaaaagaaagaaaaatatgacgagtgaaataacaaagagagatctttattgttgtagaatgtagaaaatcttcttctttcactcttcatgagcaagaggaacagcttgagcctacaagagaaataagagactttgagatattactgcaccagagacaacaacactaagaagggtctaataaagtgtggtaagaagagagagtgtataccagtgggcggtacttcagtgcgtagaacatctcaaggtatcgacgactctcaagacggtcaaggttcgagacatgtttccaaaagccgtagacaccagtcaatgtcaagagcctctgtgagtatatttgccaagtatatctacaaaaccccacgacaagattgttaaaaacattcaaactataaaaaagaagaacacacttatagttttatacttacttctcctggatcctctcaagtcctcccaatgagatctgatcccagtgagatgggtcatgcttacacttggtgaagaaatcagcaagactctcagctgccttgtcaccatgatatggatcaatgtggaaaccagattttccatgcacaatgatctcagcaggaccgccattacaagtagcgaaagtcggtaacccacaggtcatagcctcaacaacagtcaacccaaaggcttcataaagagcaggctgcacaaatgcacctttagtgtcacatatgtaacggtaaagctcaccgtttctcactctgttcatctgtgaagagatccatcggaattgcccgttgagtttgtattcctctatcagttcatacattttcttcatctcggccttctcttcgttgtcctgtgactctttcctcctgtctccacccacaaccaccaagttcaccagttcgcgcaagcgagtgttcttaccgtaccactcaacaagacctgataagttctttacacggtcaagcctagccatggtgaaaattattggcttcttcttgtccttaagcacacatctgttttcaagtataagcataaataatgttaggttttttttcgtgacatatttaaagatcaagattagtcatataaaaggcttacaagtgctcttcgttttcaacatcactatagaggagctcctcgatctctagatggaatgcagttaatctacgcttctcctcggtgtaagcgaagtagatgctcatatctgctccaggagagacaatgttgaactttggatcaaacacatcaataccgtgaactacacggtacaacccgggaagtgtgaaagatctgtggctctcatattgaccaacagtgtccttgctataaaagaaaagaggttgcttttaactcaaacgttaaaccaatggaaattgtagaaaattcttgttttcttgagactcaagtcttctctctttaccttccagcaatttcttggaaagtacttgtgatgatgaaatctgtgtggttcatggcgataagatcagccgtgaactggcaagaaaagtgatacttctcgtcgagcttcttccagtagatatcagaatccgggtacttagtcttctccaaagcatgagcgatggtgcactgtgtaataataaatcaaaagattcttagctttagagcaagacaacatatttctcaatggctatggatagaaacaagagacaaacctgagtgacaccaagtttgtgtgctaacaaggatgcaacaagattaccatcactgtagtttccaatgatcaagtcaggcttcccctgcaactctttcgagatttcagcggcaacatcctgtgaaaaaacaaggcacattattcatatatttgagtcaaataagggtgaacaagatccatgtttttgcatgaagaaaatggatttatacctcggtaaaagtctctagatacggccagacctcaaaccttgatatccatttgcgaacgattcctttctctgttctaaaaggcacacggaggatatcacaatactgagatccgtacactttctctagacgttgaccacaagtggttcctgctgcgtcaggaagcagccgagtgatctgtgaaaacataagagaacagttttagacatctttgcatacacacacaagaagaatcactataagcttacgattaggattctcggagtgatgttgagtccttgttgtttgatgcgttggagcatctctgtttcgagagcacgaacttgatcaagaatgtaaacaaccttcaagaatatatatacgagattaaagatcgatcaaggaatgaagaaagaagaagaaatcttcaaaatgtttcattactgacctgaccacctgtgtcagggtaaccaagaacattgtcctgagcaaagtatccatgaggagagaggatcacaacgttgaaaaccattgggattcttccaaggaaattctcaagagtacaagggtcaggtgcctcgagaaggtcaagaagaagacggatcatgttaagaacacgctccgcggtgtctccccagcctctctcaagaccaatctcctggaacttgtgctcaaactctgagtagagtgtctcaggcttcagctccattagatattcctctgcttttctcagattgtgttgtagggtgtttaggttctggatcctattgttaagcatcagagtctacacagatgcaaagacaaagcgatgttagacttttgttattgagacaacaaatggagaggagagtggcttgtgatcaaacctttccctcgtgggaatggaggcggaggaacttgagcagcggatgcaagctctccttgtcatggaagagcttagccgagagatggcggttgaggaactcaacgccatctccaatgtacttgttgagcgtaggacgagggaatgccgcgttgaatggttcaaagtcaagttcaagagtgaagtttccattcttactgcgatatagtcatgacattagttgagtaaaagggcaacaagagagagagagacaagatataaagaggtgaaaaacgtacattccatcgacgagctcttccttgaattgaagatattcagaagcttgaagctcctcaacgacaagatcatggaggttaactcttacgtattcccaaactccaggtcttggtctcacagctaaagcaacaaatggtggtaacacaattgcctcttgagctgatcggagaaattcgaagaaagctccacctttaagcttcttctgtgtctctaaaggcattgcctcaaattcagcaatgatctggtggtgttgtagaatgcctttgcctttggcttcaaccctaaaaaaggagaaagaaacagagtatttaggttttttttgtaggtaatcttacaagacaagttagttagtttaaagtgttgttgtgttgtaataccttgagagcaaagcaaatacttcatttttctgagcaacaagagttgcatccaaacgctctcgctggctgtggactcgcgttattacacgttctgcgtttgccatttcaaacacaatcacaaagcttttgaaactgcagagaataagaagatgaagaaatgtagtaagataatggagagaggttaattcaaaatgcttgcctatataaggaaaaattgattatgacttatgaaaaaagttagttaaattccatcatacaaaaattatcttaactttttaaagttagatgattaattgattatatatattttccaacataaaatattgaaagaatcatctttattctgtccaatttaagtttctttaaacattttgcatccagtatccatttcaaagcagcggtgtttatggcttctcaaataagtaatggaggaaaagataaatcaaaccatgaattaaagtaattcaacgaattttcttttatagcaaaaaaaaatacaaaagatttcgacatatagctggaaaattctctgtgaaaatattattttcaaaattagaagacgagtagaacagaatatacgctattggttttattttctgaatcattctaaaatatctaaaataaaaaagatcttttttattttatcacatagatcaagaaaaattaatattaattaataaatataaataaatcattaatttgtcttgatgaacaagaaattttttggtatcaaatcttacatctattgttgattaaaagaaatattttatattttgtggaacgtaaagtagctaaagtaaatatattgaaagattatcatatttaacaaaaacaaaaaaatgaaaacatgatttgttagctgaaaattttgtaaaatatatatatatatatattagcgaataacttaaattgttaaattgaattattttcttagaagaagaaaagtttataatgtgtttgttgcatgctttttacgacaatgctaattttattcttatcctaaagtaaatgacactattaaagaatctttcaaagcatattccctctaaaaagcttttaatttcctcttaccaccaatcaacaaaaagttaaatagtttagtttaggctaagcgatgttacatgtgtcggaaaaatgtccgagtatataattctatttttagtgttgctagataaaaaaaaatgaaatcaaaaatccattgatttacttttccaaaaaaaaatcaattaattagcagtgaaaccttttttaaccatactcaactaaaaatatttgaaggttctaatgtttagcatgtcataaacattcagagcattaaaaattttcataaactaaactaatcattgaaaccttataacctctcattataatacattacaagaatagattaccttaaattgctacggaaagtcactggcgaaggaggtcactagaaatatgtagtgaatgaagcgaaagatggagggagctattgcaaattttgagaaaagtatgaagaagagaaatgataagtagtgaagtgtgaagaatttgaatagctttgttggatcattttatactagtctctcttctcttcgacaacttggttttctttaatactaattatgctttgtttagagagatacaattttgttttaagttataataattgtaagtagttggtcaatacccacgggtcaatactcaatactgatccacagaaaaagaattctattggttatcgagtactgcgtgtaaaacatacaatttcttcattattttatatataataattatgtcaataaagtaatttaattaaccaagcttcactattgtaatcataatgtcaaatttgtcaataaactaataagtaaagtaaccaaagaaaataacatcagtaaactatgggcatacaaaacaacggtttcaagactaccacgagcaagctagtttttgttttctttgttattttaatttgcttaagatattaaatttaatcaaatggattcaaaattgcttgtcacttgtttgtgtgtatgggcagtggggccgtgaagggctttgttgaagaaacatagtggtaggtttaaaatgtttaatatatacacaattgttggatacacttgaaattttaaattcctggacttacatagttttagttaccacgtatatttgtccaaaaaaaaaaaaaaaagttaccacgtatacttgtcactcctgtgtgtgacgtctcaagagacttttgttgaagaacttgaaatggtaatcagtagaaaaacaagaaaaaaaatctatattgtgatatttctgtgttggcttcaaggtatatatttataaaattcgtcctatatcacaaagatcagaagagcgtgttacttgttttgatatttctcaaagagatctaaactgacgaagatgtcagtattatactcggatataagtaatccgggcaagaattcgctcagaccatttcacctaataccgaactaataggaggagatttatctaaatcagctctgacttaaatatcggagagatacagtgtcatacacgacccaaatcaggtctttggacaaaagaaaaaaaattggcctattattattatttttaattttgttgtggtttctaattatagaaatgttattagatgaatacttgcatgcaacgagttttcggctcatacgtcaactatttaaaatgcgaaatcgcacccatctttaggtgtttatgaaatttagaaatcagaccagattcctaagtattcaacaaattgctctaggtatttagatatttatgaaattgtcccaagtgtctttggtatttatacatttaccctaaatcctatgacatttacaaatttttccagttcttttgatatttatgtacttgcctatgcttttgaaatttaagaaaatgcaactgatcttttggaaattaccaaagtatatctttacaacagttgcagctaagaatagtagaacagcaaaattaaaaattcttggattatgcaattgaagctaagtatagtaaaacaatacatgttcagaaatatttgcatttctgttctgctttaagctttaacgacaagacattttatcggacaaaactaaaagctaaaacacacaattcaagattaggagctgaaatgctcaactggtggtacatataacaaatgaatcatcccatgtaaacatgtctttagagatcaacttctgagcttacatatattaaaaagtctccaactgaaacattcttaaacaaactagtagagcatattgttctctatatacttattaagataaaatatatttgcttactccatggatagacgtgggacacaaaagtcaacaagcagcaatgatggcccgaagtccggctgtgtgcctggtcctatgtcctgaggctgagagaagcgtgcaaacctcctggccatagccactttgagaaatacaaacttcttcttgtaccatatcttcactgttccaatggtctttctttgaatcttctcaactttaacaatgatcccatctctaagtccaacatagctggctggctcaccagagggaccattccctactacacacaacacaaatgaacatataaattataactatgtgggttatttttatactgatatattttacctaacagagcgagagcacttacgtggactgaacacatggagttttgctcccacgggttgatgcaccaacaagtcacgtacttcctctatattcttaggctcaatcacttatcctttcatgagaacaagagcaggtttatacgatgatagaggctttgacacagatccaaactgtggccaatcttctgcttttggaatgccgccattgtttaacgcaaaagcaatgtagtttttgacagtgagcttgagcctgtgtgagctagcaacaacatggtccaccaagtattgagccgagtactcagtataggcactatccagcttaagtgcaagccttgtagagcttatcagatcaaccacaacaatagcagcagaagaaactttgtctgaaatggaacagatggatgagcaataccggccctgagaataattgggttagagcaaaataaaaagtggggtcaaaattttttattgccataccatacaaaacaaataatattattctatttgatatgtatatgaaagagacacgtaagagaaatagagagtaaggtaagattcttattatttttctctttttctacatttcacaatgaaacaacgtaaatatatataggagggaaaaacttagggagtaagtgtcttaaagataaggtaacctggtgagcaaaacttataagtataagataaggtgatatgatctaatctaaagatggataatcatccatgttttctaacacttccccttgagtatccatcacttttgaggagttacatattgcctcgataaaaactttagcatggaaaaacctattgggataaaaaccatgacaagggaaaaagagtacagtgacgtaaaattctcctcgaaaagacctcacaagtctcgtagatgacgcattccaatactttgaacatgctttctaaatgtaaaagttggaagcgcctttgtgaatatatctgcttttgagaacgccacgagattgcagttcctccaatggtaaaatcatatccggtttgtgatctagacttatgagggtctgatagatttcatgcatctgcaaaaccaactagaccaaactcggagtttctaagataaaataattctaaatcaatagtacctcgaatataccggaatatgttttttatcccattccaacgtcttcgtgtaggggatgaattgtatcttgcaagcaaattagtagtaaaagcaatatctggtctagtacaatttgcaagatatataaatctaccgatagcactcatataaggtacttcgggaccaagaaattcttgtttatcaactttctctcatctttccgccacattagcaatggagagaatgctacttgtcatatcaacatattacatttattgtttaatttaatttacttaaataatgcattaattcttatttatataaaaatttgacatgttttaacttataattaaatactttcaatttcattagttacaaactatatccaactcatatataaattaacttatttaaatttagttgaataagttgtataaacttatgcataaacataaaatcataaaatcaacaaatttaatttaattactgattctattaaagttcaaaaaatgaataatatgatattagaatttaattgatttttcctcaattagtttttttttgttaaataatgtataatgacacatgtcattttcttatgtgatgatgtgacaatcatatggagaaagttggccaactctcttcatatgaatgacacctcatcacttagcatttgccacatctccacttaataattaatgtaagttaatggtttatggtaatttattatttaattgtatatattataaaattttacataattaattgtatcaataataattttcttttattttgtatgtcttttcttaaattaaattatattggtaaactatttgatgcatataaaagttgatacaattaattaataataacttacccttaaactatttgatgcatataaagctagctatgaggggatggagtctaaaacctactttagctttgaaaatgatagcttacagatagtcaatgctttaaaatgatagagaagaagtttaagggttgatgataatctaaaattgaagaggtaaaattcattgattattggaaagtaaaacttaattttaagtttttagctttaaattttatttggacatgtggcactctcttaggtgttgatgtgtcactcattagaagttgaagagcttacattaattatttaatagacacatggcaaatagctttatatgaaagttggccaactctctccatatggttgccacatcatcactttagcatttgtcatgtgtctattaaataattaatgtaagctcttcaacttctaatttataggttaatgatatatttattatttaatttaatatattattttattttacatatttaatgtattattactaaatttattttaatattacatgatttttcaataaaaccattttagtagtttttcatttttctgtaatccaaactcaaagtatgagtatataataatcgtggattaattaataatttgagtaggttattctcttaaattgatatttatataataaatcaccgaagatgcagaatacgtacggagctccatcatcaaattctaaggtttctagaatcgaacactactctctgttaaattggtttaagatgaacgttgtttatgaattatgtgtatgatgaaatattgagaatgttgttagaaaaaatatattttaatactaaaactaatttcttattgcatgagtgaatgattagataaataaaaattatttaaattaaacaatacaaaaaaaacaaaaaaaactgcggcatagcgcgtgtgatcatctagagtgttagtgaggcattttcggttaatctaaaaacgaaattttggtctaaccaaagtaagcatagggacagtatttaccattcacaactgctcttggaaacctccggtagtagaactaagtcattttcagacaggaccaaaaagaaatagtaactcatatgtagaacttacacttcaacttttattcccatatatatgaaagttggaaaactctctacatataagtgacacatcatcacacaagaaaatgacatgtgtcattctacattaattaaataaaaaaattagtaaaactaattgaggaaaaattaaaagtcttttgttgtgttaaattctctattaatctcactcttaaaattaattttctaaaaacattcaataaataaaaaaatcataataatgtatcaaatactacttttattctattttacttatttttatatttttttatcaatagttattaatccataatggctaaaaatttacgtgtattgtattttagataattgctatctaacctcatattaatttaataattttagttggatattttcttattattacgttatgtgaatatgatttatcatatgaccttctttctgtttatttttgtgcggtctgataacttgataacattgatatacaattttttcacgtaatggtcatccgagacattagacatatccacacaaaaatacgagactctatatggctatatgcaagggaagataattaaagtgttaacttaaattactagcatatcatgataggttggtgtactagatgacgaaagaatatatgaaaaaaagaattgtttgttacaattaagttaaacaaatttcaaaatacattagtaatataactacatattaatatatcatataatgttgttgtatgtgttcatgatagtgaaatacttgaataataggtatataaatattcatattatagtaaaattgttgatctatactatatgatttcacaatgaaacaacgtagatatatatataggaggagaaaacttggggagtaagtgtcttaaagataaagtaacttggtgagtaagacttatatataaggataagataaggtcatatgatctactttaaagatggataatcatccatgttttctaacatgtttcactttattgtgctcaggaccagttatgtacgtgtatgtggatgagtttttgtggctaaatcgaagaaagaatgtgaaagctaaaaggaggattaaaccctaactaaaagctagctaacctcattgttcactaattaatcacactgaaaaaggcaacgcaacaagctaaacaaatcccaacttagaaagaaaaaatacgctaaaaatttaacactaatcacacttacaatataacgagcagaattagtaacaacaaagcaaaggaaggaagctaaaggaaacagaacatttagtatttatacacgagacgtgagagagaatggggtaactcgaaaaaccctagagataggacagatatcatcatcctgtgtcgggctgcaaaaaatcgctaactttctctccgtacaagctttttcatcacctctcgtgcttcctgtgtttgttgtttctagtcgtttgcatatgaccgttgtgcctcagacgacgtcgctttagtattgggcttaatctttagctggcccatgtttctcttttcttcatttgacccaatttatcaacacagtcgttttttgctctctcggattgagaaattctgcttgtaaaccataacgtaccaataaacccgttttggttggcattaacgtacacattgatgcacttttcttagaacgttaagatacgtcgtataggttagtgctgtgttcgatgtagaatcccaatcttacacgtggctcgttaagaacccttgatctttgaccgttcaaagttcaaaaaatttcaggtctgcgcagagaacgggaattgaaaaaaacaaagtaaaaagaagaagaagacgaagaagaagaaagtagcaagaaaatagtttccgttacacattctctgctttcgattttgcctctgcgaaaacaaatccctaatcatctccaccatcttctcatcgatttgattttctccggcgaatcatccgtccgtcgtcgaccaccaccgccgcgttttctttctccgacgtgttccctctgttaagtcccttcttctctgtaagcgatcttttaatttctctcttgtttcctattctggatttgatttcaggtgactattatgttggattctcatgtattggttgttctagtttccatagatggatttctgaacaatctaacagttacgattactgattctcaaagaaaatcttcgattaggtgattagatttagaagaaattgtgtttgatctacagatgtagagtagatttgtagcgtttaggtcttataagtttctaaaattggtttcgattttgtgtgtagaagatgatgggacctccgagaactccgttaagtaagatagataagtccaatccttatactccatgtggttccaaagttacagaggagaagattcttgtcactgttcggatgagaccattaaattggagggaacatgccaaatatgatctcattgcttgggaatgtcccgatgatgagactatcgtctttaagaatccgaatcctgacaaggctccaacaaaatattcatttggtattttttattagaatctagtcgattgcttattttgtcttctcttctttccatttttgttatatagctcatttaagttttttcttctttgtacttatagataaagtttttgagccaacttgtgcaactcaagaggtgtatgaaggtggttctagggacgttgcactatctgcattagcaggaacaaatggtaactacacagaaatctaaaaaatcccattatctaaggatatgttatttgtggatatgtgatttcttgtctctatctattgcagcaactatttttgcttatggtcagactagtagtggcaagacgtttacaatgaggggggttactgaaagtgttgttaaagatatatacgaacatataagaaaagtgagtgatcaaatggatgtgttttggttttggttttgttacgaagtgatatgttctttttctattctcatggatctgttgaaatctatgtagactcaagaaaggagctttgtcttgaaagtatctgctttggagatttataacgagaccgtggttgaccttttaaatcgtgatactgggccccttagactgttagatgatccagaggtaagtaaagggtcggaaacactaagtcaaggctcatgaactatctcggccagtataagaatgctgtgtatattgcagaaaggaaccattgtggaaaatctggtggaggaagtggtagaaagcaggcaacatttacagcatttaattagcatttgtgaaggtaattcttctatcacctgttaagatgctctatatctttttatgcatttgatggtgatagtattctaagtaatgtttagcaaagccttagaaccatgtagatgacatatataaaatatgactaattatttcactaatcactaatgagacatatgatatcatcattttatttcctgttatgtgattttccatttattgttacagatcaaaggcaagtaggtgaaactgctttaaacgacaaaagttcaagatcgcatcagattattcggctggtatgatctatacttatctgatatgctgcatgattgaattaatattctattaaacatggagaagatagttttgcctagttatttgctaccattagacagtaaaagtaaccacttcccataatttctcatgttctctgcttttaatattcagaccatccatagcagtctcagggaaatagcaggctgtgtgcagtctttcatggcaactctggtacgtcatttattatcattgggttgaagcttcacttggtattgacgacattttaattggtgcagaatcttgttgatcttgctggaagcgaacgtgcttttcaaacaaacgcagatggtctaagattgaaggaaggaagccacattaaccgtagtttattgacacttactacagtgatcagaaaactgaggtcagaaagcacactagtttgaacaccatgattgtctttggcatgtctaaattaccttttagattgatgaacattttcacctgtagggcatcttaagaaattagcaaaacattaaagtttttaattatttctgttattttggttgaagttctggaagaaaaagggatcacgtgccgtatagagactcaaagctgacaagaattttgcaaaattcacttggcgggaatgctagaacagcaattatatgtacgattagtccggcactgagtcatgttgaacagacaaaaaagacactttcttttgccatgagtgcgaaggaagtcaccaattgcgctaaagtaaacatggtatgtcacttagttaaatatttgtagaggtctttcgttttgcagaaccaggatgattgtatagagctttgtctttggcttactaaagcttttctttggcctttcattgcaaatgtggttttgtttctgagtagcaatcatcatcctatagtgagcatatcatatgcaattatctgcctgcatgtctattctgctcttgccatgaattaagaatacaaaatgcatcgcgttacctgtaatgatgtagtgagatatattttcaaagccttcttttgtcgctctcccactaacattactccttttgcttcaatcttctttgtgtttgatgaatcacaaaacggttttgcttgttcttgatagaaagtttacccctctgctggtattcaatttagggatgtgaatttagttgattttctgtcgtaggttgtctcagaaaaaaagctgctgaaacatctgcagcaaaaagtagctaaactcgagtcagagttaagaagcccggagcccagttcatccacctgcttaaagtctctgttaattgagaaagagatgaaaatccaacaggtatgacttagactttaagaactagaattcacatcttgaattatctcttctgaatattttaaatgtggagtccacagactaggtaaaccatatgggacgtgaacttaagtttattaacaaaaacaacttgaattttttatcacttgcaattattcattcatgtttaactaatggcagatggaatccgaaatgaaagagctaaagcgtcagagagacattgcacagtctgaacttgatctagaaagaaaagcaaaggagcggaaggtatgtgcgctgctaatatgatataccaaaattttctgggataacttcaaccttatgcagacatgcctatataattggttgcagggatcaagtgagtgtgaacctttttctcaagtggcaaggtgtctctcataccatacaaaggaggaatccattccaagcaaatctgttccgtcaagccgcagaacagctcgtgataggagaaaggataatgtgaggcagtctttaacttcggcggatccaacagcgctagtccaagaaattcgtttgcttgaaaaacatcaaaagaagttgggtgaagaagcaaaccaagcactggatctaattcacaaagaagtgacatcccataaactgggtgatcaacaagctgcagaaaaagttgcgaaaatgctgtcagaaatcagggacatgcagaagagcaaccttttaactgaggaaattgtagttggtgataaagccaacctgaaggaagaaataaatcggttgaattctcaagaaattgcagctttggagaagaagctagagtgtgttcagaacactattgacatgcttgtctcgtcttttcagacagatgaacagactccagatttcaggacccaggtgaaaaagaagagacttcttcccttcggcttaagtaatagtcctaacctacagcatatgatccggggaccatgttcacctctttctgggactgaaaataaggatcctgagagcaatgttgtgtctgctaattcagccccagtgtcttttggagctactccaccaaagagggatgataaccgatgtcgtacacagtcaagggaaggaacgcctgtatcacgacaagcaaattcagtcgatattaagagaatgaatcgaatgtataagaatgctgccgaagagaatatacgtaatatcaaatcttatgttactggattgaaagaacgtgtggcgaagcttcaataccagaagcagctgcttgtttgccaggtcagtttacacttgtgacttatgctcattcatttacaaatttgttcatcagtaatcagtaacttaaaaagcttgtacatgttaggtgttagaactggaggcaaacgagacaggcgctgcttcggagtacgatgcaaccgatgaatctcagatggattggccattgtgttttgaagagcagagaaagcaaatcataatgttatggcatctgtgccacatttcaatcattcacagaacacaattctacatgttattcaaaggagacccagctgatcaaatctacatggaggttgagctccgcaggctgacatggctcgaacagcacttggctgagcttgggaatgcgagtcctgcattgcttggtgatgaaccagcaagctacgtagcatcgaggtagtacaagagctttccttttcttcaattctatgagttaaaaccatttttcactagcatatatatgtctttggtgtgctgcagtataagagctttgaagcaggagagagagtatttggcgaaacgggtaaacacaaagctaggagcagaggaaagagagatgctatacctgaaatgggatgtcccgccggtgggaaaacagaggagacaacagttcatcaacaaactctggacagatcctcacaacatgcaacacgtgagagagagtgcggagatcgtggctaagcttgtcggattctgtgactcgggagagaccataaggaaagaaatgtttgagctcaactttgcatctccttcagataagaagacttggatgatgggttggaacttcatatccaacttgttgcatctctagctgttgtaccctcctataaatcctacacgtctacttttctctgtttgtaaatcgttaacttcaaaactcttttgatgctgaatagagagtgtgattcacacgacctgtgaaaaccctctttttaaaatcctaaccatatgatcatctaatctctgttgattctttaaattggtaaatgtttctatattactcgatataacgggtaggtctgggcgaataaactgaaccgactgtacagaatcgaaaccaaaacaaaaataactaaaccgaatcgtaccgaaagttggaaataaccgaatggatactgaattttataatcgaaagaactgaaaccaaatagatacgtagcgaaatatttcgggtaaacgaaactttccgaaatataaatatatttttaaaatattagttatttctagactaaataattaaaaatatatatataatagtaaaaatactcgaaaataaccgaaatatccaaaaatatccaaaaatgaccgaaaaatatccaaaatgaccgaaaatattcaaaaataaccaaaatatccaaaaatattcaatctaaacaaccgaatggatacaaaattttaaaaccaaaaaaactagaaccgaactaaactttcaaaataaccgaatggatactaagctttagaaccagaaaaactgataaccgaatggaagcgaactgaaaccgaatgtccaggactaataacgggccacgtcacgtcagttatcggtatagcaacacaaaatttgccattcccgtatataaaacgcgccagtaatttggtatcaagtaatagcattttaaaattgtgtatcaagtaagtcactcatgactactacttcagaaaacgcaaacgcaatatataaccgcaggtgtttgtgattcaaacgattacagagagacaaagaaacctacaaataattttaacatgattcttacaagctttatataaacattacactatttacaaaacaaattagggggaaaaataaaggtttcaaacgaatgatgaaattttatgcaacacaaaggtttcagctattcagcaataatgtactactcttttgtaccattccgtgttcctaagattttgggactcagtggcagagagcttcaccgtatgctacccattctttgaagctatctggaaagtcctcccgaatctttgttcccatcggttcctttccctatcgacaaccacaatttctcacattaaagtaaaaaaccaaaacttaatcttccaaaagaataaacaataaaagtgcggattcgttaatactcatcttatagccatttgatttgataattaaaccaacaaaacaaaaaaaggccactgaccttactgctgcttgacccactttcacttatagttggtgccgattgtcctactccgttgacgctattctctgttgaagacgtctccgctgtcaaatttcttgtaagctccgacgacctgccaaaagtaacatggtttatcaaagaagatcgtctttgacagctaagagtaaagttgatctgggtattatatatttggacaaaccacaagtttctatctcatcaccaaattaacaacgagtgtagtactcaaagagcctaatcaatttggtcatgttctttcaatttgggttttaaacagttggtttgcagatagttgactgatcttttcctactggctaacaatttcaagctcctgtctgtgttacaagctttagtatagtatttaacacttctcattatctatgctctttaaagcatgatattattacctgtcaaataaagcattctcgcatgggttttctgatgaaagccactcaatatcaacaaaattggagacactagacatgtcttcctccccgccaaagtaaacttggtcgctaccaaaacgatgaaccttttgcacatctccgaagagctgtttcctgggcattgaaggagtacacctacatacatattatggctggaaaagtcagtttaacatactccgactcactgaataattaagtgcgtgagtcaagacaacaacctaagaccatatgagctacatgctattgacagaaatgatataagcaaatagatcttttcccagtgaaattataatccctacgatatgtacactaaaaaagaaactacggtatgccgatccaaataggttcaactgccaaaactggaacaattcctaacaattgaaataatatataatcttaactccactcagcataagatgtaagagcgatagaaacaaaccttgataatgctacatcattagatactggtatatcagacgatgactctgaaagaatatggctcacatgctgtaatggtgcggagaaacctttttgtggcatgctttcatgattgctactcatggctgacagcggagtgcaactttcatggagaaaatctccatctgataagcaccttttcacaagaaacctgaaagcattatactaagatctaagaatctgacaatacatggtaatcaaggtttctcattttaagagatatcaggaacaagtcataaacaaccaaaaaaaaaaaaaacagattgagctctaaatcatttctatcagcagctaaaatttctagaacaacatacaactcgatgcagtgaccaaaccaatcctctttttctcatgactccactatctcaactaaaaaaacactccattcgtccaaattgtttggtcatcccatgaattagaaaatatcatggtaagactaggtcacaaaagttacttagcatgaaaaatggaagtacattagagaatgacattctaatatcaaaggatgttgatcctatccgtctaaaatctcctgaagtagaaacctcaactaggttataaatagataacatggattcaagtttgcatcgtcagaagttacctttcatctttccctatgttcatctctccatttcgtccattggagagagaatttgatcgtaactcccagattgctggcattccctgttcaggctggaacgtgccaagaaatctgcatacagaaaagctacaaacctgaaaacgtttttaacataaatatatttagaaagagatatgaagcaccttacatattaatggcgtcttgtttatctgcatccatatatgcgttgttataatatcgttgtagagttctcaagaactcctgtgactgagttgctgctctccactggcctcttctctcactgaatacctattgcccaccagatattccccgagtcaacaatatgtatccacataataaggttcaaaatgttcacttaatacctttctttgacacttgacatttgccaactaagaattgcagatgattttaaatgttaaccattgtgtaaagaaaaaacgcaaattacataattaagaaccacatcacaattgtttctagcaggacatttattacaagactctatgaacaagacaaaccatattgatgcttctgtgaactaacattaccttgttgtgggctgcggatccgccatactgatgagctagtgtgtcacccattctctcatacaaccccattaacgaaatagccaagggatcatcaagttctatggcgggaacatctctaatccctaatacatgaagctgctgcccaagagcagcccaaccgtatgcatattgtgctacatttgtacggtcaaggcaatcaatgcaattggtcctaagaacgccactctgaagcctgggtggcttgacatcacattttccataagcaatattcttactcctactagattttttctcaagactatcatggtccccattatcatcatcagaactagtgtgtggagatatatccccagtgtcggcactgcaatttttaaaacattattacatcatctctaccaacctgccgttgatgctatttctcaattaaaataagttttctaaactgatgataatcaatgactataaccgagatagcaccactaacaagaaaatacaatagtttacataaaaaaggttcatctttttgaagaacaggaaattgagcagacgccacagaatataacatggaaaaaaaaaatgatattctagagaagcgaaggaagaattcaagctagaggacttactcagaagaagaagacaagctcatggaatcctcaatcgtcatggctggtgtaacttgatagtaaaataaatcggttagcatcaatgcgcaggtagctactttgcaaaggagtgccaagacattttttgttttgctggaagaaggatagaaaacagaaaactggttttcatctacaaatgtattaaaagactttcacacgattgtagcacctggaacataagggtgtatacgacagatacctccgaaaatgtttgtgcaggtcccagtggaggaatcgcagacgattttcctcaggtaaatctttgtttataaagtcaattgcattaacaaactcttctcgtaggattgactctctaggcctcctctcttttgtctattgattgtgtggatgaataagataaaatgatgacagcaaaatagatagtagggtggattaggcaactcaccttgatcaagttcagaatgatgatggggtttccatatcgttctacaaggttatcaaagtgaagcctagtcgcctcatagtttggttccttttttgacactgcatttgatatcaaagcagtcaaacaggggaaagagagaaaggagagacagtgggggagcaatgcagaaattttagtgccacaaaacttacagactatatctggctttagattcagtcgtgaggtctcttgtgaccagaaaagagggattgagccacgattctgcacaacagaacttatttgcatagggtggtcttcaggaacatcttcagacactatctgttcggtctcgacatcattggcaacatcaccatttctgtttactcctcgcttcaagtacctaatatgaaaataaatttaggagaggggaagaaggatatctatgaaaaatggttatatttcaaataagatgtatattacatcttctattgttaggtattgtgaaatgctctagtgagatatccagatatgactaactatgcagtttctatttgcaaaaaataacatttagtctctagaggaacaccttgcagtgtcagttacatgcttaccacagaacctactaaattgtctgactagggggtgaaagaaattgtttacctggttccagcattatgacgggaacgcctagcgataagggtgatcttaaaatccttcccagattcagaaagagatgcctacatgtaaaatgaggcatggttcttgagtatccaggaattggagatttaagatgccagtataccataactacatatataacacggcaacagtgtcataatggataatatatgacagaaatccgtatgtgaaacagaaaacttcttactaggcctttggtgcaataaagaaatgataaaaaaaaaaaaaagacatcacaggacttatataattagtgatttataaaaatgatccacatatgtaaaagaccactgctgtgaggaaaagagtaatagaaagagaacagatgcagttttgaacttttcttctagcagtgagctgtcagaaaaacatacaactctcacctgcttgaagaaaccataaaccaatgctacagtccacagggtattccgtagatgatgtcggattccccgagtcaagaactcattccagacaaacattttctcatagagattatgcccggtctcataattgcatacattcttctggtaacttctcattacattgtaagaatagctgaaaaagaagtctttcgtaaggtccaccatacacaagagtctcttatatctgttcatcaacaaatcggaaacaccataagaaaaggtaaaggttagatagatgacttcagctcatttaaaacgtggaaaggacaaaacgtctaaagacctgcactttcgtattcgaggagaacagagaaaaacagtaaactaacgaagaaacagaaaatataacacaagaaatctcaaaaaacctgttttcatctcttgaatttgcaaaattgcactgtacagtagaattatgcaaggcaactatctcgctctttgatacagcatagacactgtgaccaaaaagatcacctatgtgtcttctttcagttattagcagcatatagtaaggtcccaagaatttaacaaagcctgagacatcatagtagatgcaaaatgtgagaacaagctcaaagtaaacacaacaactgaagcatctgtacaaactcaagataaacacataccaatgataccataacaaagagtcacaagtttaagcccacccgtagctttatttccttcgtgtatccgtttgagcaactcataacattctttctttgtgtaatgagtcgaatcttgactaatgttaagctcagatggatcaagacgatcaatctttagtactctataaactccacttccatcccaaccaatcatataaaagttctgcaaatagtatcatcacaagagtccacacatttataagaagagcctcaaatcaaaactagagtagctgattccaaattttgaaagtggaagttgtaattataccgattgagtttcgaagagtttgaattcctgaagagaatgtgttgttgttcctgcatcgtccgttgatgaagacatagctgatataacagatctcccccgagccgcgttggctcagggaaattttatcgcaggagcattcaccagatcaaatttctacggaacataaatagcaatagagaaagaaataagccacaacgaagaaacacagattctttcttcctcttcggcgttgtagaagaaattgtcgaagatcgaatagagagttagagaagagcgatcatggaaacagatcagagaatcgttatcactctggaagtgtaaacaaaatgatcaaaaaaacgaagctcggatttcacaaaaaaaattagctgtacaaaaacgtcggtggtgacacaaagaatgatctaattcgttacgagagaagctttatatgacgacgacgaagaagaagaggaagaagaagagagaaaattggcagaggattggatcgagaagaagaatgtgtttgctgctgatgaaaaccacaatttctgatttttttttcttctctttttctcaaccgaaattaattaaactcaaaaaagccaatttcgataaatattatttacatatattatatgatgcagttcagtataaattttttatgtaaaattatctgcttttatatttatactatataaaattatatatactaaaaagtttgaaaatttttcatgattaaattcattcaaatgtacatttttagtaaatttgaatagtcgattaaaaaattatattttggttatcgtgctctaaatataaattttataattttaaaatattttttatatttacatatgtgatgtaattcaatacgaatttttatatcaaattatctgtttttatatttacatcataaaaatttaaaaataaaaaaaaatttgagaaatttttcttgtcattctcaaaattttacattattttcatccgatctcaaccatttataaaaaaaaagctatggttgtatgttccaatagtaatttcataatttaatatatttttattacttaactagttaattaatgtaattttttattacttaattaattaattaatagtaattttttattattaatatcgatttatggaaattctcgtgacggaagcgagcttaagtttacagctgtatggacaccaatggaagagctgcacttttgacaacatagttgtttgttacacttttttatttatttaaatattcacgtttactttttgattttgtttttcttatttaactgatacacacgtttacatttttttaattttgtctttcaaaattacgttttacttacggtaagatattagattataagtttttgcttaaaatcttttaagtgaaacttggaggaaaaagagaaaagtaaacaaattttcttattatcacttgcttttggacgaaagaatgaattgcaaaataaattatttcgttttgtttcaattttgtaatctcttcactattcgtttggtttagtttaggtaatttatgttgtaatcttaatttatttttcatttcatggtataaaaaatattaatattaaaatcaaaaataacaaggtgaaaattagtatgataattttactagacagatattattacattgagatgtttagcccgaattaactattttcattgtagttaaaatagtttttttttctttctttttcttttcttttttaaacatttgcttccatttattctaataaagacatgctaagatgtcatgagcaccttaatttcaaatttgattttcccaaaaaatatttctgttgactttattagttgccgacttgccaatcatatatgattcatgtagcctgattctgtcttagatcttacacatatgaaataattgtttaatccgaacaaaacttataagatttgtttcaagcgtgaaagcttgtaatttcatttcgtattttgcaagctacccatttcttgcttgactcttttgttttccactatctcaaaacatcatctaagaagcaaaactagtaacagttttcatgtcaacaattttaaaatttggttaactttatcctgacatgggttgcatattgttttgacttatcgtctttgttaggttattaactatttttaaaaatggtttagtcatgtatttttcataaatttgttaagaaatgcgtactatgaataataataaaatactcagcgaaagattaaaaccaaattcatcgtttaaaaactttagataaaattcgagagagaggttctttcaaggaaatctccatgacttctaatttgaatgtatacttcgatctcacttgttctagtgaatcaacactaagacgcgtcactctcgtcacacacaagagatagtgaaacgtgatttttccaatggaaaaataaaataaacagctatatacttatttttcacataaggagttgttatttatattcttaggtgaaaacttaaatcctgcagaatttctttttacgtttggtaatcaatatgcaaagtaaatgaatgattagtaaaaaaaatgcataatcgcatcaaaaacgttatcctgcctttatatgcatctttctatatataaagatttagaatcaattgaagagggaaagagaatgaaaaacataaggaaagtccaaagcatggtctcttgcaccaaaccaaatccgtagtcagccgtctacaaacctggaggatcctcaaatcttgattttgcttaatctatttcgaacttgatgatgatcaatgaacttagtgagcttttccttagataaataggttgttctccatggcgttgctggttccttcatattattatttattataacagggtcaagatcaatccacgcagcaaagcaacaatgcaaagtttggttcattcaaggacacccgactaaagacatttctaaaacatgaatggtttatgctcaaatgagcttattaacataaaaatctaagattaaaactacaatagttcaatgagctttattgaaatgtaaagatgagaaaggaagaagctttaggtttgttaccaagaacactaacacttcagatttgatttcataaaatggtgaaggaggagagttgttccaaatgacaactctctaggttaatcacaatgttcacaatacatgactatatatatgagagactacttgctagataacctaattacatgtgcttgtatgggcttctatatagataatagcttgggctttatgtgtgctctaatatttctccgcaaacttggcgtggtgcgaaagcaacatgacaagtttgaacttcaaatgaaatgtcagcacaaatggagatgacttgacaagagcatgagtagacaaagcaagatcacttggatgtagatagtagcatctcttcaccataaaatcagtctttagtgtgacaacttttcaggttcttttgacctatttgtctcacgaagaaaccgagttttctttatctggtttaactcccctaagctgtcccatgaagaagaagaattctcttcccacaactacttagatcctacttgctatctgctttttattctttagccaaccacaatttgcatttacacaatctgtttttctctttgacattttatcaaacagcttctatgcgctcagcaaaaccagaaacttgctcccttaaacacatccttatcaaacccaagtaagttatgttgcattctagcttcttaaattccacgtctataaatctaagccaccagcggaatcactaaacaaatgactactctcatgatctaaccctatatctctagccatgtttccctcttttttttctcaacccatcaataacctttgttctgtctcagatgaaaggacaaattcattaccttgaatagtgttgttgtggttacttgatgggattgagatagaaagggcttgaaaacacgatatgtgatatttatactttgcctcttctttgtcgcaaatgtcttttagtttggagcattctctattcacatcatccaatggagaatagcgacgtttgcaacaccttggcgttttcattcacaagctctgacgccaagaaacgcaaaaccagaagagcggaagctagaagcttgtgaaaataagacccaaatcaatcgcctaggctctgataccatgaagacatttctaaaacatgaatggtttatgctcaaatgagcttattaacatagaaatctaagattgaaaatacaatagctcaatgaccttttatcgaaatataaagaagagaaagaaagaagctttaggtttttcaccaaaaaacactaacactttatatttgatttcacaaaatgatgaagaaggagagttgttccaaatgacaactctctaggttaatcacaatgctcacaaacataactatatatgtgagagactacttgctagataacctaattacatgggtttggatgagcgtttataaagataatagtttggattttatgtgtgctctaataccgacatgcatgcaataaacgaccccacacgacacatgcaagaaaccagaggccagcctcttaaacatacttaaaatggctttacaaagatagaccgcatgaaaaaaagacagagaacttgagccgatatcactatggtctaacttctaactttctaataagtatataaacatgtagtgattaccaagtaaattaatttatcaaatattcactttttgaatcgtttcaagcaatagccaaaaaaatattgaaaggctcaaggcccattgggccctcacatatatacgaagtctataatgacttgcttaccggaaaaccgaaataaatggaataaaatattccccgaggcgccgtgttcttgttgcttgctacttatcttcttcttcaatcccataaatcggatttgcaaaattttcttaacctaattcgtttcttcgcgatcaaaccacaggtattttctcctatcgattcctgaaattaaatcttttgattttgtagttcccaagattctctgtgatttttgtaattcctcgtcttccgattcgaattcaaatcaaagctacggcttctttattagggtttcaatagttatgtagttttattagaaacttttgattgattgattgattaggtcttcgaaaatctgcgttttgatataaatatatgttctacttttgcagatttttcaattttagtgaagtttcattttttaaggcatggctactctcaacggaaaagcttctccgtattctgaagaaaacatcaaattcaagtatgatgattatgatgatgatgatgatgatgatgatggtagtggtagtggtagtggtggtggttatgaagatggacctaaatggtctgttcaatcaatccccacaaagaaagaggtggagtatccgattatcgactcaggagattacgttgacgacggatatgattcatccggcgagctctctacaacgacgacgccgccgattcaaggaaatgagaaacctgaagttaacttgaaaaacgttttaactgggttgattgctattgttactggacggaataagaatccgttagatcagaaaaacccgtcttcgaatgtttcgtttcttggctctggcacgaacggggatacttttgttcattcgtctgtttacataccgagtgctccgcctctacttgaacctagtgggataaactatagtgtttacaaggagttgcttgaagctgaacctcctgagtggctacctgatagtttagctagtacttgcatgcagtgttctactccttttactgcaattacgtgtggtaggcatcattgtcggttctgcggagggatattttgtagaaactgttcgaaagggcggtgtttgatgcctagtcggtttcgggaaaggaatcctcagagagtgtgtgattcttgctacgagaggcttgatcctttgcaatgtgttcttattaactctattagtaatgctgtgcaagttgcaaagcatgatgttgttgattggacttgctcaagaggatggttgaatctccctgttggtctatccatggaagatgagatatacaaggctgctaatacgttgagaggttactgccaggtttgattctcatcctttgttttttcaagtacatatttgttctgtagagatgttcgagtagagaaaattgagtatcaaatgttacggtgcacattccatgtttgtaagtgtctgtttaattagttaccgaattacacaggtagcaagactagaccctgagaaatccataccgcatgctgttcttagtcgagctaaaggtttggcaatcataacggttgccaaggctggggctttactgtcatacaaactcgggactggtctggtaatatctcggagaccagacgggtcatggtctgctccatctgccatactatcagtaggtcttggatggggtgcacaggtaaacttcatcttttccattcaagacatgcatgttagagttaaagatgcgttttcaatagccacataagaagatttgtactctttttgtcagattggaggtgagttgatggacttcataatagtgcttcatgatgtgaaagccgtgaagacattctgcagcagaatgcacttctctctaggcgcgggatgcagtgcagcagcagggcctatcgggagagtgttggaggctgaccttcgagctggtgacaaaggctctggtgtctgctatacttacagccgcagcaaaggttttccccatctcaacttcatgccttaagttttctctttatctataatttggccagactcgtagctcaataatacagaggaagttgaaatgtaaatctataacctgagagaagttgttgtgttgtgtgaacaggggcatttgtgggagtatctctagaaggaaatctggtggcaacaagaagggacatgaatgtaaagttctatggtgatccatacctatccacatcggacattctacttgggatggtggatcaacccaaggcagctgaaccgttgtacaccgccctccgagagctctatgctcgtttgcgcccgtaatctccattcacattacaaactacgctttgtatatatacgcttctcaaattcgtttctattaaagtgtaaatgtacataaattgtttctctctagaaccaaacagttgcttccccaaactgtgtgaacgatttgggatttacttattttatcaaagcttgtttacctttttgaagcttgtttatcaaagcttggttctatttgcatgtctattcatttgttacagataaaatgatattggcaagtcccttaaatatgatgcaaaatctataacgttcactatttttacattctccgattcattataaagataatggaaagaaaaaaaaccttgcattgcaaaaaaactcgtgaaacattagaggaatcaatcaatcatttggttccaaggcaaaagtacaacaaaagaagaaacatgaacctaaggtacaaagctaaggtacaagcaagccaccgttggaggtcttctgagacttcttcctgtaatttgagacactacaatttgggcacacatattccaacccatctgtttttgcatagtcctgtatatatcatatgttgcatcagtacacatattattcattgatgcttattacgagtttacgatgtgttcgtttagttaccttgaaggcgccgaggccaggccttctgtcacatccgaaatgagcccactctccacatgatccacagttcacccagtcaccagctgtgctactgtttcaaccaaaccaaaccaaagcgcgttaacaaacaaggcgttattaaccgtgtacacaagagagagagagggttcttaatgtacctgcgacatattaaacagcactctccatctacatcatcatgagcatactcatactccaatagatacgtctcatagtgtcttttcagggtattacccacaccctgccataataaccccagagctgatgatcagatatacattctctgatttttcaagaataaatcaagtggtgagacaagaaaacaaaatcatttacagtcattctgtttgtgagtgtgtggttgcgcatctttgagaaaacttgtcccttccagttgatcccattacctacatggaaccctccccgtgatacaacctgcaacaactctcattattagctcaccaaatgtaatgctggctgccttggttgaacaaaatcaaatcattgcttaactacctctctatacaagttgaagagatcaagccgttttgagttgagaacagcatctggaaactccgctagtccccctggaggaactagccgggtatgtcctcgtattagcagaaactgcattacatccctcagaaactcctcctacatatatagagatagcaatgttaagaggagtttataagttcaaactattcatcacaagaaaaacaatgcaaacctctgagcaaacttgaatatgcgctcttccacagtcgtgtttttttaaaggtagagggtttagtgagatgatttgctttctctggtacgaaccagagaaagctttacggtgagttactggagtgccacctgatgcaccatgctttggaggcataggcaagcttcctttggtgtggtcaccatcaaatcttccaatttcagagtaaccagagaaaggtatcatcttatgtcgacgggtgtgaggtattggtctcaaagcagccacgttgattttccttgatgtaggtcctccgttttcaatttcctgaatataaatattgtcacagcatccaatcagtatatacatgaagactgatgaacatttggcagaagtatggccacaaaacttatccctgattagagttgaaatcatagagtctagctcatgaacaaagaataattccaaattaacattttgtatagagagaaagtttcaacctgcgatatccgaaacagtaccttactttctctgcatggctcggatctttttctggttggcaaaggaggtgttaaccagttaggaattttggataaaagagcatcatgatttgaagtatcattgatctgttgtccgcagaagaaaagtaaacgttctgcatcatctttctcaaaggaagcaacagacaacccctgaatgctagctactccaagaacgactaaactgcggtatgacacatccggcgccaactgtcttaaaacctgtcgaaagcaaaataaccttttcttagtcacgcattagcaagtggaaactcatgaaacgcaaaaaatcctgagaacccaaagagaatgtaaatcacatgactatctggatgtaatcacttaaaatgcacaagtatcatgaataaagagtgaaagcaataaagcacgaaaaatggtccttggacatcccaaagcttgagttaaacgttaagaaacatgaaaagcctttatttctacccgttacaatttcataacaaacttttcatctgaaactcttgtgactactttggctgactaaattgttgagaaacttggaaacaaggtgcatgagataaataattgggctaaagattactatctacaacaaatataagtcgaggaaagaaagagattattaacctgcagagcccatgttgggacttgcatcgaaacttcacacacacttgctccacaagctattgaggcagatctacgaggctcagagaaaccccgctttgtttcttctgagttcaccactgaatggactagttggatcttctcaacgacctcatgttttatgtgattttccaaaagctgatatttacataggagattaataataaatcccattgcacatgtatgcagagataagctatatttcaaaagatataatcccttgcctgatcactgaaacaggtctgcgcatttccagacacaagcattgatatgtgtgctgaagaacaggtcgagacatcacaacgcatggtcactacaccacgagtaaatgttcctgcttgaagaggaggtgctggagcactgcagtttcaattttgatcagcaaaaaaatgaaaagtaaccaagtacgtcttaaaactaagtcaaaaggcacaaaaccatagatgattaatcttaaggttattcgagggatgcgcaacatatcatttggctatagaaattacatacctagaacggttatggagcttacttcctcgcatctggaacaatataaaaaaataacgttcttttaaaaggactaaaagaagacatatacaattaagtccatccatacattttagtatgcgcactaatgaagaaatatcaaaactgtaaactaccaactactcacttctattcgcaagagagcattaagtccatccatcaaagatcccagtaaaaatgtatcctgaaatagagaaaaagctttgtaactgaagatagcataaagaaatactaacatctgcacaaacaagccagtatcataaaatgcgcgagaaggtcaacaacacccaccactgtgcatggtggtccacacaaaagaaacctcacagtaacatcttcatcatatatctttattgatgggaggctctctaatgaattttcctcttctagttcatcagcttccggtgaaaccacatcaatctttggaggttctccaagcaagcaaggtcccatctcataattcattttacggttgctgttagaaggaaggacagcattgtcacttgtacaatagagtcggaaagatgcttctgcaacatggaacacatcccatgtatcgctgcacgaactgcattgccaaagagcatatcactgtcaaataaatttgtagactaggggaaaaaactatataaaatatagatgtaaatcagactaaaattaaggcttgtcgctatgtcagatgctcgagtaaacaattacctctgtatgactgaaaacagagaatggcgaaaatggcaggctgcatatttcgagaaaacatttttccaataaataacatattgaacaccctgcaaaagaaaatcaccattaggtgaaatagagcaacaaagaggtaataagaagaaaagtgaaaggtgcttatcaagagtggtgtaccttagagtagagtgcttgagctaattcttcaccatttgggagctcaaggtaaacctgtgaaaacaatatgatgccaaaacatattaatatctcactaggtatggaaaatgttttaacattcatgtagaggatactctatggagccttttaagcacattgtcaagagactaacagcgatttattaagaaaatcttagtggcatgaggcatcaacgtaaaaggaaatccttaactaaaaacgagaaacgtaaaacaacgaatgatgcacctaccgttgtcggtaatgtggaaccaaacagagtaaccaaggcatcaggagtagaaaaatcagtatatcccaacactaagggaccaacttcatcactatctccactatgttccccttgcaagtacacaaaatccgttgctgaagagttaacagcaacctggaactcctccggcgtaggattattcagtacctgaaactacaacatgaaaaaagcatacaccaaatgctttaacatctccattaagaaatcacttagaaccaagattctcccatcaagtctaccaatttctaaaggcctcaagcaacacaacctatagcaacaactctcaccagctaacaattcccaaacttagttcaacattgtctaaacttactaaaggttccaactttcaaccaacaatctagcaaatcaattacgagaattagaaaagtgtttttaccttgagacgccctgaagaagagagatctggaaaagggtatttgggttgatgagaagttccatctatctggttattagtatcgcaaagctctgctccagaaacaactgccacaacattacaacggtttctcgaaaacccttgtccatgaaacatcgttcaatagcataaccaaacttctaatctctctatgaaactagaccacaaagaaaaccctaaagaaattcaacgaataagttcgttaagaacccactactcgacctcaaaatcagccctaagaagaagaaaaaaaccctaatttcgaactcgtaggaagaaatcgacggtacccagaaaagaagaagacgaattttattggaaaaagagaaacctaaacagagagaagaggcccatcacaaaagatcacaaacacaaaagattaaaatttagaaaaaatctgaagaacaacaataaacaaattgatgaatcttttcttttaagaagctataataataataatactctacagtgtttatctttgtaacactaaaatcaaagcaaaattgttaatcaaaaggtaagagaaatttaactaaaaaaccaaacagaggaattaattaacaacaacaactaaaaatgttgttgtgtttggtttttttttgtgtttttttttgttttgtttcacatcttttaatcgtgttttaattcaaagcttcgtttaactctttaggagctaaaaccaacgaacatcatcatgaggatgtaagagacttttaagaagatatgttcattttacttggaacttccaagttctacactttgatcatcgtctgtctcttgtccagatagagcgagtatagacatcctcttccctacacttgttatttgaccgcaaccgcaagacttttaccatgctggtcggtcaaacttatttttgataattgtattacaaagtaagcctgggcggtctgatattcgaatcggattcagatcaagatatttgggtttggatattttagatttagaattctaagatctgttcgggtattgaaagatttcgggtttagatcgggtttggatcgggttcagaccaagtttttcgggtttgaattcaagtttatccggaatatccaaaatttaagatttatatcaaaatatattcaaattacttgaaaatacacaaaatttctaaaaaaaacgttagtattttttatccaaatctatcgaaaataggtaaagtatccaaaaatatataaaatattttaaaatctaaatgtttaatgtttatgcacttaagttgttgtatatgtaattattactaattagtcatttctaggtatatatattttggatatatttggatacttgatcggatttagattcaaatcggtttcgggttttgaagtttaaaatccgtttgggtattctaaaatttcggattcgagtttggatcacgtttttcggatcggattcgattcagttctttagattcgggttttttgcctaggcatataaagcttggatatatttgtgaaaaatcatttttccatctttctgttacatatcgtgaagtactggagtgttactttcctgggtcgtatatatttgacatttctcattgactttgagccatcctagctgaatgtacgcattgtgctgctttttattagccgccttgtgttgttgtcattggtaaaagctacactaacaatatgtatattctatcttagtgtaaaacattgtcattacctatgttctatactaaaacaaagaatatacatattgtgattgttgttatctatacatgggacttaatctcacatgtgttactatctatgagtttgttggagcgtattgaaaaatcgatgtgatcgactatatcaaaattatgtaaataatgaaaatctagacgatcatgatatcttataatttcttagtttaaagtatttacatttttcttatcttaatttaaatatatatatatatatatatatatatatatatatatatattgatgtatattataacattatttttatgagtataatactaattttgttaaatagtttatgtgtttactcatcaatttataaatttgggcctcgtgtgagatctatagataaacatattgtaattctttgctggatgaaagcataaaactttacgttaagtcgttatgtataaataaaagttgaaaattacaaaataaacgtgttatttgttttgcctttttctataagtcggccaagcaaaaaaaagaagaaacatagcaacttcatcttcggctatataaagagaatgtctcataacttttaaggatcatccaaacaaaaaatacaagagagaagaagagacagagcaatagagatatatcaagagagaagttagattcgcttctcttctttttttggtaaacgtttgattcttcttctttgtatgctctgaagttatgggagaacgcaaaaacctaaacaagtattatccgccagattttgatccgaagaagatacaccgcatcaagaaaccgaagaaccagcagaaaaagattagatttatgcttccagttcgtgttcgctgcaacacatgtggtaattacatgtcggaaggcaccaaattcaattgccgtcaagaagacgtcatcaccgagacgtacctaggtctaaaaatccacaggttctacatcaagtgcaccaaatgcttagcagagttgacaatcaaaaccgatccaaagaaccatagttatactgtagaatcaggtgcaagttgcctttataatggccatgaggacattgaggaggagaagaagaagaagcatgaaaacgcattagaatccctagagaacagaactgtggtatctaaaagagagattgaagttatggctagtcttgatgagttaaagtcgatgaagtctagacgagcctcattgagtgtagactacatgcttgaggatttgagtagaagaaaaaaacaagaagaagagaatgttgaggaagaattgcttattaagtcgataaaatttggtaagaggattagaactgatgaagagaaaaagaaaaactatgaggcgtttgatgagaagaagaagaagaagaagaagcctaagaaacgtgattccggtactgtttgcataatctcaaagaagaagacgggactcgaatctctgtatcacaactgtgacaacgacagcgatgatgagtagtgaattggttttctttaccccattttttttttttgtgtcaaaaattggttttctttaccaagtgtcaaatgttgaacaacataaatgatattaaaaatataaattaaaaaatatataataatatatataaatgatattaaacttcaaagttaatttatggcccagtagtctttaatgaagaggttaaagaataagaaaagcctagaaatttctattaggtttaggagttatctaagtcctaattgtaataggatttgcaaagttgtgcctcctataaatacacctcaagagttgtgagaagagaagagagctttgatgtttagtttttaagagagttttctaatcatcaataaaagagagttattattttaaagcttgttcttgtgttcttaagaaactttatgacgaagtaacccaactaaatgaagaccaacagttgaggccgcacatgttcttgcaatgcaacctgtattcccaagaatctgtcaaggagagtataagtttagatcctgatctggaccaagatgtactaagaagaccaaagcagatagaacgtgaggcggttcagatatgtagcagtgagagtgcaaatttgaggagagaccaaaactacttgaagcagcttactcctcgcatcttccttgactccttctcccgcccctcgcgcaaggggatttcccttatctgactcgcctacaccaactaggaaagattacaagtcaaatagaagaaagagagagagagcatgagagttacacaaaggagacttatagcttgcggttgagatgagttaagctaagagagggaaaaagacagccacttgacggtagatgaaacgtccttgatgctatgacgcacaggctgctccgaccgaaactctccattccctcgacttttagactcattcaatactagattaatcgctaaagagacccgtatgactttgaaaccaaggtacccaaatgtaacaaaacaatgacatcttggcgaagaatggaagctatcgtttaatatcggcccatcattacatgaaaatagataaacggtgcgttttaaatccatataaacatcttgtaaataaatttctgaacactgtgacatctaagaccaaaacaagatagtgagggatcaaattgatcattgtagttgtttgtctgattaatggttcaaattatggaaattatgattttctctgaaatcatcgaagcttttgaataattgtttcaaaattaaattttaataggtaatcttatttcttatattgatttgaaaattatgaaatgatgatatagaaaaaactctataaattaataatgtcaagaccggaaagctttgttaattttaaaggtattaatttatcgataaattaataattaactaatagagatatcttactaattttgtaattgattttaaaaaatattttcttaagaataaatatttttctaaaaccaattacaagtaaaaaagcaatttttaagtttagaaaataacacaatttttccaaagtaaaaaaatatattataaatgacttctaccaagaatgaatacaaatttaagaaaaacaaacaatattagagtcatcttttctaaactttttttataataattaatcttagattcatatatataagtttataaaattattgacttatgatatagatgagaccatatgtttacatagaattttcaaaaaaaatattatcttattagtttatagatttgtatcaatttttacaacggtccacccttgagatcgaaaaaatttactaatttataggggtaactaatttaccgctattaacttatagagattttattgtatatcaacgtatatatttgtacgagctttgcattttgatgaatcagtggtgatgtcctatgggttatgaagcttcataactcataggacaagcacacaagataaatatgctaatgaatccatcagtcgagtcttggaagcctttaagcaattggaagcaaaagatattatggcgactatcgctaatatattgactttgatccaacagaactatcccaaagctcgtatgaatttgagaacattgctagatattgcggtggaaattaaaaaagtcacaaagcataacattgaggaggagggtacaccatctttttatgttactcaaagggtagcacaaatcaatagtttcatagatacttctgctcttgatgaatcaaaagattatcaaacagcagttacctgttttatccacaatactaggtacttggaccaactcaaaatacttgttcataatttatcagatttaaaaggtttattgattaaaatcatatatggggtatctcttctggaggaaacagaggagatctatcagagatgcttggcactttttgccttgatgcatcagggtggagaggatgccgtaaatgtcattgtagaatctttgggtgttgagagttccatgatacacattgaggtctgtcaaatttccatgcatttaatgatgattttgagtttgtctcattgttcttcatctctagatgcattttgtttttgcttcttcttaggctgcgtttgtgttcgagtcgaggctaagagctaatcttttaggctcattcaatactagattaatcgctaaagagacctgtatgactttgaaaccaaggtacccaaatgtaaaaaaacaatgacatctcgacgaagaatggaagctctcgtttaatatcggcccatcattacatgaaaaatagataaacggtgcgttttaaatccatataaacatcttgtaaataaatttctgaacactgtgacatctaagaccaaaacaagatagtagggatcaaattgatcattgtagttgtttgtttgattaatggttcaaattatggaaattatgattaattctaaaatcatcgaagcttttgaataatcgtgtcaaaattaaattttaataggtaatcttatttcttatattgatttgaaaagtatgaaatgatgatatagaaagaactctataaattaataatgccaagaccataaagctttattaattttaaaagtattaatttaccgataaattaataattattttaatagagatatgttactaattttctaaatgattttaaaaaatattttcttaaaaataaatatttttctataaccaattacaagtaaaaaagcaatttttaagtttaatatattagaaatgacttctaccaagaattaatacaaatttaagaaaaacaaacaatattagagtcatcttttctaaacttttttacaataattaatcttagattcatatatataagtttataaaattattgacttataatattgatgagaccatatgtttacatataattttttttaaaaaaatattatcttattagtttatagatttttatcaatttttacaacggtcccaacttgagatcgcgagaatttactaatttataggggttactaatttaccgtttattaacttatagagattttattgtatgtcaacgtatatatttgtacgagctttgcattttgatgaagaagtggtgatgtccaatgggttatgaagcttcataactcataggacaagcacacaagataaatttgctaatggatccatcagccgagtcttggaagccattaagcaattggaagcaaaagatattatggcgactatcgctaatatattgactttgatccaacagaaccatcccaaagctcgtattaatttgagaacgttgctagacattgcggtggaaattaaaaaagtcacaaagcataacattgaggaggagggtacaccgcctttctatgttactcgaagggaagcacaaatcaatagtttcatagatacttctgctcttgatgaatcaaaagcttatcaaacaacagctgctacctgttttatccacaatacgaggtacttggaccaaatcaaaatacttgtagataatttatcggatttaaaaggtttattaattaagatcatatatagggaatctcttttggaagaaacagaggagatctaccagagatgcttggcactttttgccttgatgcatcagggtggagaggatgccgtaaatgtcattgtagaatctttgggtgttgagagttccatgatacacattgaggtctgtcaaatttccatgcatttaatgatgattttgagtttgcctcattgttcttcatctctagatgcattttgcttttgcttcttcttaggctgcgtttgtgttcgaatcgaggttacgagctaatcttttttgctagtttgttgctttattttacggagtcattattttttttatttctgttgagatgtcaaattcttcaattccaatttgtcgaagccaaaaaaagcattttttcttttttttttggaatatttggaagttcagacttacatgccctacatctctcagaggcgggacccacaccagattaaattcattttttttggagaagatccctctcaacgtgctttaaacccaacacctctatttgggaaatttatcactgggcaataacacgttggtaaaaatgcacttaaatactagtattgtttgtttgaacggagaatcacaaaagataaatagaagaaagctgcataagattggattaaagatcgatgctaaataaatccattttaaatatacctcgcatacgattttggaaaagaatattatgtataaaatccattgtttgaagatcaatggtagaaaaatgtggttgacatatgactttaattctacgagtaaaataactcattaaatacatatcaaacgtagagaacttgtagttcaatatcaccaaaataataataataataataatttaaccaaaaccatatacaaaatagaaaacatcaagaaacataattataacgtttagtataatagaaatgatatatcaaatgataatattagaattcgatcaaacatgattaatttacgagactagaccagcaatgaacgtgataccagttgatggtaaccacaagttcccttgtatgagttgagatactgtaaaattattagcctcggccgaagtattcaacacatggtatcctggccacttaacacggcggtcaagactagcccccggtccgctattcatatactcaccataatataatgtatccaacgcaaaatttccattccattcaagccatcctacggggttgattgcatcactcatgtagttttgcatgaacaccgtcctagaatatagtttccacggccgacctaagtaagtagccgtagtatttaagtttagaagtaggtcggtatcagctgctatattgctgaattggattgtgaaaccggttggctcatttggatccttacgtccttgagccgtgatgctattcttctggtttggaaggccttgtttggctttgatttggcagctttggaatactgctgtggcgtctccgaatataaagtctacagtgcctgttataatgcattctctaaagaattgacgcattgagtgggcatagagagtgtcttggtaacctctcatcgcgcatcgataaaagaccccgagatccgtatcggatcggattgcgaccgcttggtgtttttccggtcctgctgtgttttggaaggtgatatcgcgtgcaataaatcctctaccgctcacagctgccaaatagttttataaccaattcataatcttcattaatagtaagaaaacaaaaaatactaggtgaaagatattataaatttggacttaccaaatgtagcagatcggaaagtagtccagccgtcgatgaaactccggttacccgtgatcacggtggcatcgatgccgtcaccaaccatcataatgttccatttcttctttttaatctccacattctctacatacacacctctttttacatgtatgacatatcttttggtactatagtccggtgcagccaacaccgcgtcacttatcgtcgtgaaatttccggtcccgtctgcggctacaaccgcgtcagcaaccgttatgttatcagtttgcaacaacttccgatcaccgggtttaacccatgaggggaacttactgaagccactatgagctttcgtcattgtctgggccttaatgggcttaggtttgggcttagagggaggagagtgaaccatcgttagtaaattccgaacggtcgtaccaaccttgctaagaccaccggccactatctttttgataattccattagtaccctcgaaaccgtcaagacatgtgtcctggttagaaagtgcggcgcttatccatgtccttagatccgaacccacgtctcctgtgctattgtctttacctgacagtgacagtttaatgtattttgttagacatttaattaaaataaaactgagattattgatatttgataataataattgattttttttctctctagcatttttatttttcaactttctttctaccatttaatcagcaaattttagtttaaaatatgagtttttattttttaatatgcttttggttaaattaattttggtatgtgtttcggtagactttattttaatagaatctcatttagttcgaaacacatcatgtgagttggccacataaaccatatttaaaaatcgactatgaaatattcatattatcaagatccacataaatgcattgttttcttctttttcttttgtatttttattttatatatatatatatatatatatatattcatcttcccttaaaagggcagcatttcaaggttttctttcgagcaagatattttattcccacgtcgaagattaatcaccgacgataataagataccaaatcactttcttctttaaagcaaaaaagttctgagaatctgattcagcagaagaaaaatctgaaagctatcaaatatttatattagcaaaacaaaagaacacatgctagtgctagcgaatacttaagagttaagagaaaaagaaaaaaataggtctgtcgtcgtgtcaagcttaataaatggacatctctattgtgtctttccatcggttactaaattatacagtactactagttcgagtcaatggaaaaaatgggcttattagtaaagctagtcttccaccaaataattaaaataacaaatgctaattatcgtaatttttatcttttgttattctttttttttttttggggacaaacgttttggtatttataaatttggtggaaattcaacgaacaaactatataatgtgcatcaccacgtgaactgaaaattcctcggtgagttttgtaactttgtatttaagttggtaataaattacattcttagtcttttatattaatttaaagactcatattttgcatgcaaaaaagaaaaagactagtagttaaaatttaccgttgggggattgagaggcagagatgatccaagaaagctcttcggcggcagaatcaagaagatcaacacaatcaacaatcgcattggagactcgcgacttcccggctttcttgtcgaacttggacactatagctaccgcttttgttatagcgtcgacgacggttttggccgcttcagcaaactctaacggtgggactctcaagcactccatttgaacaagatcagttgaagaaaacgcttctttgtgggcggaacataatgagattatgataagaaagaggaagaagattgatgaacccatttgtcggaacttcgccatctatctcaggtagaatcttgcaaaggtagtggaagttgaagatgaaacaagagtgtctctctctcacactctataatatctttgtgaagagtgaatgtaagtgatgtgtgatgttatttattataaagagagagagagggtaatggctaggcagtaggcaagaaaaaagacgacctacctttgctttttataccatcagttatggatgagattaggaatttttactaagtattgttagttcaattggtaaaaattctaggtaaagtttagatgttgccggttcgagtaatgtttgggatgaaactaatattatatgttgtggtttcgagtttagggagattacggatttcggcccaaaacttcttggtattaaaaaaaaaaaatctaactttttaattttaattagaaagattgaatttggacttgttttcctggaaataataaatattaatatatcactgagagttttgatctttgttgaaaatttgtcggacgagaatctccatgcatgtttgggtaaacgttacggattagagctgtggatgccattattttgctaagcaaaattttctcttaagtagaacaaagtattacaatgacatataacctagtgatacattatttatgtgtagtcattcctatttaaaacctgactaaaacatataaactaatggtttgtgttatcatcactattgtatattcgtcccgcttcatattcctataatgtatgtttctgattttaaccaaaaaagataggaaaatgttgtcccgttatattataaacatatagtttagcttgttaattaataccacattgcacaccagttggaaaacatttttctttttaatatatatatggaagtttaagtctaaagaccctacattttctagaggcaggacccgcatcaggttaaattcatttccgttagagaagagatcccttccaacgttcttcgaactgagcacttccacccggaagatttatcactcggccaacagcttgttggttataggaaaaaaaaattacgcactagtagaattatttgagagttatacatattaaacacacctaaacttaatgaggatatatgaaggaaatatatattgcttgagtttgttgtttgtttttgtgagtaatttgtgatgacttatcttagtgtaactgaacaatttttaataaggggtgagaaagtagaaatgttacagaattagccttcattgtagctagagaagaaaaataaaaacatgaagttcattttacaacaaatttggatagtccaaacaataaagatgatgtacgtattaccaaattcattgtcgaatctagattctgactcttaacacgtaatgacggtaatagaactacgaatatagattcgaactcttaatttattattattactctagagctaaaaacaaatgtaccaaatggggtggcataaaaaacgtggacaaccgggaccacccttaaacacacaacaacgatgtgagatcgtgatctgaagaaatttgggacaatctccgaccgtgatctaatctacacgtgtcctctcaaaccattatcttcgtctgtactcacattgatgacggtttctaaaattatcttacaaattaaattattttttcgtgacatataagttctcatgcaatgcacaaaaataaaaatgatattatcatgcagtactgcacagtccgtctgaggcatcttattaaaatattatcatgtatgtatattattaataaaaaaatcgaacaaagatttgttgtatagcttgattctctagttcatataacttcgtttatcttgccaaattctttttggttggaatgtcttgcctactttatcagtgataaactttttttttatgtacgttgaagtctacgttgttgttttacacctcaaataattcaataaacgagactccttttacaaaacagaaaaaataaaaataaaaagcgagaacgaagaaggctcgaatttgaggtttccaaaattttgaaggagtaacattgaaaatattgtagtacgtaaatactaaataatatttggcttgagttacttcgtgtaatttaatgttttgtagttgttcatttctaataacatcatttttacatgtcaaattagatttttcatgaatagttcgttagaaaatacatttatcaattttcttatataccacaaccacataaattaactcttcctaatattaatgtctcattgatcttgtaagaaaatggaattgtcttttgtaaatagagaaagagaaagcagaaatgtcggtttttaaattggggaaaaagagttgtggagtcatgcgtcggtgcctcacatttcaaatcacacttgtttttgtgttacgtactcttagtatccttggtgggtctcaattccaatctcttggtcaatttatcgttgcctaatgcatgcatttttgttgtcaaaattttgtctcgttctaagatccgtagcgtttttaagaaaatcctatgatagacaacttttcaacgtctaattttgttttatttcagcttcgagaaaaaccggagctggttatatccaaaccgaatttaattaagtttggatccagtcactgttaatttaattgagtgaatatgatgatcatactaaagtagtatatagttttgagcaaaaaataataataataagaaagcaaaaacgcgtttagtaactttaaatcccttttttggccaacatgtgcgcaatcactttccatgcaaattacgtatatatatagttttggtaaaacgacgtatatcagtatatgatagagaaatttttaataatatgagtttgtttgtaattttcaacgtctagttaatgaataagaataagagattgctttaacttttctactagaacaaaattaaacaaaaccgaatcaaaataaatttggatttgacttcaattccactttactccagcttcaaaaaataccggtgatggttatgtccaaaccgacttcaacttggatccaatcactgttgagggaatatgatactaaaatctctatatagttttgacttttgagcaaagaaaacacaaaaatgaataaaaagaaagcgaaaacgcgtttaaaaactttgaatcattttttgctctcatgtgcgcaatcactttccaattttccatgcaaatgcaaagtacattactcgatgcttttgctttggcatgcatgattatcttatctcctttgtctcttgagcttaagccactctctaccaacacgtgttgcatccttattgggaggttgctaaatgtgaaaaagagaacatctttgtttttgaaatatttattagttaaatgtgaaaagagaacattctggatcaccatcttcgttcggctcgcatcgtcaaggctcatcggaggttttctgttccggcgagtttctgtagttttttggacggcggttcattcgtattttacgatatttagattagagtttctcttgaaccggtttaaatccggctttgttaaaatcgagtcgattttgttttaattggttttgtttagttagaaactagtgggttgggccctgaggggaaattgtatgagtctaaatccggaaatagcccaatgagtctaatttataaaatttgaataccctttaaaaaaaataagagaaatatttattaattttttttattgacttatctttatctttaaataaataatattttctaaaaacatgattttaaaatacgttacattaatattttttaaatagggcaccatatactgattacggatattctcccaaaactgtaatttcaaaagattgaactatccaactcgatcaaccaaatgtttcgtctaggaaaacagaataaaaaaaaatacagtcgtgaaaatcttaatctaactgttttattttcacacatttacgtttatcgtttaatttgtacttcaaaaaaattgcaatcttatgttattcaatatagataaaatagaaatgtcataaatcaaagagacgtgtatttaatctagtattttaaatgatttgtataaaatttataaatcttatgttattcaatcatgaagtttaaaagctttaatgaaatctagtgttattgaattaaagatttaaaaatctactttaaaatccaatagtttgtggttcttattaattttgaaggatttgagaggatttgagaagactactttagtctaaaatatagaaatccaaatcctacagttttagatgaaatttgaaaagattttacaataaatcacatcaacttccctaaactcatacaaaaactcactaaaactcaaatcattcaaaacgtaagatccaatacactttattaaaaaatatcaattatagaactagcaaaattgggatgaaatctagaatgttatattattgaatgtacctttaaagatttacttatttgatatttgcataagtttttgtttttttgggtaaaggaagctttcattaatctaaatcctcataagaggtggattcatacaaattaagcttaaaacattacatgaaagatagggataaattccatgagttttccaaaatacataacttcaagaagattgcaaaggctggaagatctattgggacctgtagagattcaagtttgaagactagcttcgagaaatttcggatcaacttatgatcataataagctcgtgcgatcgacgcatataagctttcgttgaggctttttcccaggttcaagttttagagaagatatctccttagaggagtaaggtttcagggaaggtatctccttagaagagtaagcttgatgcgttcggcaaagaagatgacaagtccaaagcgcatataatcttctaatcaaaagaccaagattattcggtttaagaaggcttgagaaggaggttgatcgagcaagccgaaacggttttatccaacaaatccaagagggttgagatgcatcgcccaacaaaagacatgggactagatgagtaagcgtaatagtgggaaggttcagactcgttatatgttcatataaaagagtagaggcgtgagcagcgtcacatggcctacgtttcgagatcaaaactattccattaaacttcaaaactaaacttgcatctggggacaaccaatctactctatgcaacatgtttcgagagttgtaattgcaaggctcctctaagaataaagttccaacgattgaattgagtctacaaccatccgttatcgtgaagcagtgtttcagagagagatcaggcaaagttctaagtagagcaaacctagatatgggttaaattaggtttagagttagtggacagccgagcggagtgaggcccagcccaccaagagcgaagattgttgcatttgggcggtcaaaaggattaaggcccatcccaccaaaccctagggttgctgcggttgggagaagggatgagagatcgctgtcgtcgtgaaaatctgaagtgatgatcgacggtgaagcacctggggaaaccacctgccagcaaaggagctcgtcatgtgccgtcgactttctcaccggaaaaagcacaactgatggtccaagatattcgcgggccatcaacgaaacccggtgagaaggaactaaaggcgatgccggtgctagtacagatctagagccaaatgatgtgtcggtgaaggactactctggagtttgggaaaagacaatgttggaattcttcttttatcgggttcaaaggcggatcttcgtcggagttatgattcagaacagagcttgtagagtatcaattcactcttccgtcgcagagaagaccctcagagaagaaaaccaaaagaagggaaaagtttaggattttgcaaggaagatgcacttaaagaggaagataacatgggccagaagattacgaagaactgaagaagattacagagatttggcagatccctacgcggcgaacatgagtctcaccggctcaggaaggcatggttgcaagggatgtctcgattaccgtgtatggaagctttcggtaactagtcttttttcaatttaacacttttggtatttgcatagataaaactcataaatggtgacttctatttgtcaccccatctaagttcgcaaaatgaaaatctttagggaaggatgccaagaaaaggcttctctctcttctctctcttctatctcttctctctctttcatctttcagagagaatgaagcttatcaattttgatttcactaatgtgttaatctggtgacttttgtcccgcttgaagcgggtttgtcgtctggttgcaccggctttctcagcggtgtagactggctttgcttccactgtagatggcttcgtttgcatcttcatccgactatgtttctgacatcggtggtttaatcaacatcggtggtcggctttcgcttcagatttagcggtctctcggtgatgataagttagcttcttctccagaccgtttggtctaactgttgttttctctttcttggactctttcgatttccaatggtgaaacaaatattttggatcgtaagagctttcttaataaaagcaagtctatgtttcatgaactgcaaaatttattgaaggttgaaaagttgttgactgaagaagaagatgaagaagatttacagatttacaataaaaagagtcatattttcgacaaagctaaaattgggattttgccttgtttctttgggcaaagattgagatctgtagattgaataagatttccggcgctttttgtcggaattgaagctttccgacgttgcaacaatctgccggtgactccaacttcgtcaactttgcacgtgtctttcaacctgtttctcaattgacacgtgtttgtgctgtatacaacttttccttcagtttagggttcacgtaattggacttttgttttcctggtcttttgttttctatatttaggtttgtttgtttttaaatgtgtgtaaaatcttggcttgttacattggctttaaaaaaattacagagaataaccaacaaaaatttaataattcactgaataaccatatgattccaatggctataaaattttgtgtataatctgtaatatatacgattttgccctttgctgacatgttaatttttattttcctctctctcaatctctctctcctcatgttgtagtcttctccctattgatttaccttcattttcatataaattcctctttcatccgaccctttcatcaaaatagtctctttaacacaagctctctttataattagagaacatctccaaataatagtaggtaacaacttcacctaaaatcatttgcgtgatttcgtctcgaacgctttttcattgtcaccaacacgaaatccactagaatctcaacgcttcgattgctccaatggtggcttatagatagtaattgcactttcctatttgggtatatcaattctcgtttgttgttgttattgggttcctttttgggtgtttcttctccaatttatgtaagatgctcttaatttatttcaatttatgtaagatgctcttaatttatttcactttccttttttttttggtgatgctcttaagtaatttcattttcctatttgggtgtttcttctccaatttatgtaagattaattttcactttcccaaaattaatttgagaatttttaaatttttagattcatgaaaatcaaaattgtgaattctgaaccagtaaattgaagatcatttataaatttcttagataaagaagcgataaatgatttacgacggtcatcaaactcatggttgacgacactaatccgatttgttcctttaagtatcacatatactccatcaatgcaattctctgagtttccaacgattccttatgagctattgagttgttttggatatgggtattaaaactttgctctcatgtagtcgtgttagcacatatgttgcagtcagatgaaacaggttacatactattttttgtactactttatctataactgttatatttttatagataaaatattttttcacgcgcatgttagccacgtcattcacttttactatttttccacgcgcatgttcacttgctgattcgtctaagagggagtttgacgatatatccccaccctcatctgttactttcttaatttccccaacaataatactatatttattagaatgtcccacattgattggaattaatatctttgagtattatataaagaatgtggcaatccttaacttttgagctagcttttgggttaagttacgccacatttctaatatggtatcagagcaaggttggctcaacaagcaaattcccacaaaaatggtttcccacctatgtagcccatacaagtggcatgtcttgttatatttccgagatgttgggcttggactgtttcccgttggaccgtttcccacccacatctcgaaaaggcctattagaatgttccacatcgattgggattaaaatctttgggtattataaaaagtatgtagcaatcctttaacttttgagctagattttaggtcaaattaaaccacatttctaataatatttaattcaatcatccaaaagtttcagtttaccataaataaaacacttgtgaaacaaaataaaaagattcgtaaaatgaaacaaggtgattttgcgacacctttacgacgcctaaaatgggatctctaacaaacgaccaaagagaaacgttgccatgcctacgagattgtatcattttactaaatcgtaacacccatgactttggttatcatactcacataaactgcaattaaaaatgcaaaactgaaatcgagaagggaaaagccagtgtttgatcgaaactatgataacaccattcaagttaacaatgtctaagaaacaaccagtactctgtgaccaaataatactttttaggtgactaaacgatgcctgaacaacagacttgcgaacatcatactaaaaataaaccaaaataagatgggagcaaagaatcgcaaagaaaaaaacaactgatacgggtatgagtaccactggcaatttaatcgggatgtgctctttaatcaggagaaaaatcaatccaatgtagaaaaaaaaaaaaaaaaaactgttggaagtaaatgacattgagagtgttttgctttgccacaatatcatagcgtatagatcatttactgttgcaaaagtggcttcaattgtgctttgaaaaggttggctagtgcacctcttatctccatctgcagacagaaacactcgtggagttagctctctaccgattacataatgggtggctcgaaagtacgaaactaactccaaaacaaagttcagttgtgtgagaaatatctagaacagaaacaaattcaataacttgcctgttcacagcaaacgagcctcgtgagcagagggtagaactctctcatgtgcttcctgaatattgtgttgttcatgaagcacatgccttccaaaacctggaacgacaatgacataagaaaattatcctctctatcatagattttatattctcagcgacaaatgcataagcaattaagatgtattaccttcacaatcacgggagaacgtagctccagtacccgatgaacatccatgttagtagtctcccccaaagtggactggagatcagatgtttctttcagaacctgttcacagaacgataccaatttttcttctgctgcaccttctagtctatcttccgagttagatgcatcatccgcaagcccagaagttgtcttttgcaagacgtccaaatatatggtggttccttccagctcttgccggagaaggtttagaggtggcctattaaagaaaaaaatgtataaggacgataaaaatatctatttataactcagtccaaaggcttattcactaacctctctgtgggaatgtgattcatacgtgttctaaggttagaatatgaattgtaggaagaagcaaattcgatgaaagagaataagatgtccataatcgcaatcttctgtggggttttcaaattactccagtatttttgctgcagaattaacatcaaacaagaaagctgcaactgtcagttcacaacaccacgcacatttaccctaaagcttactggggaccaggtgctaaggaatgagagtgtttgcaacaccatacaacatagcaaagcagagaagacatctaaatacctggatgctgttgatagcaccaagtagtagtaattgtgtgatgcattttcctctaatagctcccaatgctggactctcttcttctctgctgtcaggctctgtaggatcttcatgctacagaagaaaataattcgtaaatgtatcatattactcggaaaaacaagagaactatgaaaaaaggaatgacctgtgacgagtgtaaattagtaaggtacatcaaatggaagaaaagttgtgcaagtgcaaaataccttatatggagaggagggtacagtcacttctgcaacagagctttttggttgagatgtgagattccggaggaagagattgtccatgaatctttggccaaaagtctgactccgctgcagattcacatcatccacatccttttgagcccttccagatgacgatggacgacctttaatgagaaagataaaggttaaaaaaacatggcgttgtgcaaatccaatgtttttcaagaagtttaccatccccaacatgtcctattataacaattattttccaacaccataagtgaatattgaaaattgtttatgcataaatccaaaattctacaaaaagtttagagtcaaccttccgaaccatcagccttaggcggtatcccagattctagggaagtaccatgagtaccaatccttggagatgcctgggcggacactttcccattatctttaatatcgtccggattacgatcaactcgtggagaatcagaggcatcggcctctatgtctcctgccaaaactaggttctttttcggattgtcaaaactcaaagcattcaacagctccagcggttgagttgtgtatgatgcatctctggcaacagaaagaaaaggttagatagcaacatttgaagacaatttttttttatgaaagatggtcaccttatgcttttcaagagcatatcccagtctccctcactaaattggtggcctccaacctcgatgaggtgaaccaatgctcctaatgaaattgaaacaactgtctgatctgatttcttcgcacagtctaggagcaaacttaaaagtggaggcagcataaaacatacttcctgctccaaaggtgaaaaattcgttggtcaaatttgcagcacgcaataatattaatatgtccaaagttgcatgttaagaaaaaaatttctgtataatttcatgcagtaaacatgacaagtactgcaacaaccctgaaatttaattgagtaataacggacaagatgagcacagagggagcaaatgtagaagcttcatcagtaccttgtagaacgtattgaagagattgcagaggagctgaagggaatgaatgcttgtttcacgaaattttacatccccggaagatattaagctttcctttccagcatgactcacatgatcaaaaattggaaacaagatgcgatggaagatactctcccagaaaggtgtggagaacttgtttcccctttcatttagcaaatcaaacaacacctccagagcacagtttctaacttcgggcctataatcagatgtgagatcagatagaccggcaagcatcggaaaccagtaatgctctgtcacatcaaaagtttcatcctcattgccatcaacgggcttaagaacaccaccgggtataagtccctgagaatcatcatatgccaggcaaatgagcacatgtagttacagagggaagaatcaaaagaaagtgaggaagttcaaagacaggcctaaaagtagatacgaacgggagagcataggattgaagttataatagaagagtaaaacgctgaattttgaagctaaatttagcttgaaaacatacctctgcaagccgatcctcacatattctgagaagggcaatagctttcaggcttatccggtctgaagctttgttattggcaaacctgatgagacaattgacacaatccatgaagcagtcacctatcacctggtcaaagtgttccagaataactgcaaacaaacgagtggttacacaaacatttatcaaaacgaaagagtgagaaaattgagtaaaacagggatacaagtgcaatagtttgatggactgtttgtcaccttgctcaacattctcaaatgatttttcaactatcgattcaacttcgtcatctgcagctgctgtaaatatcataaaaacactcctccatcccgatttgatacttccaactttagattttatcatctaaaataaaaagattgattagctgctgaaataatggctgcatactaccgagtaacaaaaaccaaggaaacatattaattttagaatatagaatagatcaagcaagcaacctgaacgatgcagtcaacaattaggctccttatggtctgactttgagtattccgcatgataataacgaacggtttgagaatatcattttggaaagtgaaattggtgagctcagcacgttctaaatacttcatcccgagctgtctcagagaatctatggcatacattgcaatcttttcatcatgatggctaccagcagatacgaaatgttcggcaaggacagaccatattcttgcccagacctggtatatgtcacaaaacaaacacaaaataaagtaatacgtgttaagtattgaaatacatataagcgtaagatacataatctatcggcccttcaatattactttgataatgaatgaggaagcagctttataatagacaccagaacttgttgcaacgcacactagagatgagtcaaatttagaacaatattgacagcaaagttaacaaagttctctgctttactttctcattatgttattgttaatgctgttcattctcaagtgtatccatactttcaagttgcatgaggtgcaaggtagggtatgtgttatgacctgtataagttctcatagataactatgcattgagtaaggatagaaaactatcagaagagtaccattcggatacgtgctatattgtaataactgatctcaactagcttctgcaagctgaaaacacgggcaggagactgcttcaattcttcagctgaaacaccacatagcgcagtaaaaaactccacaacagattcactgggcagcttgacactgtttacaaaaacttgttcagcaggtctcccggctaactccttcaatgattgaacaaccccatccctggagatctggtttgatccatgcattactgttgcagcaattccgggagtagaaataatgaattccagcctagaaacacattctaaaactgcattccaagtatcttgaagggtgtcaggttctgagtcacacaaccccagtaatatcctcaatgcttcaacatttttgctccgcatttcttttggagcatgcaagaaagtgaacctatggacaattcaaagaaaaatagtcaacatgcattgcgcagcaatggcacaatattctacacaaactgccaatatacaatgcaacctaaatatatattcaacactaaacataaaagggagtgtgaaataagttttacgagtttacctgacaagcgatgttagaaatgcatatcgcattgtatccattccaagaacataagcaatatgtattccagctttaaatccctccatgcagagaagaatccttggtttgttatcacctacttccattgtaacggagaaagcagcaagcagaggccacccaacagcttccaccatgggccttataatgtccacttgctcaaccgtgtgaaagactcctcttttcactccatgctttcggaaaatttcctgtgttttcctaacaatgtcctcagtctcagatttagcatcagctgctgatattctctttggcaaacccagattaagaatgctgacaagaccacctctttcttctcctcctggcctttgactactgagcttcttcatggtgtcatcgtcttttagtttaatttcttcttgtacaatagaatcatagatctcttccagaagttcagttggagcacaatcttcaggatcattagtggcattcatacgtgtgaaatctgattttgacatcttaggccaaaccataggattatgcgcatctgtatttaacatgataactgcataggctagaacgtaggctgtatctgcattcttgaaaagacccggattgtctgcgcaatatctactcaaggcaacagtggaacataatatgttagttattaactgggaaaatgataagaaccaaatatagattttccattcacctaatccacaaataactaccaagcttaatatttgtactagattcatataatgatctcagagaataatacatggcgcccttacctttctgcgaacttttccataatacgatcaattttttgggcctctccaggaagtctaaaacctttgagaaattcacgaatagccgaatgaaacttcatttctgaaaatttcattgaatcaacatatgcatgcatgacagcaagaggaaactcctcgtgttggcccaggtaatcgccaatcataacctatatataacaacagttaaatcccacctataaatactgaaaataactatgcatagttctagtgttccaccttgctcagactcgaagtacttctcagaaactgtgcaactgaagcaggattcctttcaaccaacttgtttgcaattagatattcgacacccttcactgaattcctgttgaactgcaaaaatgattatccatgcattagtatgtcactaccagtgacaagtagcaggatattaaacaagaacctcggagatggcagcctccattgtggatttatgagctttagccttctcaaagttgcttgggacatcttccctgcttttggtttcaattggctctccagtagaagcagagtcctcgtttgcatttcttgtactattttctgcctctctccttattttctcccaatcaactagtgatttaagaacgttgaccaggcactagaaatatttacgaaaaaaggttcctccaatttcttagtgaataatttcataaggatttagataaaatatatacatagcaatttcagtagtttattttctggatgcaagtaaagcaaacatgatatgacgcctacctgaagggatgaacctttaaccgaagctgtctgcgaagccatggcaggatttggatcagcactctgagacccttgagcaattttagacaaagttgttacctaaagtaaaataaaaacatgtaatgtgagtcataactaccagtcacattgctgaagtacagtagttatataaaagaatggaaaatggagcacaccatgcgctcaaacaagtttggggcctctagatcacaatcatagtttacatacacatcaacaagcatctgaggatctttgcagactttctcaagcatcctgcgtagaaaaatatgagtatccatgaaattcacagcaaaaagataatagactcacttgcctaagagatgtattcaaaacaaaattacatctggacgagcagaaaaatattgtacctaagaacacccatcttttggtcattgggacactcggagttatctaatgatcttaagacgatgatggggaaaaatataccaatttcaccctgagagtgagatttaggatcagaaaaatatggtgaaaggtaacaatccctgtacaaaaaaaggaatttctaaactggggacagcacatgcttacttttaaactgtctctgaaccgcagcaaaagcacggagaagataccagatgcatactgcaagaacataaattctagtcagatacaacaatctgatagaactttcagatctatatgaaatggagaatcaaacctgaaatatgacagaagactgagaaaccgacgcccgcaacaatgcatatgagaggtaggctttcactgaatctataaagtgaaagttctttgtaaatgagtgactaactccttctaacataccctgcatattgcaaacatatttattgcagaaaattggtcaaaatcagccaacagaaaggaccttcaatgaatgcaacataaataacaatctaatgtcaacaactaaaactcaggataagcaaagaggtatatatggggctttcacaacattaaagttctgaggaatgcacactgtttcgggtgtaaatcatttaggcaggaagcagttaacagtgacaacaactatgtatacacacctctatttgacttcaaaataataaaaaaaatttatatgatgtgcaacagaagttcagtatcatgtaatgcctttttttttttttttttgtctaaatatcatgtaatgcctttgctacaaatttacaagatgattaactaggtttacctgaagaagctcaagagacaatatacgggtcttggttgtgacttcatcactatcttctttcatacccatctgatacagaacttaaaaaaattgtcacataagcaccacaaatagctagtcaagaatagagagatggaaccataaaaaaaagccaaccttgcaaagggtacggaaaacaagcaatgcatcacgctgtccaatactcatgctctccagctcgatgcccctatggaattaaaatgagttgaatagaaagtcatgactcttacaaagaaaaaaaacaagtctaactcattatctgctaatcaaaacaggtaaatatgagcatgtgtgtatgtaaagccacatgcaagtttatatgtatgatacaggcatgtgcgtacacatactcaaacacataagcctaaataggcgtaacaacatactggtacatagatcagtaaagcaaaagcttaaactcagaaattgagaagagtggtatgacatataccgttttatcttcttgccatcttcaagatgcacagctttgtcaagggcggcttctaaaccctgatcataggattcagaatttcattgtccgcaaaagccacaacttttgaaccacagtatacaagagtcatctatctaccaggaagaacgaaaaaactattctagagaacttcttccagcctcactatttaaaattcagacaggaaactctatagagcttatgggacgcagacatgttaaaaaaaatatatctagtgggcattcaaagacaagtgacagacgaatatctctacttatccagaagcaacaaagaggatatgccagaagtatatagagaaagaacgctacaaaacaatatacaatctttttcttctaaggaatttctaactttttttccataattctttcagtacttctttttttgaagaatacatctctaatccagtcacggatatggagaaatgtttacgatataaggtgaaagaccaaccttaatatcagcaccgcccacaagggtatgcagctcttcaacagatgcaagagttgtgtctttagcctgagtgagtgcatctcctaaggtcatttctttctcattttcgtcagctgcagttatttcttcatttttagggcttgaagtgtcacctgaaacatgttcttcttgagacactgtggatgatgcggaaacctagatatatatttaatggtcagcacctccattcaacatttactttgttttcatgcattcaaattcaataaagcatatgcaacatcgagaaatatagaattacttacaatgtcagtctccattctcctgaatacaatgcttatcatctgagtcagcattgctttagaagttgcttggttaattgggctcttgctacatgtaaattctgcatttagtgattgcacctagggtgattaaaaaattagaaaaaagaagagaaaacacacctgtttagagcaatgttatagcaaactctaataactcccagcaatggctccccatgcactgcgataaaaacagattaaaataatttaaattgatattgcaagcaaaataagtagaggaaacagttcagcccactaaaagttacaaaacatagctttctacatcagagaattacctttgaactttcctgaagcaacagctgtaagaagaaccttcagtacttggagtacagtgctgcacaaaactttcagctttaagaattggtataaccaatctcaagaagattttgaaacacgaaggtacatacctgtctggtgatgaattatcaacacagctgcaaaccatgttcagaatgtcggtgaaaggtgcagaattttttccaccatccaaccccggatccccttccaaatgatcataggcaatgagtttctgcttgcaacaaacaaagaattaaaaacatatacagaacattaatagaatgacaggagatacattacataagtacagagtcaaatgaatctgaaacgaaaaaactttaatggagcaaacgtccagggatactcagagcaatttaaaaaaaaaaaaaaatacatacatgaagacaatccaaagcagcatcaaatatttttaagttctttgtctcaaatgcaaggcgtagaggtttcagcacaagctccacttccgctccccctaatgtgtgtccagcatttgctaaggaaacgtttatagtctcactttttgactggctagcctgctgcgctacttcagcactcgtgactttttgcggttcatctgcttctaccccagttttttcacctccaccttcagcttgtgaactgaagttaaatataaagtgtcagtgtagacgaaataaactgttgaacaagccacctttacatataaattacaaaaccctttaagaaatggtcagataaaagataaccaaaaacacggaagtctcaaactcttacagaaaactaaaatttgacaaataagatttggcaaagagttttcatgaaagcgtgactagtagctaccatggttaaaaggtgactaagataaacatcaccagatgactacctaacattacaataaaatttcaaagtaactatcagttttatcgagaaaactcaatccaacaactagcagaaaatggaatactggtttggtcattacctctccactatgctcgagggtgcagcctgcgtaacaacctttgaaccatctataaacaatcacaaatggaagctaaaccagttagcgacagaaaaatcattaccacctaatttcttctatcaaatgaaaacatttgtgaccaaggccaaattagagccaaaaataaaaacaaaatgtggagagaagccttaaaattcattgatttctggatagcaccagggagtgaatgtccttcatactacttctaatatcacctcattgatatagatcagttgaaaatctaagtagcacatgcagcttacgcgtagctataccccgaagatgacaagttcaaacaaattttgtaacaacagacgtcacttctctttaatttaacaaagaactaagcaaaccattctgtaatcatgtaagtaactaatccctgtccagaactttcttgtacaataaagcacagattgattggaacctaaaagaaattacgtcttccaaaaaggttatattactcgaactaacgaataagaagtaaaactattctgatacgtagcatctttgttcacaggtctaattgtcagatacaaactataagccagaaggtcttaaattccatcgaatttcatagtcttagctgtatcctaccacatcatactaaagttcactaacaaaaccaaacactgggaataacctgaaatctcagcttgtgcgaccacattttagtcaaatacatctagcagatggctatgatcgtggaatctacccggaccaaaagcaacgatcgaacgattttgagcaaaaaattgggagaaattgagatctaaccttgataagcttgaatagctttctggagatcaggaaacttctttcctccagactccttaagcatcgtatcaaatgctcgagtcaaaaatccaccagccgccatctttaatccttcctatttcgacttcttcgtcttcttgttctaccgcaaaatcgaacgaattacacaatcggatcgtgcgggagcaagatcgtcggagatacgacggaatcgagagagaagtgagaaatgagaattgccttagctctctggttttgacccaagaagctcgatcgaagagagatctgaggcaacgaaacgagccactagctagatctaatttcccatttgaaaacaaaattaaattattactaactatttcaattgaagaaaataataataatcaattaaaaccgggattatttctaaactgaattgaaccgggattttggtgggttctttctgttcttgtgggccaaagagtttattaataagcccaaatggacaacatagagagtgatagaaagatattttaaagtccaaataacaaatgaaccaaaacataaaatatgactgttatttgattttagttctatgtagcagatgagaaaaacgtcggaacaccatgagttgcttatccccgatcttgagttgagcatctctctattttgccaccaaaagtaaaaaaaattcaagcgtgtgttggacatgggcttcatcctcaacatatcatttgactcaaacagagacttaagtgtttaatgggcttgttgtctccaacaaattagcctattaaacacaagaggcaaaacggtaatttacaggaggagtagaagaatctttaggttaagaggtttgtcctataaataatgcactattggcgaaatagtgatacaaaagataatacccagagaatcagagcaatattcggactaaaactctttgtctttcggtttgtttttgttctcggttcgttttgtcttcggttcgttttgttctcgattcgttttgttctcggttcgttttaattcacggttcgttttgttctcaattcgagtcgtgttacgttgccgatcgatagaaatcacttgtaactattcgaccggcctgttgtttacctttctcgttcgtcagctaataaaagatacttcgtcttcccgaaaatcccttacttattcattgttacaacctcggtacaaacaattggcgcccaccgtgggacagttcaaagcttttctttcacagaacgagaacggcgagcagcgtagatgtccccagcgatccacaaaaccgaagacgacatgacagacacatcgagcgaaaacggatctgacgccagccaacaacagccggcacctgacgcaatgcaactgccaccagagaacccagcacccgctcaagcttgcctgaatcccgcacgcgccgaaccacgtcctgccggggtagcagccgcagtgggagacaccgcgcttggcggcgacgctgcaccttcaaaccaaggttcccatttggatgacctcgtgcaaaccatcttagatcgactcaacggtcaagacgcacgaacaaccgaacgaatcgatgcccttgttgcagcgcaagttgcttcgcaaagtcagatcgaacggttacgacgccgaagacgtgactctcagcctcgcgatgatcatgaacgcctgccatctccccaaattcctgctgcggaacgttccgaaaactggcgacaaagaccggcatcagttatcgtaggatctgttgaagggcaactccgtgagaatctaccgaacgaccgcatcctaccgagcaacagaagtttgctgaactgatcttccgacaacgtcgaccaaacacgcaacatggaaatcgaacgcatgaacacggtcatcaaagtcatgtcatccaaaatgcaccgtgccattagctctgccccggaactggagaagtattggaagaaacataaagatctcctttcacggcacgcatttcggaagttcgcgtccgacacataacaaaggttaagctggttccctacaacggtctcaccgacccgaagatttttctaaagtctgttagcctggcaatcaaccgcaatcatttctctcccgaagaatgcgacacgggcagctgccagatattcatagaaaatctgattgacgacgcgttcaactggttttcgctacttgaggccaatacgattaacaactatcaccaacttacggccgtcttcttgcagcaccattccatattcatgattaagggtgcctctaatgctgacttgtggactatgtctcaaaaatacaaggagccgttgcgagagtttaacgaacgattcaaaaaggttgtttccaatattgctataaccgatgatgccacaatcgctgccctgcggaacgctgtctcatacgaatcgcgattcagggaagacttggtaatcacccagccggcaacactagaggatgccctacatcgcgctatccgatttatcgaagtcgaagtagaaaaagctgtgatggcaagacgccaacccaaagcctcgcattcaaatgataaatcatacgacgaacactacaaacctcgtcagcattatgataaggattatagtaagggagataagggcaagaaagcagcaacttacgcaattggtagttcagaagggcaaccttctaaaccatggaacaagtattatcgggaaactgataccaaacgtaaaccggcctactgcgagttccataaaatcttcggtcattcgactgatgattgtctacaacttcagctcctactcctctcaaaattcaagaaaggcgacctcgacgttgagtacgaacgacgtcaggtagcaacgcacaaggacaacatgtatcacccagttcagagagatgattataaccaacgtaacgagcgtctgcggacagaagagactcggcaaaacgaacgtgcccgagatgatgatcggtgaactaatgccccgaaacgaaatgataacgcccccatccatcggaacaagatacacatgatcatgggtggactaacgacttgccgcgattctgtcagatccatcagaaattatcgccgacaagctgaagtaacacgggattggctcgccaacagtaccccaacttttgataacactgaaccgataatcttcactgaagccgacgcagctggcttgacaggcccgcataatgatccgttagttgtcgagttgataatcgctgaaagcacagtcaccaaagtcctcattgacactggtagatcagtcaacgtcatcttcaaggacgttctgatacaaatgggggtcgacttgcgctcaaccaaacacaacgttcaaccttaaacggggttcgacggcgatactgttatgaccgttggaacaataatgctgccaatctacgtcggcagaacaatgttgctcgtacgtgtttcatagtcgagcgtcaactcagaaatgctaaagcttttatgataactgaacccactccttcgctcgatgaacgcatagtaccaaggactgaatcggtaatccaagttaacattgacgcaactgaccctcttcgatgtgttggtattggcgctgatttaccgcaacaattgaaggacgagctcgtacagtttttaagtcagaatgtcatgaccttcgcatggtcaatggaagatatgacgggtgtcgcaccagatattacttgccatgaacttaacgttgactcacgttcaaaccgatcaaacaaaaacgacgcaaacttggtccggaatgcgcaaatgccgtcaatgaagaggttcagaaactgctcgaagcaggatcgatagttgaagtgcgatatcccgattggctaagcaatcctgtcgttgtaaagaaaaagaacggcaaatggcgagtctgcatcgacttcactgatctcaacaaagcatgtccgaaagatagttttcccctcccgcgtattgaccagctcgtcgaagctactgccggtaacgaattgttgtccttcatggacgctttttcgggttataaccagatacttatccactaaaacgatcgagaaaagacggcattcattatagatcgagggacattctgttacaaggtgatgtcttttggcctcaaaaatgcaagagcaacgtatcagcggttagtaaactgaatgttcgccgagcaactgggccgcacaatggaagtctatattgacgacatgcttgttaagtcaacccatgctgcagaatacgtctctcacttgcaacaatgcttcgacgtcctgaacaaatacaacatgaagttgaacccagccaaatgcactttcggagtgacttctagagaattcctcggataccttgtcacccaacggggaatagaagcgaacccaaaacagatctctgcgctaatcaatcttccctccccaaggaacactcgcgaagtacaacggctcactggacggatcgctgcattaaatcgttttatctcccgttcaaccgacaaatgccttccgttctaccaacttttgcggagcaacaaacgttttgagtgggacgataagtgtgaagcagctttcaaacatgcagtcagcggactacctctcaactccaccgattttggccaaacctgagcagggcgaagtactgtatctttatattgccgtctcaagttctgcggtcagcggagttctgatcagagaagatcgcggtgaacagcaccccattttctacgttagcaaaactctcgacggtgccgaactgcggtaccctacgctagagaagcttgcttatgccgtagtgatctaggctcacaaactttgaccatacttccaatctcacgcaatcgaagtcttgactaaccagcctctacggacgatcttgcacagtccaagccagtctggccgattagcaaaatgggcggtcgagctaggcgaatatgatcttacgtacaaaaaccgaacatgcgcgaaatcacaagtactcgctgattttataatcgagctcccacccaatctcatcgagggcgcccctccatccgagaaatggatattgcacgttgatggcgcttcttcccgacacgaatccggagttggcgtacgattggattctcctacgggagaagtgctggagcaatctttcacactcgctttcccagcctccaataacgaagctgaatacgaggcattgatagctggtttgcgccttgcgtacggtattggcgtcaaaagaatacaagcttattgcgactcgcaattggtggctaaccaattcagcggtgattacgaggcaaaaaatgaacagatggacgcctatctcaaggtggttcgcgatctgtcccgtaattttgagctctttgaacttaataagatcccaaaaagcgataatgctcccgctgacgcgctcgctgtacttgcttcgacatctgatccggatctccgtcgtattatacctgtcgagagcatcgatcacccaagtattgatctttctccctctacaaacacgcagactgcgccaactattgatttgcctgggccgccgataatctacttaatcgtcaatacgctcgcatcaacatcttcagcaccaccaaatgtttctgcgataatgataagtgtgtattttgcatgttttgagcatccatttgtcatcattttagcatcatatcatcactgttttataccatttcacatcatttgtcattactttgcatgtttaggatagttttgcatgcatgttgcatatttgcgttgatttcaggtgatttggagctgttgacgagctatctagaagaagcggacctgatcacgacaaaccactcgaccaagaggtcgagtaggagcttcaagatctcaagagaccactcgacccccaggtcgagcaaaggacatcaccacttcacttcaccactcgaccacaaggtcgagtgccttcacctccatcatcagaccaccactcgacctcgtcactcaacctggaagtcgagtatcttctgacaccactcgatcacatcactcgacccccaggtcgagtgccttcaccttcactgccagaccactactcgacctcatcactctaccgacgtcttcgatgaaatgtctgaaccactaattccagagattcgtgaccctgtaccaaggtattggttgcagggagcgttttggctttaacttgttgcttcgtaatgcttgttaggttaggtcttgtcaatggtgattgagtctgagactaggttagcttgagaatctctgttgcggtggcacttagatttggtgaatgaacttgttgtctagggttaatttattgagcatgtcaatcacctgtaaactgaggaaacgaaactactcaattaccccatccttaggaattctttgtctgattgattttattgtttactttactgctgtttactgcatcctgtcatctgttgtttagtttctgcaattctttaactgttactcgacctggtactcgaccacccagttgtctggcaacagactgtgcagtcgagtatccctgtttcattttcgacctgtcactcgacctcacccagtgctctgcaaagagctgtgttggtcgagtgttttactgtttctgtttgattttctgttttctgcatgttcacttaggactgctagaacacaccaaaacctgttatgcttggcttgacttagtgacttttgatcacatcttgattgttagcatcacacccatttagattgacaacctaaaatactacaacgacatgattggtgttttaggataattgactaaaaaacctattatcaatttggcgccgttgccgattgggtgtttgtttgttacattggcgatttcagacttgcttagatctagttctttttcaattttcttttcagttactaactgtgtgtttttcttgttgtcttcttgatccaggtacacctctgctgtatgtgaactcgatcaacaggcaaccagaacctccttttcaacgacaacataaccgctcgcgaactcagaaaaaggagaaccacagtcaaccctgtacctcagcaaccactcgaaatggctgacgaccagaatcaacaaaatggccctgccaacattggtgctggagatgcaccacgtgatcaccgtcagagcaaaggaattgcacctcctgctatccagaacaacaacttcgagattaagagtggtctcatctcgatgattcaggggaacaaattccatggtttgccaatggaggatccactcgaccaccttgatgaattcgataggctttgcaacctaacaaagatcaatggtgtcagtgaagacggattcaaactctgtttgtttccattctccttgggagacaaagcacacatctgggagaagaatctgccccatgactcaatcaccacctgggatgattgtaagaaggcttttctgtcaaagttcttctccaatgccagaactgcaaaactcagaaatgagatttctggtttctcacagaagactggtgaaagcttctgtgaagcatgagagcgtttcaagggttacaccaaccaatgccctcatcatggctttactaaagcctctctgctcagcactctttacagaggagtcctaccacgcatcagaatgcttctggataccgccagcaatgggaatttccagaacaaggatgttgaagaaggctgggaattggttgagaaccttgctcaatcagatggcaattacaacgaagactgtgataggaccgtcagaggaacagctgactctgatgacaaacacaaaaaggagatcaaagcgctgaatgacaagctggacaggattcttcttagccagcagaagcatgtgcacttccttgttgatgacgagcagtatcaagtccaagatggggagggtaaccagttggaagaagtcagctacatcaacaacaaccagggtggctacaaaggatacaacaacttcaaaaccaacaatcccaacctctcctaccgtagcaccaacgttgctaaccctcaggatcaggtgtatcctccacagcaacaacaaggtcagaacaaaccttttgttccctacaaccaaggtttcgttcctaagcagcaattccgggggaactaccagcaaccaccaccacctgggtttgcacctcagcaaaaccaaggccctgctgctcctgacgctgatatgaaacaaatgctacaacagctgcttcacgggcaagcctctggctccatggagatggcaaaggagatatctgagttacataacaagctggaatgtagctacaatgatctcaatgtcaagatggaaacactgaataccaaagtccgttacttagagggacactctgcatcttcttcagctacaaaacagacaagccaactaccaggcaaagtagttcagaatccaaaagaatatgctcatgctatcaccctgcgtagtggaaaagcacttccaactagggaggaaccaaaaacggtcactgaggacagtgaagatcaagatggggaggatttaagtctcgggaaagatcaagctgacaaaccactcgaccagtcactcgagcaaccactcgatctgccactcgacagcgttactcgaccaaccactcgacctgtcatcccagcagcatcaccaactgctccaaaaccagttgctgtcaaaaacaaagaaaaggtttttgtccctcctccctacaaaccgcagcttccatttcctggccgtcacaagaaagcgttcgcagacaaatatagagctatgtttgccaagaacattaaggaggttgagttgcggatacctcttgttgacgctctagcgctaatcccagactctcacaagtttctgaaagacttgattgtggagagaattcaagaagtgcaagggatggtggtattgagtcatgaatgcagcgctatcatacagaagaagatcattcctaagaagcttagtgatcctggttcgttcactctaccgtgctctttaggtccattggctttcaatagatgcctatgcgatttaggagcatcagtcagtctcatgccgctatctgtcgccaaaagattggggttcactcaatacaagtcctgcaatatatccctcatcctagctgacagatcagtaaggatccctcatggtttgctcgaaaacctcccaatcaggatcggtactgtggagataccaactgactttgtagtcctggagatggatgaagagcccaaggacccattgattctagggagacctttcttagccactgcaggaactatgattgatgtcaagaaagggaagatcgatctaaaccttggcaaagactttaggatgacctttgatgtcaaagacgcgatgaagaagcctaccatagaagggtaactcttttggatcgaagaaatggatcagttagctgatgagttactggaagagctggcagaagaagatcatcttaacagtgctttaaccaaaaatggtgaagatgggtttctgcatttggaaacattgggataccagaagctgttagactcccataaagcgatggaagaatcagaaccctttgaggaattgattggaccagtaacagaggtaatggtaatgagcaaagaagggtcaactcgagttcaacctgcactctcgaggacgtactcgagcaaccactcgaccttgtctaccgacgaatctagggagccgatcattccaacttcagatgactggtctgaacttaaggcaccgaaggttgatctcaaaccacttccaaaaggtctaaggtacgcattccttggtccaaactctacttaccctgtgatcattaatgctgagttaaatagtgatgaagtgaacctgctattatctgagcttagaaagtataggagagcaattggttattcattatccgacattaagggaatttcacctagtttatgcaaccataggatccatcttgaaaacgaatcctattccaacattgaaccacagaggaggttaaatcccaatttgaaagaagtagtgaaaaaagaaattttgaaactgcttgatgctggtgtatctaccctatctctgatagtacttgggtttctctagtgcattgcgtccctaaaaagggtggaatgactgttgtcaaaaatgaaaaagatgaactgatccctactagaactataactggtcatagaatgtgcatagattataggaagttgaatgctgcatctaggaaagatcattttcctttaccattcattgaccaaatgcttgaacacttggctaatcatccatattattgctttcttgatggatacaatggtttctttcaaataccaattcaccctaatgatcaagaaaaaaccaatttcacgtgtccttatggaacttttgcctataagagaatgccatttggtttatgcaatgctcctgcaacatttcagaggtgtataacctctatattttcagacttaatcgaggagatggtggaggttttcatggacgatttttcggtctatggcccctctttctcctcatgtttgttgaatcttggcagggtattgaccaggtgcgaagagacgaatcttgttctcaattgggaaaagtgtcatttcatggtgaaggaaggcatagtgttgggtcacaagatatcagagaagggtatagaggttgacaaaggaaaagttgaagtgatgatgcagttgcagccaccaaaaacggtgaaggacatcagaagcttccttggtcatgctggattctatagaagatttattaaagacttctccaagatagccagaccgttaaccagactattgtgcaaggaaaccgaatttgaattcgatgatgactacctcaaatcctttcaaaccatcaaggatgctttggtatctgctccggttgttcgagcgcctaattgggactatccatttgaaatcatgtgtgatgcatcagattacgcagtaggagctgttttaggccagaaaatagacaagaagcttcatgtcatatactacgccagccgaacgttggatgacgctcagggaagatatgcaacaactgagaaggagcttctagctgttgtattcgcatttgagaagttcataagctatttggttggatcaaaggtaactgtcaccatgcagctttgaggcatctgtatgccaagaaggatactaaaccaagactgttaagatggatacttttattgcaagagtttgacatggagatagtagataagaaagacattgaaaatggtgcagcggaccatctgtcaaggatgagaattgaagaaccccttccgatagacgattcaatgccaaaagaacagctcatggttgtagagttcttcggaaagagctacagtgggaaagagttccaccatctgaatgctgttgaaggagaatctccatggtatgctgatcacgtcaattacttggcatgtggagtagagcctcccaacctgacaagttatgaaaggaagaagtttttcagagacatacaccattactactgggatgagccttatctttacactctctgtaaagataagatctacaggagatgtgtctcagaagatgaggtggaaggtatcctgctgcattgccatggctcagcatatggtggtcacttcgcaacgttcaagacagtgtccaagattcttcaagcaggcttttggtggccaacaatgtttaaggacgctgaggagtttgtttcgaagtgtgattcatgccagagaaaaggcaacatcagcagaagaaatgacatgctcagaatccaatcttggaagttgagatctttgatgtatgggggattgattttatgggtccattcccatcttcatacggtaataaatatatactggtcgccgtagactacgtatcaaagtgggtcgaagctattgctagtcctaccaacgatgcaaaagttatgctgaagttgttcaagaccataatcttcccaagatttggagttcccagggtagtaatcagtgatggcggaaaacatttcatcaataaggtttttgagaacttcttgaagaagcatggagtaaagcacaaggtcgccactccctatcatccacagacaagcgggcaggttgagatctccaataggaagataaaaacaattttggaaaagactgttgggattacaaggaaagactggtctgcaaagctagatgatgcattatgggcttacaggacagctttcaagacccccataggtacaactcctttcaatcttctctatggaaaatcatgtcatctacccgttgagctcgagtacagagcaatgtgggcggtaaaacttctgaactttgacataaaaactgctgaggagaagcgattgatccaactcagtgacctcgatgagatccgtctagaagcttatgaaagttctaaaatctacaaggagagaaccaagcttttccatgacaagaagatcatcactaaggatttccaggttggtgatcagatgctgctattcaactctcgcttgaaactctttccaggaaaacttaaatctagatggtctggccccttctgcatcactgaggtccgtccttatggagcagtcactctagctggtaagagtggagattttacagtaaatggtcaaaggctcaagaaatacttagcagaccaaatccttccagaggtgacatcggttcatctccaggagcttcttgatgattaaaggagtaaaggagtcaagctaatgactttaaacaagctcacttgggaggaagtcccatgactatccttgtaaataatttttactttcttgttatttttgatttgttttagttgtgtttgtggttttcagagacaagagaacaacgcggagatagagtaaaaattcaaaactgttactctacagaagacctggagatcgagtgtacagcccgtttggagtagaaaattttgaaaatcttttgttgcacctggagaccttgcactcgagtacattggtcgagtatctgtgatgtttaaaacccaaaaacttttaaatcatcattttactcgaccaacagaagctacagagacttgcagaaatttcctacagtttacagtaggttttctgcaaaaaatttctaagtcaacagagtgtggaccacgcgctgaggataagctggagagagaatctaaaactcaacctagaccactcattttgaagcgtcactcgacttctccaaatccactcgacctccctcttttttaatttcaccgccgacactctaatctctctacaccacaaatcgccatccaaagagctactcgatcctgcgaatttcactcgacccccgcgccgccgtcaccagctcatcccctccgtcacccgaccaaaccacttcactcgacctcgagaaagcactcgacccctgcaaaaatctactcggcttcttgttcgtgaattcagcagagccttctaacttcagagaagttactcgacctctaggtttcacgattcactccacctccacgattcactcgacctgctgtagcattccaactcgacctctgagaagatactcgatccaattcgtctaagctcaggaacagctcaggttactcgagtacagaattgtactcgaccaattcaatctatttcattgcctattgacaataattttggtttcattgctatctttgagactaacctattgacatttgagttttgagttctaaatctctacaggagaatcatgagcaattacagtggcagttcttctgttgatcctgactacaacatggatgagacagagtcgtcatcttcaaggccagagagagaacagagagaatatgaaagcttcagaaggaaagctgagatagcccgaggaaagagagcgatgacagagaggtacgagcttatagacgaagatctggaagacgaatacatgcctgaacagactcgcagagctaccaaacttctgcacaagcccgacgtattgcctactgaggaatatgttaggcttttcaagctgaatgagttctgtagcacgaggtatccttgctcgacctcacttgcacaactcggattgttggaagatgttcagcacctgtaccaaagttgtcatctggacactctgatggcttatccgtatgtagcgtatgaagatgagacaatacaattcctctccacgctgcaagtagagctctaccaaggtatgacctctgatgagttggattgtgaaggattgggattcttgcgattttctgtgtatggtcatgagtataggttatcaatcaagcgattggaatgattatttggcttccctagtggaacgagatctaagccaaagtatgaaagagaagagttgaaagacttgtggatcaccattggcagctctgtaccgttgaatgcttccaggtcaaagagcaatcagatacgcagccctgtcatcaggtacttccagcgttctatagccaatgtactctactccgagagattacagggactgtcactaactctgatatggagatgatcgcaatggccctcaaggaaactcttcgccaaactaagaatggcatgtccctccaaggtgaagtcaatgacacacctctctctatacttcttctgatccatctgtatggatacaagagctgggctgtcagcaataaccgcaagagagcacgaggcgctctgtgcataggtggcattgtgacaccgattctgatagcttgtggagtcccaatcatttctgctggactcgagccgcgagcaatggatatcgagcacctacgtcactgcgaattcctggagtttgcaatggttgacgacttccacaggttcaggtttgagcactctatagagaggagagctagcatccttctccctagccctgaggttacacagataatagagggagataacattgattttaggcctgaggttggacgcctctactatgagaacgctccgccattggatgaggatgatcttcttgaagaagctgcttcggatgggatggatgaagatagggcggtggagttcgacactagcatgtatcactttggtgaacatgtacctccagcgaggcagagcaagagcttgactgaagctcataagaataacagtaaattgcagaagtggtgcaagaagcaggacaagctgatcgccaagtgtttcaagcttctgacagataagctaagttgctcttcctccaccactgctattccacaggtacatcctcctctggagatgccatcgaggagaattgatgcacctgcgcacaggcctgagcttagcgagcagagagtcccacatgtccaggctaggcattcgtcattcgaatcccgggaacacaagagaaaaaggaagacaacactcactcgatctagcagcagatcacgcctcattcactcgaggagatcactcgaccgcggtgctggccgcagcagaaggagagaggtcaagtttcctcagagcggtgctggcgccacagagctgatgaggtcgagtacccacctgctggaggtgatacagaacaaggtggttcgtctatagcttgcgagcaatcgcaggcagccattgacgagcaactacgttcattcttcgactgaggtaagcgcctcacttcaccattgtattataccatctgttatgatttgtttcttcattttttgtttctgtgattggatttgtcctgagtactctcttccaagtttattcgcacagtggactgtgtgatttatgtttgggggagggcttcggaagtgtgtgttgcattgtgtatatttttgagtctgcattcatctaaggcatagaaaaaccaaaaaaaatttgaaaaattcagaaaatgatttcacaaaaaaaaaaaaagagtgttcatgtacctgcattacatttagtatcgagtcttgagtgtttcatttaggattgttgcatatgcataggggatgatgatgagatagccttgtaagcattttgattcaccggataaactcaatgccctcattgctagttgtctgttgcatagtcaatgaatttgaaaaaaaaaactgaaccatgcctagattgctctactagaccacactgtcatgaactgataccattccctatcaatttgaacctgaatctgatctttaattatcatgtctgcatcaaatttgaactcatggataccttaaaatacttggattttcttatttattttgatcactcttgttaatccaagtagctgactctccttattagagcagttaacccaaacccaaacctagactttctttcgagccctatatcacttgtgagtgtttgtgaggccttattccgattaagcttggtagaaagtgttaggttcgtaacgacagagatagtgtctcatgtagttctagttcgcatttttcggactagataggactaggtgggcacttatattttgggttgggatgtgtttaaaagaaaaatgattcattggtaagaaaaggtagaagactctaggtgaagtaagctaaagaagcagaaaaagtctagtacaggttttgggatttgtaaagaaaagaaagagttcttgttagctattgaagatgggcaaaagcccttggttttaaaatgttaaaaacaggaaccttagttgttaaagaaatccaaatccgctagatatatcaaagtgttgagaaagcttctcctagagttaagagaaaagaaaagaatgattagaaaaatggcttaaaagattcatgaatgcaaagggtagagtttagttcttgtattgggattggagatgggattaccattagagcttcatttgatgtactctgggtagataggatcttatcactgtatgcatagcttgggacttacctttagcattctactaaagcttaatcattttttgagagatacctgttactgaagcctattctgtaagggaccatctttgtctcttgaccttttaccttagccaaatgagttctttgatgatgcattgcttgattcacgttccagaactaatgaatgttaaagggattggtagatttgaaaacttgtgtaggtcgagcatatgagtcggattgattgattgatgaggcatggctaacgtttttaagtagaattcgatcttgcagcttagaactttcaacttggacattgatttcatctggtctatctggtgttttggctctcagtccccgctttcaaacctcacttccagcttgttcttgattgtttgcttgagggcaagcaaagactaagtttgggggagatgataagtgtgtattttgcatgttttgagcatccatttgtcatcattttagcatcatatcatcactgttttataccatttcacatcatttgtcatcactttgcatgtttaggatagtttttcatgcatgttgcatatttgcgttgatttcaggtgatttggagctgttgacgagctatctggaagaagcggacctgatcacgacaaaccactcgaccaagaggtcgagtaggagcttcaagatctcaagagaccactcgacccccatgtcgagcaaaggacatcaccacttcacttcaccactcgaccacgaggtcgagtgccttcacctccatcatcagaccaccactcgacctcgtcactcaacctagaagtcgagtatcttctgacaccactcgatcacatcactcgacccccaggtcgagtgccttcaccttcactgccagaccactactcgacctcatcattctacctagaggtcgagtatcgccatcacaccactcgactgcatactcgatcacaagcttcagagccttcttcattccgcacttaaccagacactcgagcacaaggaagaaaagaagactccagttattcactcgacctctcactcgaccagatgggtcgagtacagttcttaacccgtcccaatacttcgtcgttttgagtattagggtttcgggatatttggctataagtagcatgtacttcacattttcgcaaaagaagtttttacctagttttatttccgcagaacttgtgttctagactttttgtaatccagatttctctttatctattcagtattcagtatactgttgttcattctgttatcatcctgctgttacactgctgttatcatgtcttcaacctgttcaacgtttatgctttctgttatgatgtctgagtagtgaataggtttctgaggatgggttagagtagtgtagaattctcagtatgctaggtgattgagtattgattgataaatcccttctcaattagttgttcttaatgcctattgctttctgatcaactggaatttgagcccagacatttccgcgcccaaaaggtgttcgatgaaatgtctgaaccactaattccagagattcgtgaccctgtaccaaggtattggttgcagggagcgttttggctttaacttgttatttcgtaatgcttgttaggttagctctcttcaatggtgattgagtctgggactaggttagcttgagattctctgttgcggtggcacttagatttggttaatgaacttgttgtctatggttaatttattgagcatgtcaatcacctgtaaactgaggaaacgaaactactcaattaccccatccttaggaattctttgtctgattgattttattgtttactttactgctgtttactgcatcctgtcatctgttgcttagtttctgcaattctttactattactcgacctcgtactcgaccacccagttgtctggcaacagactgtgcagtcgagtatccctgtttcattttctgtctgttactcgacctgtcactcgacctcacccagtgctctgcaaagacctgtgttggtcgagtgttttactgtttctgtttgattttctgttttctgcatgttcacttcggactgctagaacacaccaaaacatgttatgcttggcttgacttagtgacttctgatcacatcttgattgttagcatcacacccatttggattgacaacctaaaatagtacaacgacatgattggtgttttaggataattgactaaaaaacctattatcagataacacagcctgcccaatcgcccccaaccgaacctacgttcccacaccagacggacgatctcgttgttcaggatcggcgcgatgaaatacgaaactatatcgcagatggcacaatcccgacggataagtgggccgcccgacggttacgtgcccgcagcgcgcagtacattgttggatggcaatcttcatcgttggaacgctgctggggtacttttctcatgtcttgccggtgacgaaaccttacaagttatgcgtgaaattcacgaaggcgctggtgggaaccattcaggaggtcgtgctttggcacttcgcatacgcaaacatgcccattattggcccaccatactctctgattgcagtaagtttgtcgccaaatgcaaaaagtgtcaaaggcacgcgcctattattcacgcaccgacggaactgttgcatactattgcgcctccttacccattcatgcgttgggcgatggacatcgtcggacctcttcatgcgtcccgccaaaagaaataccttctcgtcatgatcgactatttcaccaagtgggccgaggcggaatcatatgcccggatccaatcgaaagacgtccagaattttttttggaagaacattatttgccgccacgggcttccgtacgaaattattaccgataatggctctcagttcacttcacttcaattcgagggtttctgtgcaaaatggagaatccggctgagtacgtctacacctcgatacccgcaaggcaacggacaggctgaggccacaaacaaaactatcatttatggactaaagaagcgccttgaagaaaataagggtgcatgggcagacgaactcgacagtgtcttgtggtcacaccgtacttctcctcggcgatctaccggtcaaacaccattctcccttgcttacggtatggaggctatggcaccgtctgaagtcggcctccccacgatctgacgttctatgcttgtccacaattctgctctcaacgacaagatgctccttgccaacctcgacaccgtcgaagaacaacgtgacctggctctccttcgcatctagaactaccagcaggctgcagcaaaattttacaacaagaaggtaaaatcccgctactttgtcgaatgagatctcgttctacgcaaggtgtttgaaaataccgctgaaatcaatgctggcaagcttggagctcactgggaaggcccttatctaatcttcaaagtcgttaaactcgacgtttatcaattgttgactatggacgggacttcaattcctcgctcctggaactcgtccaactttaaacgctattactattaacactgatgtgcatcgctaccgcgacacactatcaccaccacgtcttatcatttccgcgtctcatcttcaaaaaaaaaaaaaaaaaaaaaaaaacacaacgaactacggatggcttgataccttcctaagggtacgtaggcagctcttcgcgttccacatgaatgcagtggcgaaataatccacatctttacttaggtagagaataaaagctgagacagcctcgcattagccagcaggcggcggaatcataataagccaagttctggcttgcacgttcttgccgaccttagagcatatacaggataagccggacaccagaaccgcacctatcaggtacgatgagtccgtcttgtctactgaacactaagcttgttgtttcggctaaaacatatacataatgtgtttcaaaaccaagtttaaaacgccaaggacatttcgccaaatgttagccgagatcaaccttgcatgaaaactcaaagataaaccgagcatatgaataggattaaccgagctgcagctcgcgcctaatgaatacaataagacagtcacaaatacaatatcaagtatgctaaacgaagaataaaccacaaacatcatcaataaagagagtcgtcaaatagcgcgatagtcaaagtccacacaaacatccgaaatacaacgcaaacccaacaaagggctaatcatacataacgccgatccgacaaagccacaaaagccaaaacgtcgaacaaagtttacaataccgaaagagataaaaaaaacagcataaaagcaacccccatcctcttgtcgcttcggaaggtcacaacgacctaagtaccaccaatcctcgcttcgccctcagccgtcgtcatcgctgcctcatcctcaacctctggaaaggccacgaggtcatcgtcaagaagatcggtaatcgcaaggtcatcaaccactttgccccacttatttttgtcaaccttaagctcgcacatagtctctccggggactgccaaaccgtttgtgatcaacttcttcaagagtttccgagaacccgcgacctgacattgcatgaaaagaggttcgtccgcaacgcgtttgtcaaggatatgcttccgtaaccgatcgatcctggctttataaagagcaatgtcatctttaaagcggctccgttcggaacgagtagtgcgaagggcatcgtcacgggaacttctcaaccttgattgctcagctcgaccaaaagagtccgactttttgagactttcagagagttccaagatttgcttctcgaaaccctcaatccttcctttctctgagttcaggttacgcaaacgagttgctgcagtaaattcagcgatctttcgttttgcctcaacggccaccatttcctcccttgcctctctcgcctgttcctcgagaaagttgtataacgcgtttccggtggcaatcgactgataataggagaaagagaacgaaaagttatcataacagaaaacgataaacgtgacaaagtaaataaaaagatagacgtacctgaacctccttacaagcccaagtctggtagagattcttcgctataggggattcaaccggagggttctcacgagacaacccgttaacttttctagcaaactcaccgcaataactcctgctgtccgaaaacggataacccttcctatcatagttgaatgaaaaggaatgatctacctcccgaatatcctgagttgagcctctctcatggacgacgggaaaagaatctcttgaactacctccatgagaaaccttactgcgcggggaagcatgaacactcaacggctcacggaaaatagctccatcctcggtaacagaatttgaagctatcttcctggcacgagcgtctaagagccgcatcgccctatcctcgctatcagaacccgaagctttcttcccaactcgagcatctgaaagttgtgtcgccctatcctcgttagtaatctgttggttagtctcgatctcgccactctctaaaaccttcgccaccacctgttgcggttggttacaacagcgggaacatcgacatccatcgctactgaactaccttcccgaacgtatcagcgtaaatcggaaactaatggctagcttttcccatctctgaagttgacggtgaatctgcaaaacaatctccataaaaaaaacatatcgagacaaattgacaaacgaacaagattttcaaagaacttacgagtttcaaacgagtcgataacgtctggccaatgcaaaggttttctcgtcctaacagctgcaagactcgcagatatccctccaaaagttcctcgaggttgaaaatcgtgcgctgcaaacaaaactaaacgcggtaagaaagcaacattcacgacagtcacatgagcataactaaaaagatctaccaggaaacatattccactcgcaaaaaagaacaaaacgtcaagatccgaaacagaaatctcggataactcaacgaaaaagaagtagagccgccaatccggaactttactcttcatcccttttaccaacttatggttaggtctagcgttcacttgacataatcccggattatcttttggggcagcaaaggtcgtagcctcttccaaaaggccggcatcaacctcaacttcacggtcggctcccaacatcatcaagccaactgcattgcaaaccgcagcaagagcgagctgggaaaacgcaatcctccgtcgaagacagtatcgtacgagaaaatcggggagaggaaaacgaagcccagcgtctgtaaagtaaccttcgtacatacagaagaatccctaaggaagtttccaaggacgttgatgcttttctggcaccattaccgtcaaaccatcgggaaaaatggattgatcaatcaagtgagtcaatctctttctagtgcataacgttgatccatcatcccgcggatcaggaacgaccaccgactcatcaccaagcggagtccatcttagagagcgaagtcctacgacaatagatctatgtggagtgtaaacaacgatgtcatcttcatcaacttctctagattccatctctctacggtaattttcaagctgactcaaagtttttcagataccatgagtggtaaccacaagatttgcctctagaaaacgctcaatgtctcccaaatttccatcgtcgacttcgccagaatactagactaaatcacgtcctccaaaatcatcaaccggcaacccgtcatttattccacgataagcatcctggttggtcccataaccattcaagtcacaccaaccacagtccatcgtcccaaaccggattctttggctgaaccggcaagctccaacctctaaaccaaaccggttcctcaccgaaccgtagtctcctctcttgctgaaccgaatttcttcttcctctaccgaaccgaagatctctttctctcgccgaaccaaagctcttcttcctctaccgaaccgaagatctctttctcttgctgaaccgaatttcttcttcctctaccgaaccgaagatctctttctctcgtcgaaccggagctcctcttcctctaccgaaccgaagatctctttctcttgctaaaccggatctctccttccaaaccgaaatgaatcttttcttcctcttcaccgaaccggatctcttcttccaaaccgaaccggatcttttcttcctcttcaccgaaccggatctcttcctcaaaccgaaccagctctatctcctctcaaatgccgaacgagctcttcctcctcaattgccgaaccagctcttcttcctcttcttacgaaccgtctcttcctcctcaactcacgaaccagctctttcttctcttctcaccgaaccagttcgattcaagcttctctcttcgccgaaccaagacgttctcgacgaaccacaaccaaggaagcgtgaacaagagaaaataaagagataagggagagagaatttatttaccgttttggtgaaatgatgcggtgagaaggtaaagagtaaaaaagaggagacatatatatagggaaaaattatgcacagtaaaatccttggaatattatccaccggaaagagttctgcactctgctaaaagcgtatccacggcgtaaaatcaccggagttccgcactcctaggaaaacgcgcgcaaagcgtagaaataaaaaatatataatattttacatctacggtgtaattttcgtttaggccaaatcgacatattccgattcaagaaatccgctcaccagactctacaaaattctcgcctgatgaactaaggggggggggcttattgttggacatgagcttcaccctcaacatatcatttggcccaaacagagacttaagtgtttaatgggcttgttgtctccaacaatttagcctattaaacgcaaggggcaaaacggtaatttacaggaggagcagaagaatctttaggttaagaggcttgtcctataaataatgcactattggcgaaatagtgacacagaagataatacccagagaatcagagcaatattcggactaaaactctttgtctttcggttcgtttttgttctcggttcgttttgtcttcggttcgttttgttctcagttcgttttgttctcggttcgttttagttcacggttcgtttttttctcaattcaagtcgtgttacgttgccgatcgatagaaatcacttgtaactattcaaccggcctgttgtttacccttctcgttcgtcagctaataaaagatacttcgtcttcccgaaaatcccttacttattcattgttacaacctcggtacaaacagcgtgccactagttattcaaagtgctactgtaaatgtgatataccaaaaatactcttaatgaaattacttacgattggtacaactaagagatgatagtacaactggttcaaacgatagattatgggacaagtggaacaaatggtattacagtattactaaacgataatagtacaactgatataatttacatataaataagaacaactggtacaaatggttttactgaaaaaaaagaaattttaattcaaaaccctaacaccgccaccctctttaattcgcctcttcttaacttgtttattgtttctcccgtcacctttcttcctagaagtttgtagactgtgttctttgtttcaccaaacgatttcgcattacaaaggagaaaatcatgaagagatattcatagagaagaagcatgaatagagatctatgctttgtgaatcttagaaatcaatggaaaagaaacatgaagagagatatatgaagaaacgcaaagagagattgatggaaaataaaatatctatggaaaataagagatctagagtttcattgtgaagatgatggagaagacgagaaatctaaaataatcaaaaaaaaagaagaagaagaagaagagaagaagaaggaggcatgaaaaaaaagaaagaagtgtagatatgttattggattggcaaaagaaaggataagaatacgtaaaaactagattaggttaaggggttttagtcttttcataattattgattaaatttctttaaatttaatttctaaaatagaagggatggcaaaatagaataagttttgcgagaaggtggcataatagcaattgttcctcttgagtttatcatcttatcatgaaggctgcagtcacttccgctaaacatctttctattattgatttcaaagacatatttcaatgtctttaaatctcatataatatatcaaaaggttttatgcaaaaaaccactcaaagtaatttttattttttgcaagtcaaacctccaaatcaaataaaggcatgtcaataccacgaaatcaaaagtcacccgcaatatatcctttcaatgtagttatgatgtcctcgatttcatcatcttgcgctattatcatgaatcccaaattttgtccaccaattgttctcatttaagggtttcgaattttatttagatttttcaccatctattttggtccacagattagttgagtgttgttgtcttcacctacacgttttcaattgcatataataaatttaaataatatgttatatggggacaagttcagattgaatgagtaatagaattagatcaggataaattcagatcgaatgttgaacaagataatatgttataactggatattttgttattttggaatagaatgagaaaaaatttaataatctaggtcggtgaagacaataatggtcaactaatctgtggaccaaaatagatggtaaaaaatataaataaaatctgaaacccttaaatgagaataattggtggacaatatgtgggatttatgatagtagagcaagatgatgaaatcggggacaagatctacacgcaatagatgaatttccaatcggggacaagatatggagacaaaaacgaaagttaattgtttaatctcaagagatataatgtttcttggttaaagcacacatatttcgagggaagagagataaataaagagggaaaataaatagggatgaaatataaatatagaagagataaataggcaagataaataagaaaggcaaattggtaatttcaaagactaaatgtggtaggagttgaaaggaaattgtaaatgtggtagattttgaaagaaattggggaaatttggtatttgttgtagttttctctttttttttttttttttttttgaatctagtgttaaattatattcaaaagtaaaataactgttttacatcaagtgcagcattttttgagagtttaagctaaatcaattacaatcctatttaatttaaataaattaaactcttgaagcaaaccaagtttgaagactagtgtcatatctcttgtctcccttgaacagaagtgaagaaagggttcagatcctctccatgtatcctcccattccgttctttccagattgcgtatataaccacctgaaatacataccgagctagaaacccttctacatgtttacgtcggcatgagagatagacgatgttcgtgtgccaatccgttgaaaaatgagacccaaaaatattccttgctagatttgtccatatggccgcaaaataaccgcattcaaagaagagatgatctcgggtctctagagtattattgtagagaatacaatgccctggagctcccacattccaatgcatcgtccggttccttgtagataatctgttgtgagctgccaaccaaacacagaaagagtatttaggggtaccttgagagaaccatacttctcgatgccaattaaccgtgggtgaaccggttctgagattatgccaagtatcttttgtagaaaaatgtgctctataaatatcattatcccctttacataacactatatctgctgcttccctttgattctcacaatgcaacacaagtgcattttctatatccataagcagatcttctctgtgtcgtcgtctccggcgattagcccacgcctctgccaccgtcatttgccatccaatacccatatcaacaacaccacgttcacctacaagatcagaaagacgacccaaggcacaccactgatcatgccaaaaggaggtcgtttgtccattcttcacttctactttaaacaacgagctcgccacttctcgatatttaagcagctttctccatatccatgatcctgaacttgaatgctttatggaccaaaaagatctccgttttagtaagttagcctcaatccatttaccccacaaagaattaccatgagagacaattttccaaatcaacttcagacaacaaacatcattcgcctcttttaagcaccttagtcccagtccaccctcttgccttggtttacaaaccacctcccaaaccacctttgccttctttcgattcatatccggacccgaccacaggaacgacgaacacagtttatttatttctcgaatacactctcgtggaagccgaaaagcagccagccagaaattacacaacctccacaaaactgaactaataaggttaaaccgacctacaaaggagagaaatcttgcagtccaagtgccaatacgtttcctgattttctcaaggagtggagagtaatctgcggctgaaagacgtttcgtaacaagcggaagaccgagataacgaacaggaagagaacccacttcaaaaggaaaattctctgcaatttgttgatgaccgtttgctggagagccggctaaaaacagagtagatttctccatactaatttttaaaccggaccaaacagcaaactcattgaaaactttaaccacaccctcaattgatcgaatcttgccatcagttaggatcatctgcaaaacttaaatgcgttagtccaatgttcttgcaaccaggatggtaaccaaactgttttacgcctgctgccttgtccaacattttagagaggacatccatactaatagcaaataagtatggtgatagagaacaaccctgccggagaccacgagtgctattaaaatagcccgctagttcgccatttacttgaaccgaaaaagaagcagtagtgatacacaaggtgatccagtgaatgaagatcggggagaaattcatagcactaagcgtattctgtaggattgagcattgaacagagtcaaacgctttcgaaatatcaacttttatagcacaacgagctgaaatggtgtccttgtgataatccttcactaactccgtggctaacaacaaattttcaataaggagacgatctttcacaaaagctgattggttgctggctatgaagttagggagcaataacttgagacggtttgcaattatttttgaaatgaccttgtagatcacattacaacaggagatgggtcggtaatccttcatttctttagcctcttgcttcttagggatcaaagctaaaattgttgagttgataccttttggtaagaatcctttcacaaagaaggattgaatcgctatagtgaactcagtaccgatgatatcacatgttgacttaaagaattccgaagtatagccgtcagggcccggcgacttatcgtttggcatagagaaaagcaccttttttatttcctcccctgacactagacgcgtaagcatcgcattgtcctgctcagaacatcgaaaaggtaatagagtttgtaattcctcaaccgtgatcccctcatagtcgtttggaacatgctgcaaaaactctcaaaagaatctctcagcttccatctttatctcctctgcatttgccgtgacaaccccatttggacactcgatctctctaattgagttctgtgcttcccgagtcttgactgctctgtgaaaactcttattatttttatcccctacatccagccagtgaattttcgatttttgcttaaggtatctctcctctaaacctgcaaccaaatcccatcgattataagcaatattttcttcttccatgttcctttgagaaggattttgcagattctgttattgcttttgacaaagctgctcaaaagcttcccttgctttgaccaccaagtttcccattgtgtccttggcgagattcctaattttcggtttaagcaactttagtttctttgagaaacgaaacaaagatgatgtagataaaaaaatcggttctgtctccctccagaagttatctaccattggtttaaactccaccatatccgctatcacgttaacaaacttgaatggctttctcttccttagcaaagtcgcatcagtggcaataatactaattcgacagcgcaaatggtctgagcacccccctgcctcaaacacattatatgactgtggaaaagtttgcgtccatttctcattgaccagaactctatccaacttctttaagatgagatcattttctctcttattacaccacgtataaactggaccatgagatgtttgatcggtaaaagagcagtaattcaccactgattgaaagtctctcatacccgacggtatgacaggattaacttcagctctagagtgttccgccatgtctaagatctcattaaaatctccataaattaaccaaggcttgctactaatgattggagagtcaaagtgatctctcaactcaccccataacacctttctttcctcagggaagttggaggcataaacaaaagagcaaaagaattc

SEQ ID NO: 1344 - DNA, 103098 bp, Arabidopsis thaliana
aagcttgttgtttcggctaaaacatatacataatgtgtttcaaaaccaagtttaaaacgccaaggacatttcgccaaatgttagccgagatcaaccttgcatgaaaactcaaagataaaccgagcatatgaataggattaaccgagctgcagctcgcgcctaatgaatacaataagacagtcacaaatacaatatcaagtatgctaaacgaagaataaaccacaaacatcatcaataaagagagtcgtcaaatagcgcgatagtcaaagtccacacaaacatccgaaatacaacgcaaacccaacaaagggctaatcatacataacgccgatccgacaaagccacaaaagccaaaacgtcgaacaaagtttacaataccgaaagagataaaaaaaacagcataaaagcaacccccatcctcttgtcgcttcggaaggtcacaacgacctaagtaccaccaatcctcgcttcgccctcagccgtcgtcatcgctgcctcatcctcaacctctggaaaggccacgaggtcatcgtcaagaagatcggtaatcgcaaggtcatcaaccactttgccccacttatttttgtcaaccttaagctcgcacatagtctctccggggactgccaaaccgtttgtgatcaacttcttcaagagtttccgagaacccgcgacctgacattgcatgaaaagaggttcgtccgcaacgcgtttgtcaaggatatgcttccgtaaccgatcgatcctggctttataaagagcaatgtcatctttaaagcggctccgttcggaacgagtagtgcgaagggcatcgtcacgggaacttctcaaccttgattgctcagctcgaccaaaagagtccgactttttgagactttcagagagttccaagatttgcttctcgaaaccctcaatccttcctttctctgagttcaggttacgcaaacgagttgctgcagtaaattcagcgatctttcgttttgcctcaacggccaccatttcctcccttgcctctctcgcctgttcctcgagaaagttgtataacgcgtttccggtggcaatcgactgataataggagaaagagaacgaaaagttatcataacagaaaacgataaacgtgacaaagtaaataaaaagatagacgtacctgaacctccttacaagcccaagtctggtagagattcttcgctataggggattcaaccggagggttctcacgagacaacccgttaacttttctagcaaactcaccgcaataactcctgctgtccgaaaacggataacccttcctatcatagttgaatgaaaaggaatgatctacctcccgaatatcctgagttgagcctctctcatggacgacgggaaaagaatctcttgaactacctccatgagaaaccttactgcgcggggaagcatgaacactcaacggctcacggaaaatagctccatcctcggtaacagaatttgaagctatcttcctggcacgagcgtctaagagccgcatcgccctatcctcgctatcagaacccgaagctttcttcccaactcgagcatctgaaagttgtgtcgccctatcctcgttagtaatctgttggttagtctcgatctcgccactctctaaaaccttcgccaccacctgttgcggttggttacaacagcgggaacatcgacatccatcgctactgaactaccttcccgaacgtatcagcgtaaatcggaaactaatggctagcttttcccatctctgaagttgacggtgaatctgcaaaacaatctccataaaaaaaacatatcgagacaaattgacaaacgaacaagattttcaaagaacttacgagtttcaaacgagtcgataacgtctggccaatgcaaaggttttctcgtcctaacagctgcaagactcgcagatatccctccaaaagttcctcgaggttgaaaatcgtgcgctgcaaacaaaactaaacgcggtaagaaagcaacattcacgacagtcacatgagcataactaaaaagatctaccaggaaacatattccactcgcaaaaaagaacaaaacgtcaagatccgaaacagaaatctcggataactcaacgaaaaagaagtagagccgccaatccggaactttactcttcatcccttttaccaacttatggttaggtctagcgttcacttgacataatcccggattatcttttggggcagcaaaggtcgtagcctcttccaaaaggccggcatcaacctcaacttcacggtcggctcccaacatcatcaagccaactgcattgcaaaccgcagcaagagcgagctgggaaaacgcaatcctccgtcgaagacagtatcgtacgagaaaatcggggagaggaaaacgaagcccagcgtctgtaaagtaaccttcgtacatacagaagaatccctaaggaagtttccaaggacgttgatgcttttctggcaccattaccgtcaaaccatcgggaaaaatggattgatcaatcaagtgagtcaatctctttctagtgcataacgttgatccatcatcccgcggatcaggaacgaccaccgactcatcaccaagcggagtccatcttagagagcgaagtcctacgacaatagatctatgtggagtgtaaacaacgatgtcatcttcatcaacttctctagattccatctctctacggtaattttcaagctgactcaaagtttttcagataccatgagtggtaaccacaagatttgcctctagaaaacgctcaatgtctcccaaatttccatcgtcgacttcgccagaatactagactaaatcacgtcctccaaaatcatcaaccggcaacccgtcatttattccacgataagcatcctggttggtcccataaccattcaagtcacaccaaccacagtccatcgtcccaaaccggattctttggctgaaccggcaagctccaacctctaaaccaaaccggttcctcaccgaaccgtagtctcctctcttgctgaaccgaatttcttcttcctctaccgaaccgaagatctctttctctcgccgaaccaaagctcttcttcctctaccgaaccgaagatctctttctcttgctgaaccgaatttcttcttcctctaccgaaccgaagatctctttctctcgtcgaaccggagctcctcttcctctaccgaaccgaagatctctttctcttgctaaaccggatctctccttccaaaccgaaatgaatcttttcttcctcttcaccgaaccggatctcttcttccaaaccgaaccggatcttttcttcctcttcaccgaaccggatctcttcctcaaaccgaaccagctctatctcctctcaaatgccgaacgagctcttcctcctcaattgccgaaccagctcttcttcctcttcttacgaaccgtctcttcctcctcaactcacgaaccagctctttcttctcttctcaccgaaccagttcgattcaagcttctctcttcgccgaaccaagacgttctcgacgaaccacaaccaaggaagcgtgaacaagagaaaataaagagataagggagagagaatttatttaccgttttggtgaaatgatgcggtgagaaggtaaagagtaaaaaagaggagacatatatatagggaaaaattatgcacagtaaaatccttggaatattatccaccggaaagagttctgcactctgctaaaagcgtatccacggcgtaaaatcaccggagttccgcactcctaggaaaacgcgcgcaaagcgtagaaataaaaaatatataatattttacatctacggtgtaattttcgtttaggccaaatcgacatattccgattcaagaaatccgctcaccagactctacaaaattctcgcctgatgaactaaggggggggggcttattgttggacatgagcttcaccctcaacatatcatttggcccaaacagagacttaagtgtttaatgggcttgttgtctccaacaatttagcctattaaacgcaaggggcaaaacggtaatttacaggaggagcagaagaatctttaggttaagaggcttgtcctataaataatgcactattggcgaaatagtgacacagaagataatacccagagaatcagagcaatattcggactaaaactctttgtctttcggttcgtttttgttctcggttcgttttgtcttcggttcgttttgttctcagttcgttttgttctcggttcgttttagttcacggttcgtttttttctcaattcaagtcgtgttacgttgccgatcgatagaaatcacttgtaactattcaaccggcctgttgtttacccttctcgttcgtcagctaataaaagatacttcgtcttcccgaaaatcccttacttattcattgttacaacctcggtacaaacagcgtgccactagttattcaaagtgctactgtaaatgtgatataccaaaaatactcttaatgaaattacttacgattggtacaactaagagatgatagtacaactggttcaaacgatagattatgggacaagtggaacaaatggtattacagtattactaaacgataatagtacaactgatataatttacatataaataagaacaactggtacaaatggttttactgaaaaaaaagaaattttaattcaaaaccctaacaccgccaccctctttaattcgcctcttcttaacttgtttattgtttctcccgtcacctttcttcctagaagtttgtagactgtgttctttgtttcaccaaacgatttcgcattacaaaggagaaaatcatgaagagatattcatagagaagaagcatgaatagagatctatgctttgtgaatcttagaaatcaatggaaaagaaacatgaagagagatatatgaagaaacgcaaagagagattgatggaaaataaaatatctatggaaaataagagatctagagtttcattgtgaagatgatggagaagacgagaaatctaaaataatcaaaaaaaaagaagaagaagaagaagagaagaagaaggaggcatgaaaaaaaagaaagaagtgtagatatgttattggattggcaaaagaaaggataagaatacgtaaaaactagattaggttaaggggttttagtcttttcataattattgattaaatttctttaaatttaatttctaaaatagaagggatggcaaaatagaataagttttgcgagaaggtggcataatagcaattgttcctcttgagtttatcatcttatcatgaaggctgcagtcacttccgctaaacatctttctattattgatttcaaagacatatttcaatgtctttaaatctcatataatatatcaaaaggttttatgcaaaaaaccactcaaagtaatttttattttttgcaagtcaaacctccaaatcaaataaaggcatgtcaataccacgaaatcaaaagtcacccgcaatatatcctttcaatgtagttatgatgtcctcgatttcatcatcttgcgctattatcatgaatcccaaattttgtccaccaattgttctcatttaagggtttcgaattttatttagatttttcaccatctattttggtccacagattagttgagtgttgttgtcttcacctacacgttttcaattgcatataataaatttaaataatatgttatatggggacaagttcagattgaatgagtaatagaattagatcaggataaattcagatcgaatgttgaacaagataatatgttataactggatattttgttattttggaatagaatgagaaaaaatttaataatctaggtcggtgaagacaataatggtcaactaatctgtggaccaaaatagatggtaaaaaatataaataaaatctgaaacccttaaatgagaataattggtggacaatatgtgggatttatgatagtagagcaagatgatgaaatcggggacaagatctacacgcaatagatgaatttccaatcggggacaagatatggagacaaaaacgaaagttaattgtttaatctcaagagatataatgtttcttggttaaagcacacatatttcgagggaagagagataaataaagagggaaaataaatagggatgaaatataaatatagaagagataaataggcaagataaataagaaaggcaaattggtaatttcaaagactaaatgtggtaggagttgaaaggaaattgtaaatgtggtagattttgaaagaaattggggaaatttggtatttgttgtagttttctctttttttttttttttttttttgaatctagtgttaaattatattcaaaagtaaaataactgttttacatcaagtgcagcattttttgagagtttaagctaaatcaattacaatcctatttaatttaaataaattaaactcttgaagcaaaccaagtttgaagactagtgtcatatctcttgtctcccttgaacagaagtgaagaaagggttcagatcctctccatgtatcctcccattccgttctttccagattgcgtatataaccacctgaaatacataccgagctagaaacccttctacatgtttacgtcggcatgagagatagacgatgttcgtgtgccaatccgttgaaaaatgagacccaaaaatattccttgctagatttgtccatatggccgcaaaataaccgcattcaaagaagagatgatctcgggtctctagagtattattgtagagaatacaatgccctggagctcccacattccaatgcatcgtccggttccttgtagataatctgttgtgagctgccaaccaaacacagaaagagtatttaggggtaccttgagagaaccatacttctcgatgccaattaaccgtgggtgaaccggttctgagattatgccaagtatcttttgtagaaaaatgtgctctataaatatcattatcccctttacataacactatatctgctgcttccctttgattctcacaatgcaacacaagtgcattttctatatccataagcagatcttctctgtgtcgtcgtctccggcgattagcccacgcctctgccaccgtcatttgccatccaatacccatatcaacaacaccacgttcacctacaagatcagaaagacgacccaaggcacaccactgatcatgccaaaaggaggtcgtttgtccattcttcacttctactttaaacaacgagctcgccacttctcgatatttaagcagctttctccatatccatgatcctgaacttgaatgctttatggaccaaaaagatctccgttttagtaagttagcctcaatccatttaccccacaaagaattaccatgagagacaattttccaaatcaacttcagacaacaaacatcattcgcctcttttaagcaccttagtcccagtccaccctcttgccttggtttacaaaccacctcccaaaccacctttgccttctttcgattcatatccggacccgaccacaggaacgacgaacacagtttatttatttctcgaatacactctcgtggaagccgaaaagcagccagccagaaattacacaacctccacaaaactgaactaataaggttaaaccgacctacaaaggagagaaatcttgcagtccaagtgccaatacgtttcctgattttctcaaggagtggagagtaatctgcggctgaaagacgtttcgtaacaagcggaagaccgagataacgaacaggaagagaacccacttcaaaaggaaaattctctgcaatttgttgatgaccgtttgctggagagccggctaaaaacagagtagatttctccatactaatttttaaaccggaccaaacagcaaactcattgaaaactttaaccacaccctcaattgatcgaatcttgccatcagttaggatcatctgcaaaacttaaatgcgttagtccaatgttcttgcaaccaggatggtaaccaaactgttttacgcctgctgccttgtccaacattttagagaggacatccatactaatagcaaataagtatggtgatagagaacaaccctgccggagaccacgagtgctattaaaatagcccgctagttcgccatttacttgaaccgaaaaagaagcagtagtgatacacaaggtgatccagtgaatgaagatcggggagaaattcatagcactaagcgtattctgtaggattgagcattgaacagagtcaaacgctttcgaaatatcaacttttatagcacaacgagctgaaatggtgtccttgtgataatccttcactaactccgtggctaacaacaaattttcaataaggagacgatctttcacaaaagctgattggttgctggctatgaagttagggagcaataacttgagacggtttgcaattatttttgaaatgaccttgtagatcacattacaacaggagatgggtcggtaatccttcatttctttagcctcttgcttcttagggatcaaagctaaaattgttgagttgataccttttggtaagaatcctttcacaaagaaggattgaatcgctatagtgaactcagtaccgatgatatcacatgttgacttaaagaattccgaagtatagccgtcagggcccggcgacttatcgtttggcatagagaaaagcaccttttttatttcctcccctgacactagacgcgtaagcatcgcattgtcctgctcagaacatcgaaaaggtaatagagtttgtaattcctcaaccgtgatcccctcatagtcgtttggaacatgctgcaaaaactctcaaaagaatctctcagcttccatctttatctcctctgcatttgccgtgacaaccccatttggacactcgatctctctaattgagttctgtgcttcccgagtcttgactgctctgtgaaaactcttattatttttatcccctacatccagccagtgaattttcgatttttgcttaaggtatctctcctctaaacctgcaaccaaatcccatcgattataagcaatattttcttcttccatgttcctttgagaaggattttgcagattctgttattgcttttgacaaagctgctcaaaagcttcccttgctttgaccaccaagtttcccattgtgtccttggcgagattcctaattttcggtttaagcaactttagtttctttgagaaacgaaacaaagatgatgtagataaaaaaatcggttctgtctccctccagaagttatctaccattggtttaaactccaccatatccgctatcacgttaacaaacttgaatggctttctcttccttagcaaagtcgcatcagtggcaataatactaattcgacagcgcaaatggtctgagcacccccctgcctcaaacacattatatgactgtggaaaagtttgcgtccatttctcattgaccagaactctatccaacttctttaagatgagatcattttctctcttattacaccacgtataaactggaccatgagatgtttgatcggtaaaagagcagtaattcaccactgattgaaagtctctcatacccgacggtatgacaggattaacttcagctctagagtgttccgccatgtctaagatctcattaaaatctccataaattaaccaaggcttgctactaatgattggagagtcaaagtgatctctcaactcaccccataacacctttctttcctcagggaagttggaggcataaacaaaagagcaaaagaattcttcatcactttctgctaacttagctgcacatgttatcatttgaccacttttataaaaaggagtcagccgaacactatctctccacagaacccaaatacgtcctctgctattatattcgtaatttgtcaaaagtgaccaattcgaaaataacgtactactcacccaagacatcttactctcctttattcttgtttcaagcaaacaaccaaactgaaatttttgaccttctaaccacttttttacaacggaatgctttgatgatttatttaagcccctgacattccagaaaaaactcgacattaatgatgatgaggagggatcttattgccttgatcccggacaggctctttcttcaaatgagtatttccctgagggatcactttgtgagcagtttttgatccccgtggctgttgttttcttgtcgggtgagatgactttgggcaacggtttctcccacctaccccagaaatgtcacttgtttgaaaatctgtttccactgctttctctgttaccatactttgtcccacaacatttatctcacttgttgtagtcacaactatttcgtcctcccttatgtcctcctgaacactaagaggagcataaggattcgataataatgagacttccccaaattttaaaacctcactgtttttcatcggactctttgtggtcttcagcggagatatccaaccttgatctgtttttgtattggactgtaccttagtttccagagcaacactcaccccagactgagatgggagattgttaaacaattcctcaaccacctttgttgacacatgcgcttcctcaacaacaattttttgtggctccttctcagacactggagaattgttcagagtcgatgtaggcttctgcttttccagaagacatgaatctcgtaaatgtccccacttcttacaaacctgacaatgtggcgaaagccaagggtaggaatagtgtatcacagcatccagctctccttcctcttcaccggacaagatatactcctttggtagatcctttgtcaaatccgcttcgactaaaatcttagcctcctcaaaactttcacatgcttctgtttttggatgtaagcgcaccggtttacctacaacacttgcgagaaactcaagccctttgtctgtaaacattgttaacggaacgtttgaaagagtaacccatagcggaatggatttcaaagccggttgaacatcctctgagtatggagtccattttgatattatcattggaagacccatgatattccacatacgcctattcagaattctatgtctcattgcttcattccgaacacgaaacttaacagttgattcattaacctccaacacgtctattaaagtggacttgtcacccagcctccaaattttattcacgatcatgtggattttgccaacatgcggtgcttttgaatttagaatattcccaaccaaaaaatcttcccaaagtggttttgcacccaaaaacacctcctttggtacaaccactttttcctgtccatcgacttctacaacttcgaacttctgttttgtgaaagaccgcttttgcgccgcttgcaaccaagatttctttgttacatgcgacgttcctcgactagcctctgaagtagcttcctgagactccccaacacctaaaatcgacttccctaaaaccaaactgtcactattagatcccaaaccatcctccttctgatgactctcaacaatcttctcaggaccatcgatttgcttgtgaacaaccacgcttagatcagagatctgcagtaaacctttctccccagtcaccggcggaggctgagaagccaccagcggctccatacttgctcgagacgcaaagaaaccctaatcgcttttgaaatcgccctccacgtcagcagagacaaaagtttaattattatagctcttttgttgtagttttctcaatattcaaatatacttatttaattaacttaagaatgtaagaatgtaacttaaagtgacaacatcgacacataatgtttttcaatccatttaacaagacattctacattagataaatgcatgacaaatccaagataatttgttcattaacaaaatcttcgtgacaaataatacacatcatgtcggtttttatacgcattgcttttatttgctatgaagattaacatttgcaaataatcaattcaattaaagtaacatgttttggtatatattctaggccggaatcaaagaaacgtgaattgcttcttggtgcaaaatatcattatcgaaatagaaatcttgatcaaaatgcatcgttaatgaaaatattaaaatgcattaaggtgagtatttagttgaaaaagtaagttcactagcaattaataaggatgaaattccttttaatagcatgtacttctacaaattttaggctttcatccataatcgattaaaattcttttcttcttacaaataaatctcgcgaaataaaatcaactacattcaaataaaataacttgaattatatttggaattataacagtcaaaccgccgcaagcattactctaaaggttcgtcgacattaaagctagaaaataatatttaataccatttcaaataatctttaaagattacaatatgcaatacaaaagaaaaaattatgctattatatttcattataaaataattgatcaaatgaatccacacaaaatttgacaaaatacacacaattttaatttattagtacctaaatccatccattctcaatatataacacaataagataaataaacatgtatttggtactcaaacatccataaaataaaataacatattttataagaaaataccctaaaaatatagaataaacatggggatgaaagaaatatgaattatgtttttctcactgaaaataatccatttatagggattgaacaaggcatgattcgaaatctaagttttctaacatagtaatgataaaagcatttgtttataagcaaaatcctttagaaaaaaaatagaaagtcgcaaatctacatattttataaaataaaacataaattcagaagatttattttttttcaaaatttaaaagaaaacttacaaaatagaaaggaataagaattttgatagatatttttaataaaaagttgtgattttcatgaaggatatatattaaaatgataaatattgtaggggtttaatttaacaaacttatctcttctaaactatgtaattattagtttgggttcttgaccaaaagtcacttctctaaattttactacggtatattattcaaatcaaattaaaataatgatataaatttgtaacttatttttggatgttgtcgagctacataatttggggaattatgtcatataattagtatactttaaaaaatatatataatattaattatattcaaagaaaattaaaagcttttttataaataaatgtaaagtgttttttaaaaagctatatcctactctattatttggggagttcgttttagaaataaaattgattttattaattaattacatattaatgccattaaaaaatcaattcaaccttagtttctaaaaacaacaatatctatctattaaacacacgggtaaatgaataatcaaacgaatatttttctaataggtatataccatatatttctacgataatcttaatagtttactttaatccaaaatcttcaaaatcttaagaaatatttttctacaataatcgccatatggcccatatcttcctcttaacagattatattctattcaacaaataatattccttctaccataaattgaatttgaaaataccataaattgtaagaaacgggataaattatattctttttcatgataaacacatagatattattaaataaaagttaagttaagttattcgttgtgcctgaatatataaattctcaaacgttttgcattttctcacaaagatacgtttgcaattatttgtcttgctatatcttcctcttaacaaataatatttcatataacaaatattattgcttctaccagaatatttcactaactaatttatgctaacaaacttatcaaatcgaagatctctatctatctaatccacccagcacttattataaataaacgtccagagtaggaataccttcacgatgtcaatgtgccttctctcataaaccaattcattactcactacaaaaccaaacaaaatgggtgaagtgagtccatacacagctatcaaaaacttgaaacatttcaaaacctcttggtgtattcaagttaaaattcttcatgcgtgaaatcattataccaagggttctcggatgtcttatgaaatgatgttagcagatgaggatgtaagtattttaggctttacaagttgtctataatcttaatggttgtcttttattgttttcagctctcgcattcacattttcttatgctattttcagggaaacaaaattcaagcaggaataaaaaagaacatctactcaaactacagaggtatgtgaagataggagactggaaaatcatcgaggaattttcagtgactaaggcgacatgactataccgatcaacaactcatccatacagaataaatatccaaagctctactcgattctccaactcttcaacaatttcagacgagatttggcttgatttggtgaattttaatgatgtgctaagtggaactttagatcaaaacaagctggttggtgagtgaaatttccaatgatgaactcttttagtctttgtatatataacatagattagttattactctcatttattgactttgtatattactctttatatagatgtaattggttatcttgtgaatgttggaaaaatccaactcttggatgtacaaggcaaacctaccaaccagatgatgatttccttaattataatgtaggttatgccgaggagaatggtaccaatactgatacagatgaagatgatgactggtctgattatcataattcatcagaaagtaagactatatatgtttactttttccgtctctaaaagatattctcatttaataactatcatgttcaaataataataggtgactatgaagagaacttgcaagaagatttctattggagcagccaagaagaatgttcttcatattcatcgttagatgaagatgttaatgctgaagatatggctcaaatcccagatgacattatttatgaagcaaaagataaatttgacatacttaatatgttagagaatgcttttggaaagcctaagtcaaagcctgtgattccacctaacccaaaaagtggtataatcttcattttaactcatttattagtttccaaagctatagttccgatagggaaactaattttatgaacttatgttttgttcagcttatgtcgatgaaggtgatccagtttacagttgtgacaagtgtggtgctattttttggtatggggaacgtttaaacaagaggaggaattcaagaaatccaatatattcaggatgttgtatgcaaagacagatcgtattgccttccctgaaggaatcgcctgaatttttgtggcatttggttacaagtgatgatgaactcgctaagcattttagagaaaatatcagagcttacaacatgttgttctcattcacatctataggggtaaagtagatcattgtcttcctaaggatcgtgggcctaacatgtttgcaatacaaggtgaaaattactatctcatgggtgctttgaaaccaaaatcaggtgctaaagcaaagtttcaacagctgtatattgttgatactgaaaatgaggttaagaacagatataacataatgaggtatcttctattttattttcaatctttacaactatacaattcagtactacatcactaaactaatttgtttctctattattcagcaatgagaacgaatctgaaaacggccagaagaagaaaaaaatcatgaagcttttaaatcgggtaaaccctcatgtgaaggcatttagatatgcaagagacagatttaatacagatgcgcaagaaagttttcacatgagaattattgctgctcgaaaaactgacccaaggatatacaatctgcctactgcatctgaagttgctgcattaattccaggagatttccatgaagacatggataaacttgatattgtgttacaggaaactacttcggggaagttaaaaagaatcagttaactacatgtttcctacctagctttgcaatatcctctattattcgcacgcggggaagatggttatagacttggcataaagaaagctagaacaaatggtcatggcgatggaaaaaaagaacagaaagacgtaagcatgagacaatggtttgcatatcgtctacaagaaaggaaggcggagaaacacattttatttcgttctaagcgtttgctgcagcagttcatagttgatgcttacactatgattgagtctaacaggctgaggtatattaagaagaatcaaccaaaattcagaagttctaccagagaaccaattcagaatgcatcgaactctggaaacaatgatttggaaaaccaaggtaaagaagttaaaattccagcttcttttacaggcggaccaaggtacatgacaaacaactatttggatgcaatggctatttgcaaacactttggatttccatcacttttcataacgtttacttgcaatccaaagtggcctgaaatagttagattctgtaaagagaggaacttgaagtctgaagatagacaagacatcatttgtcggattttaagatgaagcttgataatcttatgcatgatctaaccatcaaacacctacttgggaaaacagtttcaagtatgtataatttcaatctgatagctatagtattactcgtgtgattttatataaacgttcctgtcaatattaacatattactacatgtatttttcattttgggttatataatcttgaatcctactattattatataaacgttgctttcgagttaaaattaacctttaaaatatcttgatgacccaaacattgctcctaatctctttgcttttattcgtgaaatatatttaaatgggtaatagtatgcaacaatttaaattcaaagaacactactgtttcattactctaatggagacttagttaaagacggcttattgagaatattaaaaatctaaagatacaaaaaaatctataatgctcctaactggtcgctgaaaattattcaacattttttattttttgtaggcatgtacacaattgaatttcagaaaagatgacttccccatgcacacatattgttattcatgcatcctaccagtaagttgtctacagccgaagacactgacaaagttataactgctgaaattcctaataagaaaaagaaaccaaagctgtatgcagtggttaaagactgtatgatcatggaccgtgtggtgttggtcatccgaattcaccatgtatggagaatggacaatgtaaaaagtattttccaaagagctattctgacactactaaggttgataatgatgggtttccagtttatagaagatgtaacactggtatttacgtcgagaagaacggttttcaatgcgataatcgttacgtcatcccatataatgaaaagctatctctacgttatcaggctcatattaatgtggaatggtgtaatcatccaggttcaataaaatatctttttaagtatgttcataaaggacatgaccgtgtaacaatgactgttgagccaaatgaccaagatactgctaaaaaggagaaggacgaagtgaaggattactttgattgcaggtaatttctttagtatttgcattacttttagacacataaagtaattattatatctcacattgttaattgcagttcttttttaattataacaggtacgtttcagcttgtgaagctatgttgagaattttcaaatttcccatacactatagaacaacaccaattgttaaacttttctttcatgaagaaggaaaacaaccagtttattataaaccaggtcagacatatatattgtattgacgtccattatttgggaagtatgatgacacatatataaagttttattctattaaacgtttgagactataatgactttatatacttctaccgaatttggagatgaattgtgctagccgaatagtaaagttattattttattatcacgttatacatagaatgaatttttatttggttgtgtagaagagtttattttactattgtcttaaacatggaatcattttgttttgtttgaaattatcataaactatgtacatgtaattaagataatattggtgtagcatccgcataatggaatcattttaaaggaatcattttgtttagatataaactatcataacctatgtatgtgtaattaagatattgttattgtagcatgcgaaatattattaaacaatgtacgtgtaatcattttactgtcaccacttcgtaaaaatagaaacatgatacaatatataatattattaaacaatgtacgtgtaatcattttaccgtcaccacactacaagaaatatccacattgttagcatgagagaagagctattaaatgtcatcaatagcgttttcataaacgctatgttatgcccctgttatgatagaccccttatatacaatatcattctattatgctattatatgtcgttctattataacactaatcaattgttttaatatactttcttgtagcacatatttagtgctgttttatattgtttcattacacatttattcgatgttttgttatattgtgtcgtaacacttttattttgctatttgatttatgtaatttttctatttttaccctattttacagaatttattaaattagatttatcaataaatttatatttcataaatcatcaacatacataatatatatatatatatatatatatatatattgtattaaccaaaacaagtcttacataccatcataccaatacaaatcttataccaatatcataattaagtgtcgccaaatattaacaaagagacataattcttgaggtgaactaggttaaaagagtaaaagcaagcaactttgaatggtgaaggaaagagatgaacttcttgaagccttactagcgttctcctgttcctctgccaatgctcaagctgattaaggtttccaagaagtgcataagtgagggttgcagagatgagatgattaagctctccaactgaaaagctcattaccaaagtgaagacaatcaacatctaatcaagcaatacatcaaaactgttgaataatcttagtcacaacatcccatgtatgatctatcttacttttatagcttcacattcttagataaaacatcaatgtgataagaattcatgaagatagagatgtaataggagaatgaaagtttacctcagacattaatttcttgagaatctcttgcttcagcagctcttctcttgtcaggtcaaggtcagataatttattggtctctggttcaccttaagcactgaataatatatataaagtcaccttagcttcaaaagaaacaagaatatgccacagcttcacacacggatagaacctatagatagaaaagtaggagattcaaacaaaccaacgttttgatttttactgaccaagttttatttacagtagcagactaaaataaccagacggattagtatcgaaaagaaaaacataaacaaaggtgaagccagaaatgcagagaaacattacccaagatctgaaggaagtctgactccacctatacggacacgcttcaatgaatcaacctggaacaagtcaaggcataaagaattagaatgagtttagatacacgtaaaagagatacaagtctattaaaggcaaaagtgaaacgatttggaaatctctcttatcattcagtggatgaacataaatcaaatctcataatacaaaatttgcaattccaacgttagttcaccaatgagtatgttcacaagaaatggagtattgataacatattaagccaatgttatttttagactattatggagctcttattctaattcgagaagaagggaagaccaaaatatgaaaggagacattttcactggaaaagaagaaagctgacctcaagcccaacatttttcactaattccctgacttcatgatttcttccttcgtgaacctgcacagatccacacaatacatgttaattcagctgaaacaaatcatgcaaccaacatcaataggttagatagtgttaacgcgtttggtttatgaacctataaaattgtcaaataaaaaaactacgacactatttttagtagaaaaaaccacaatcttcagaagctatacaaggtaggggaagttatatcactggatttcagtaacatagtttgaagttaggtcaaaactctggcagtcagaaataaagagaatcctaaagtctagataatgtatgtggagatactttgtcgttcctatacttaaaaatccaatgtgactacgatatgtctcatctaattttttacaagataatctaggactagcaaacagcataaggactggtgacaccttttagaatctataacaacagagaactttaaaactgagaaagctttggaaaagtaccactatacgcagccatgctcttggtatatcatgctgctttggcatcaactcaactaaatctgggacacagtggattccttccaccattgtgccttcactgattgccattaagtgtcgtttgtgtatatcacctacaaccgtggtaatatatctgcaattttaaaaacgaaagataataagagctacaaaacctttgaactacttagacagaacataaatgttcaaggaaacaaacaaccgttccttatctctatttctccgatccggttcaagatctcgttcacgacggtcacgctcacagttctctctcactctctatctctatccctatggcggtgtcgatctcgccatctatctttctccatgtcgcagtcacgacggaatggacgcgaaatgagcggtggagtctaaaagacctagctctcatttgggggaaaattgatgatgaagatggtgttcctccggtgacgacggaggctacgaaggtgtttttggaagggattgtgtctcttgtgtagagaagagtgaggaggaacacgacggtgaagaaagtgacctagatctgatttggggattttttgttttctactgttttgttgttgaggggaaagtttttttttttttgcttggggtatatagattgtgagactaaaaattttttggatctgaaaatttatggcgcttaagtgaatttttcatcgaagtattggcggaataagtgatttcagctttcggtttagtgatttttgatcttagccttgtagtactgctattatatagtaatgaaaaagtaaaattcatttttcatagcagtgacggaaaatgagctatcgtcatatgctatcaatgtagatatttcttgtagtgggccacttcgtaaaaatagaaacatgatacagtatataatgttgttgtagcatgcgcataatggaatcatttttttagataaaaattatcataacctatgtatgtgtaattaagatattgttatattctaggtgaaacaacggagagtgtaatagatcgattaagttacgaagcaacacaatttttagcatggtttcagcttaacaagaagcctccaagtagaacagtccgtgctaatgccaaaaaactaccaaaagcagctccagatccaacaacgctcttatttgaagaattccaaatcacttcacttggaacagcaaagaaaagaaattcatgatcagagaaaggggatttgctattggaaggattaactttgttccacggacaatagaagatgcttattatttgagaattctcttaaacatcaaaagaggtgttacaagttagaaagatctaaaaactgtgaaaggtgtagttcacaaatcattcagagatgcggtttttgctttaggcttgcttgacgatgacaaagagtacatcaacgcgattaaagatgcaaatttttggtgctctgccaagtatgttcgtaggctatttgtcatcatgctactttcagaaagtttaaccaaaccagagatggtatgggacgaaacctggaggattctatctaaggatattgagcgtagaaaaaaaaaagaatggaagtgaccaggtctgtctcttcaatatatatatttaattatatataaatcagattatatgacattaactattcatagacatttatattagttgtgtgactaacgttcaatgtctttataaatgttgcagatcttcagctaagtgatgaggaaagacaacaatattgtttgcaagagatagccaggctacttaccaaaaacggagtttcactttcaaaatggaacagatgccacaaatttcagatgaacacgttgaaaaatgcaaccattttatattagatgaacgcaagtacgaccgtgcatatttgacagaaaagcatgaagaatggttgactatggtgacttcagagcaaagaagatatatgatgagattatggatgttgtgttacatgacagaggcggagtgttttttgtttacggttttggaggcaccggaaaaacttttctatggaaattattatctgctgccgttagatcaaaaggagacatatcattaaacgtcgcatctagcggtattgctgctctacgtttagatggcggcagaacagcacactctaggtttgatattcctataaaccccaatgaatcctctacatgtaacatttcacgtggttcagatcttggtgagttggtcaaagaggcaaaactaattatttgggatgaagctcctatgatgagtaagcattgctttgagtctttggatagaactttaaaagatattgtgaataatccaggggacaagcctttgggtggtaaggttatagtttttggaggtgatttcagacaagtgttaccggtgataaatggtgctggtagagaagagattgtttttgctgcactaaattcttcttatatctgggagcactccaaagttttggagctaacaaagaacatgagacttcttgcagacattagtgagcatgaaaagcgagatatcgaggatttttccaagtggatactagatgttggggatgggaaaatttcacagcccaatgatggaattgctttgattgatatcccagaagaatttcttattaatggggataatgatccggtggaatcaatcatagaggcagtttacggaaatacttttatggaggagaaagacccaaagaagaccgattatccccaatatcaaggaagagcgattctttgtcctactaatgaggatgtgaattccataaacgagcatatgatgagaatgttagatggtaagttaaactttaaccaaacactattgtattttcgctgaaattacttaatctcaaatagcgttttactaaaatttggtattcattatgtttgtaggtgaagaaagaatctacctaagttctgatagtatagaccctgctgacataagttctgcgaataatgctgcttatttagctgattttttaaacaacgtcagagtttatggattgccgaaccattgcttgcgcttgaaagttggttgtccagtcatgttgttgagaaacatggatcctaataaaggtttatgcaatgggacaagattacaggtcactcaaatgacagatactataatacaagctagatttattacaggtaatagagttggtaagattgttctgattcctaggatgctaatcacaccatcagatacaagattacctttcaaaatgaggcgtagcaatttgctctatctgtagcttttgccatgaccataaataagagtcaagggcagacactagagtctgttggactttatttgcctaggcctgtgttttcacatggacaactatacgtggcaatctctagagtgacgtcaaaaactagtacgaagtttttttaagccaccattttaattactataatatgtatacgattattaatcttccacaaatatcaggtttgaagattcttataacagacaagaaaggaaaaccgcagaaaaaaacaatgaatgttgtttttaaagaaatgtttcaaaacctacactaagacaattatggaaagaaagatatgggattcctagtcaaccaggttattaaattaagaaatcaaaaacgtttttcagttttttataggattacattcaacgtaatatttggcactaatgaagttattttacaaatttcatgctcacagatatagttgcatcaaatcaaggaataaagatgctcaagcattgtcaggacgtgttaaatggaataagaattggtaaaaaactcaactggattttcttaactatgttatagttcgaaagaaacttacggttttttaatttctttattactctgattatgtctaatattggttgctcttgaaagttggttgtccggtcatgttgttgagaaacatggatcctaataaaggtttatgcaatgggacaagattacaggtcactcaaatggcagatactgtaatacaagctagatttattacaggtaatagagttggtaagattgttctgattcctaggatgctaatcacaccatcagatacaagattacctttcaaaatgaggcgtaagcaatttgctctatctgtagcttttgccatgaccataaataagagtcaagggcagacactagagtctgttggactttatttgcctaggcctgtgttttcacatgggcaactatacgtggcaatctctagagtgacgtcaaaaactggtacaaagttttcttaagccaccattttaattactataatatgtatacgattattaatcttccacaaatatcaggtttgaagattcttataacagacaagaaaggaaaaccacagaaaaaaacaatgaatgttgtttttaaagaaatgtttcaaaacctacactaagacaattatggaaagaaagatatgggattcctagtcaaccaggttaataaattaagaaatcaaaaacgtttttcagtttttttataggattacattcaacgtaatatttggcactaatgaagttattttacaaatttcatgctcacagatttagttgcatcaaatcaaggaataaagatgctcaagcattgtcaggacgtgttaaatggaataagaattggtaaaaaactcaactggattttcttaactatgttatagttcgaaagaaacttacgtttttttaatttctttattactctgattatgtctaatattggttgctcttgaaagttggttgtccggtcatgttgttgagaaacatggatcctaataaaggtttatgcaatgggacaagattacaggtcactcaaatggcagatactgtaatacaagctagatttattacaggtaatagagttggtaagattgttctgattcctaggatgctaatcacaccattagatacaagattacctttcaaaatgaggcgtaagcaatttgctctatctgtagcttttgccatgaccataaataagagtcaagggcagacactagaatctgttggactttatttgcctaggcctgtgttttcacatgggcaactatacgtggcaatctctagagtgacgtcaaaaactggtacaaagttttcttaagccaccattttaattactataatatgtatacgattattaatcttccacaaatatcaggtttgaagattcttataacagacaagaaaggaaaaccacagaaaaaaacaatgaatgttgtttttaaagaaatgtttcaaaacctacactaagacaattatggaaagaaagatatgggattcctagtcaaccaggttaataaattaagaaatcaaaaacgtttttcagtttttttataggattacattcaacgtaatatttggcactaatgaagttattttacaaatttcatgctcacagatttagttgcatcaaatcaaggaataaagatgctcaagcattgtcaggacgtgttaaatggaataagagttggtaaaaaactcaactggattttcttaagtatgttatagttcgaaataaacttatggttttttaatttctttattactctgattatgtctaatattcgaatatgagattgaatatttctttactatataaagacacgacgcagtcaacatcatccattcaaaataagattttaggaatcaggtgctaacctttatacacatattaggatctgaagttgatgtcgcctgctacttcatgtttagtttgtccttcttatatagatttacactaatccaaaagcttcagctggtgcaaacctgcatttaaatttgtaacagattagagttcttcttaagagaacttacttgataatataacaagttaaaccttaagctgtcttaaatatataagtagctttttcaatctttaaatagagctattggattctcgaacaacaatatataatatactacttagctttcatgtataaggacgaccaaattcatatatgaccttcatgtggcaacaatcagctatgggatttacatattccttttggctccatatctcatcaagctcgccttcctttccaattttatatcaaaaaataaatcagacaaaataggagattgcaaagcaaaacttgagacaagattcatgattctaggaaagaaaacatacttgaaacgcacataagagaggggttgattagcctgttgcaatgttttttttgtgttctgttttggaagtcaatcagttacaagaagtggatgaggatgaaacaggctttcgtcaactaattacaacgaatgatgaaacatttacgctataaatacttatcttaacaaactcaatcatcaaataaacacaacaaatgggaaactgcatatgcgtaacggaaaaaccgacgatgacgtggtcaggagacgatagtggatcatataacaagaggaggagaagaagaagaagatgcaccgtgttcataaatatatgtgtatgtagtattctattgattttcaatgactcggaattcaataagaacccaattagtttcaatgtcaagaagaagaaagaccagacacgctttcatttctatcttccctggtcatgaaagaaacatttatgttatcgaaaactaaatctattgaatagcttccaaaaaactcgaagaagacaagaatacgataaagaaacaaagaatatagtacagaacatcttattcatatcacttcaccataactactttgagaacaacttcagttaaaaaagaaacatcatgagcttacaaagaaaaaaaaatcaggggaagatatttgtaccttgcaactagaaacagcgatgatgttcgaaattctttgtagtccaaagggaagttgccctgcaaatatgagcttggctggttatgctgacattgtcaaattaaccttcttcacccatggaagcgccgcaactacatcatttgcctcattctcaaactacaaaagagtggtaatccatcaaacaaacataactacgatacactaaaaaaacactgattcattgctcatataactaaggatatagctcaaaaatctttagttatatttttggtttatgtcatttaccaacgaaacctataacagaaaaccaataaatttcagccttgaacaaacaatctaaaacagaacaaattggtacctaattaattttaatctagcttcggtaccttaagtttatttgggtggaagacgaagcaaatactgaagcaaaatacaaatgagttttgtattatttgtatgatttggaatgaaagacgaacctgcaatcgaccaagttatagtgatttggaatgaaagatttgagctgcaaacgggaaagaagagatttttcttcacaaattcttacaaaatttttgatggtcgtaaaaagccgcagtcagccgtagtcagccgcagtcgtaggaagtcatgtaatttccaatcaatttttgtttgtcagaattccattgagttttaggtatagttttttatttattaaatttgtaaataattaaatcaaacataatagaatctagagcctatatatcttcattggaccaaattaggcctacgactaaaaccaacacacaatacataaactaattcaaagttgggccaaaaactatatgttctcaaacaaataaaatacgtaatataacttggatacaaaattttcacatttaatataaactaaatatgatgtattaatataaatatgatattttaaaacaaagacaatctatgcagcattaatcattatattcaaatagtaataaagttaaaacatattatggcatcacttttacacttagataattaaaacaaagtattcaattttatttatgaaaaatattaatgtccgtgctgtatagcacgggttatgatctagtagaaagtgtatatttgatgttatctcgatgtagaccaagtttgaattcaacctacataaatttctccttctctcttgattatggtaagttttttaaagaattttgtctaacaactttacgagcttctctagcttaaaattagacaattagtatattattggatttcaaaatatgtgagatttcagggactgttattgaattgtggttttaaatggacttgaatagacaaataatatgtggattaaattttgaagtccaatgcttatagtgtgggctaacttggaattttgaaatacttgataaatgatgggattgtttttgttcatgttttatgagtaaaaatacaatcaaataaaaaatgaaaaaaaaaaatatattgaataacaattgttttcaatcattttagaatacatcaaacaaatactaatccaataacattagctttttaacgtacttttataaatacataattgaataaaatttgatttcaaaatgaattaaaatgcccgaatgaaataataaagtcgttaaacagtagctaactggtcacctaaattagcggctacatatttagtagttagttagtcgcttaatttggctattatactaacaattatttatacatgtctcaaattaccaacggactagcgactaaagtgttttagccacaattaaattgctaagaaattgtcaactaatcgcaagttaacgacgccgaatgaaatcgataattctatgttttcttatagtaaatataaatctcttgccaatcgctttcattctatgttttcttaatgacaaacaacacaaataaactatttaagaaaattaaattcatatcaaactttctccttcaaatctaaagtttcatttatatgatgatgatatagattatagaatataataagaaaatttaaacttttagtaattttgtaaaaaaaaaaaattaatatatgccaacagattaaagaaatgtcaatgaatgaataaattgaatgatctatgtggtttgtgctaatgtataggtgattaggtgagaataagtaccaaaaggatcaatgcccctggttgagtcaaagtagaaggactattgagaacaagatggtacaatgatttttccatagttcaaagctcattgattgatttatcaaactctgtcaatttttttcttttttttttctcctttttaaaaaaagtcgtgaacttttaaatggttgtggtgatgaataataatgggtctgaatggatggcgtgtaaaagacagatcacacttaagatggagggaccacaattaattttcacattcatgatttgggtcatttatatacaaaaaaaaagaatatctgcatgtagatcatattttcttgtcctttagtgataaaaagtgtgtgatccataaagcagtccatgctatcaatttatgagcgttctatctacaaaacacacattttaaaaagtaattattttcttaaaaattaaaaagattatttttcttatcgaaaattctttataaatcacagctaattttcattgttttcacatttcatatcaagttctattattttcaagttcatataagaagttcaacattttctctcctttttgggcaaaaagaagttcaacacctctttaacatatattctccaatttttaggtaactaatttatttatgtaaaactaaaactatatttctttacatataattataaatatatatgtactatctaaatgtataaatacaaataattactataatacttatatatttttatacaaattcttttacatacaattataccatatttgtaaagaaaatttaccatatatatgtagttgttatcattgttttatttaaagataggagatatggatgctttagagatagttgatgacatctatttattcattaatcaaaggagagaagttatcatttaagtttatgaattattaccatgaattatacttattttgagaattagttctaaaattgataggcaaagtaatgataccatgtgaagaaaaaataagttataaaagagagtttaagacttcaagaataagaagccatcacattatatatacttttcaccatcatttttaaaatacaaataatgttatttcaaataatcaataaacattatatatatcatatgtaatcaaacatatatatattaaatatgccaatatctacaacaaacgtttacacaatcctaacatttacaatatttatttctcattcatctgacatgaacatggatatccatgacatcaattttggcatccatgtgtattgggacatcaataccactctttttccacctcattatctttttactatttctgagaaaatttttgttgctctctactaaattgataacatattactttttaaaaaaagttgtggaatatagtgattataacccctatggtggtaaggatcggtttctacatgaagctttttgagtgaaactcgaacaacaggaagaaagactgtgttattacctccgatgtctaggagtacgacccctgcaagtacataaaactaatttattaaaacaagtaaaaaacaattatattttttattaagttaatgttttgtttactaaaaaaatatttttcactcaatgtcccaaatcgagtttaccccatttttccttcaagcaagatatcttttataacatttttaaggaatgcccaccctttacgatcttaatgattactttagatcctgattttggacctatgatgtccaaattaaaaaagatgagattcataattcagttcttctatcttgtaatattggatctaatgactaacttgatgtagatcatatcaaataattttggaagtaaatgatagaaatatgtggatccatatgatacaaagagttggtatatagatcacgtataatacacggagttaagatctattagtatttctaattattagactttaatttgtatttgtattataataggtatatttgataagttgactacttgtttattagcagaagcgagagcatatttgaaggttatctataccgatgaaaatatctctcttcacgaaacatattgtaaaagaaactatgacatttcagaaaattgttggttcagagacgtcaatttgataaccgagctcattgctttgatttctctaccacacttctatacgaaggtctattggaaaaactcattaaagattgaaatttcttttgagttcaatatgaaggtttagaaaatgtagacttatgtgcgagcaaaatttcatgatggaatggcaaccgtcactcactagatttagtcgggtggttcaatgcaatcagtgatgtcagatgatgttgagtgtaaagttaacccttcaaattgatagataattttagaatataaattttttatttagtcttcaaaattagtaaaatttattaaaaagaaaatacatgttcaatatttaatataaatgattgtcaaaagatgcatctaaacaagagaatgatcttacttagttaccaacacttaaattcctgatggtgttggatctcgcacaatagaccatcaaattcatcaaagactcattattttacaaagtctaagaaggtttacacataggaggtgatttaatattgtcattaattggtgttttgattcatgaatcaaaggagagaagttatcatttaagtttattgaattattgccatgaattacttattttgagaattagttctaaaattgataggcaaagtaatgataccatgtgatgaagaaatatgttacaaaggagagtttaagacttcaagaataagaagccatcacatcatatatacttttcaccaccatgtttaaaatacaaataatgttatttcaaataatcaatatgccaatatatatcgtttaatctcttgattttttgtggttaatttatgtcattttgtttagtcgattttgtgtttatctaatgaaactttggtctcagctttttacattataaatctaatctatctacattatttatccactgtttcttttacattttagataatctatagatttgacaaatcaagaaaatggtggatcataagcataatattgcatcgaacggttccaattaaaatagattagagtataaacaattcatagttttagggagtttattaaacactaagctagtaataggagtcatggtttcttctatgatgtatattctaaacacttcaattagcaattgacttacaagcacataagatttaagtcaacaaaaccttgaataattcaataacattttaaatcaatctacagaaatcaattatcacatgaatttttcaaatttcaaagagatattcaacaatctaaaacacaccttaatggcaattttaaagctttttgaaattgaaccaccatttttatttggtatttttgttctatttcgaattcatcattgttgttccataatcacatatgcaaatcgtaaccaacgtatataacaacgtttctgtttttgaagtagaactcaattattacaaaacaataacttacttgtgatctcttcttcttcttacgtgatgaacgtacggtgatagtggcttgcgatatcacaatctcctaagacagaatttagccctctatggtggtgtaagtagctttgtgtaggcttctatcttgcatgatacaactatcgatctctgttttaacaccgcatagagaccctagcaaactttactttgagattcttagatattgatttggagaagtagaagatgagaatcaatcccaatctttctctcatttgtttctcttgtattgttcttgtctattgtctctctcagtctcttctctcttaatcgtcatcgtctcttatatattaatgaatcgatgtttaatccaagagatgcttctcttatctcaaccggtgtatcggtaaaaacgtaaccaagagagttaatctaatttgcacaagtagaacggtatttacataaatacaaatgtttatgtaaaaaaatatgtttatataaaataaacaccaacaatatcccatattttcttattcaaacatataaatatcccacatttgaattagaaaataagctccacaatatctgagaaaatagaatcattatgcatcggtaaaggtgtcttttagacttgaacctttcctagtaaacacatattggatttactctgtaggtagtgaactcttgtcttgaactaaccacgtttgagagcaaatcgagacaataagtgaaacacataaactatcagctcatttcatgtttatacagttgcgttcattttggtcctgaacatatcccgacttcgtgagagctctagagaatttagccatttcaattctcataggtgcgaccacgacaccactccaatataggtaacactcttgtcttgaactaaccacgtttgatagtaagctgagacaatacgtgaaacacataaattatcagctcatttcatgtttatacggttgtgtttattttggtactgaacatatcccgacttcgtgagagctctacagaatttagccatttcagatctcataggtgcgaccgtgacaccactctaatataggtaacattaattaagaatagtccattctattccacttttttaaaaaattattaatgttattaagaaaaaatgttcatccctttaaacatcaatgaaaatacatttaactttataggaataagtaatatgtatctctttcttgagtcttcctcagccagtttgcctcttgaacctaaaccatgggatctccaatattgctaggtaaggtttccaccaagtgatgagtcattttgttggctttaaacccattcccctcgaagtgaatacgactagctctttcggtaggcctttagtcaaaggatcagccaagttatcctttgatctaatataatccaatgctatcactccattggaaagcaattgtcgtattgaagcatgtctccctcgaatatgccttgacttgccattaaattttttatttttcactatatttgaggtatccatattatcacaatggatacatagtacggttaccggctttggccataatgaaattagttggttccgacatttcatcaaacacttgttaggtggagaaagtctgaaatcaattttcaattgatcagaaagaaaatagcattaagaactcctaaaacagaaaggaatcatgcatataaacacttagctagctaaagaaaagaggaatccacctaaacctaacccatcctcaagaactctgaagaagactactcaagaacaatgtagaacatcatagaacaaaaccctgaaaattcataaaacttagaaatcattataaacttagcaaatgatagatctcaataagataaacaagtttgcagaagaaatcaaatccaaattcttaacacaacaaccagaatatgcaaaagagaatctaagaaccctaatatcctgcagacaaagcaaagatattttgggcaaaaacataagaggtttatttataggcaatcctaggttgccctaattgggaataagacaaaataagaaagtcggcgctgcatcactcgggttttggcggagtagaaaagtcgagtggcttcctcttggtcacatcactcgagtcttagccgagtggcttggtcgagcagcttctcttcttccttaagtgcagtactcggcctccagccgagtgccttggtcgagtagactccttgttcttcacgtgtgctccactcggcctccagccgagtatataagccgagtatacttcaagtccttccttagatcccacgaactcgagtctgtccatcccttgtgctagaaacctccaagttgagtccaaaagtacctgattcacctgtaaaacactccaaatgcaagtatgttatgcaatgcaatgcaaaatgtgcaaaggaaggaaaatagactaagaatgcatgaaaagagacatgaaactaagctaaatgcatgaaaaataagggcttaaaaaggttaaaatctagtgttatcaacactcccaaacttagctctttgcttgtcctcaagcaacaatagaactaggctaggagtgaggccttcggggattcagaaccaaaatatgcatgtaaaataaatagtctcaatgtcaatgttgctagttctagagtgctaggttgaatgatctctacttaaaaacttaagccatcttcttcacaacacaacctaatctttcacttagtctattcaagcattcaaatcagcatattccttttaacattcattaagcaagagccatggatcatactacacaatgcatattaaactcatttggctaagggcaaagggtcaagagacaaaaatggtcccttaaagaataggctttagtaacaagggatctctcaagaatgattaagctttagtagaatgcttaaggtaagtcccaagttatgcatataaagataagatcccatctacccaaagtgtaatcaatgacgatctaatggcaatccaatctcccatcccaattaagaacttaactcttcccttttgcattcataatcttttgaactctttcttaacccattcttttctttttctcttaactctaggagaagctttctttttttctttgatacttctagcgggtttggctttctttagtgctaaggttctgttttgaatctctattaagcttagggctttttactcttcttcattagctaacaataatccaatctttttctttaacaatctcaaaccctttactagactttttctaacttctttagcttacttctcctagaatccttttcccttttcttgtaaacaatgaattcaaccctttttctcttttaaactcttcccaacccatataataagtacccacctagtcctatctagtccggataacgcgaattagaactacatgagatactatctttgtcgttacaaacctaacactttctaccaagcttaatcgaaataagacctcacaaacactcacaagtgatatatggcttgaaagaaggcttaggttagggtatggagaaactgctctaaaggtgagagacagctatttggatcaacaagagtggtgaaatgaataacaagatccaaatattttaagggtaaccatgagtttaacaaacaatgcatagtatgataattaaaagtcaaattatggttcaaattgatagggaatagcttcaaatcacagcgagtttcgactaaggaagatcaagtgtatgaattcaaaagatggtgcggttttacttcaagttcattcggttaagcactagacaactaacaacaagggcattgaaactatctagtgaacattgcaaaattacaaggctatgatcatcattatcccctatgcaagtgcaaaatgcaacaacctatatgataacattctaagaacagccctaataatgcaaacgcaaactacatgacactctattttttttttggaatcattttcgaaaaattttcaaatttttatggggttttctatgccttagatgatgcaaaaatttgaataagaaaacatgaaacaatgttagatacatcctgaactctcccccaaacttaaattacacagtcccttgtgtaataaaaattcaaaggagaattcaagagaaataaccacacaaagaaagaaataaaagaaatgcaatgatatatacagtgaaatggagtgatacctcaacgttcagacgaaaaggttctggacaaactcgtccaggcggtcttgtgtgtactcatgatcatgggtggaggtgttggggttgtactcgtttggccggtcgagcatgtagcccgagtagtactcctctcggctcgggtcagcattcagaaccaatcggttcactggaccgggtgggcgcctgttgaaacaacgatctgagaaggtggagcttctcccgagcttgtaatttgaggctcttggcggggtgaaacgaacgtccctttgtggtgccacactcgttgagttacatctcctgaactcgggtggaggtggtggcgatctctgtcttctttgcagctcctgaatctgaaccgccatgccgttcattgccctcttcatctttctcaccttcttcttcaacccactgatcaactttctctgaaacttccctaggcccttgtgcattcccagcttcttgtggacttgaccgggatctctctcttgatcggactcatcataatcttcaaagaaatactgctccactgcagcttcacacgagtcttcttgctcatcaaactgttcagctcgactgaactcagcttgttcatattcggtctggccatactcggccgagtataagcttcctgctcagcttcttcttggttgaactctgctccttcttcttgtgactcactccccatgttcgactctgcttgtaaaggcgcaaggacattgactaagattgatggtggaggatcaaagtcaatgttgttcccaattctaactgtgatgtactccttgcaaggaagtgctaacctagagagacctagcgtggggtgcttgaacttgaaatggagttgatcagctggggcagatctatccaagtagcatttcctcttcaagtactccatatcaatgtagtttgctgtgacagtgggagtgtgaagaggaactccagcagctattaggatgggtgtgatcactcctccagcacataagcttcctccatagccggattggtggatatcggtggcatactctctgaaacctatcaagtgatcagtcaacaccaccgaaagggatgtatcagccctatccccttccatcactatattcttccttgtttgccccaaaatgaaacataaggtgagatcaagcatcttcagctctccctgattaacatggtcggttgtcttctttgggaagaaggcacttgcaatccaaaggtggagatacctaagcaccgggctccttatcaatgaactcttggccctagatgacttgtaggggagtggaccggcgattgtcaaccatagatcatggagctcgtccttgctgaagttttggcggatcccatacttggtggggaacttgaatacagcatccaactgcctaatagggagggagtagtgaatcccaaacaccatgaatgtgatatagccaactcccttatgtatctctctctccctctcctctgcatagaaatggagcttcaaagtggctaggaactggcagctctcagtttggtatccctcacacttgtaggagaagaatgtccccagcttggccatctccatgaggtagtcaacatctctacagatccccaaagcttgcatggtatgcctatggggatatcttgtcccctcaaagctcaactccatgaggtactggtagtgttcttcaattgtaggctccttcttccttcttgggttgttacttcttctccttgcaggaactattgggacctcctcagcaatttccacatctttcccacatgcttccttctctagcacaggctcttcctctattgcagctggctcggactcccagaccttcttgcctcttacaatttcctctctggcacccgcagtacgacccacagaaggctctggggctacactcggccactgtactcggcctgtcaaccgagtaaaaccaggactcacagcttcctgattccatgacggacccttctcatttatcatagcaaaccctctcgccacagctcgagcagaggctctccttcttgattcttcgggatccatgatcttgggatgatttacttcagatagtcaccacaaaataacccaaagtaggtcaaaagtagaagagaaattaatgtttaaaactgaacaaaggctgtaggagaggttttgaaaaggtttgtatggagagaaaacaagaaattatggctaagtttctgggaattctagagagaagtgagagtaaaatcttgaaatgtttggagagaagaagtaaaatttgaaatttttgagcaaagagagagtgtaagtgacttagcttgttgagtgtggttttatagacaagaagatttgatcctagccctccaaacaccttagatcttcacccttcatttggtcaaggggacatgctttcactatttgcagaagaatctctgatgggctttggggagcaagatttgattggtggggccgagtaaatttgaattcaaattcgaatttgaattgtgttgacctcgcacgtgtgaactcggccgacatactcgacgcgcgtgtcgagtacagttttgggcctgatgggctctttttcttactcggcttcagctcttccatcttgaggtccagcttttcaatggtttccccttgagatccatactgtttcctgagctccataagctctctagcaataggaccaacatcaaaatggttcctcttagtctcaacctctgagctaggttctccttctatcataagaggctcctcgggctctcctaggtggtgagtcgtaatggagtacgaaataaaattttcccacccactcaacaactcagcatctaaatttctttcttcaatgaagaaaagatgcccttctatggtgggcttcttcatcttcttaggaatatcaaagctcatatggagattcttaccaaggttcaagtcgatcttacccatttgcacgtcgataagagcgcccgcagttggtagaaatggtctcccaagaatgagagggtctttcggttcctcatccatctctagaaccacaaagtcggttggaattttgactgatccaatctttaccggtaagtcttctagcatcccatgaggcactctcactgatctatcagctagaataagatgaatgctgctaggcttgaacttatcaaatcccaatctctttgcaacagacaaaggcatcaaactaaccgaagctcccaaatcacaaagactattgttgaacactaaggatcctagtgaacaaggtagactgaaggaacctggatcacctagcttctttggtatcaccttcctttgaatgatagcactacactcaaaactcaattcaactatttacttagcttcttgggatctttccataatcacttccttgggagtatcaaccaagggtatcttctcttccaactctttgatacacttgatgaacatcatcttatgtttctggaagatcttttcattaatctgtgcaatactttctggaaatgccgaaggttcatagggaggtggaatagggattgggttgctcgggtcatgtgctcgttcgacaagccgagcaaagaagtcgagtttaatttcctgtcttgatcttggtcgcaaaacctccccttcttgaatcccactgtcctcagtggcagaattactaactgtggagatagcatgggcatactcctttggattttgaacagcttttccaggaagttgtccagggtgcttaggagctgaagtataagcaatgtagccctccatgctcttgactctattgttaagtgcatcaatctttatattcaagtcgttataagagcaatcaatcctagtggtaagctcagctagcttcttatccatggtcatggaacatgaagcctatccttgcacaagttgttgaagtagagtcttcatctctgagtcttgtgctgaagtgtgctgttgttgctgggtgaagcctggaggtccaaagttgccacattgttacttctgtaagagagattatgatgagggggcttgtagttgttgaatcccttgttgtagccaccttgattctgtaggtagctaacctcctcaatagtaaggttctccccatcttggagttgtgtaagctcttcttctgtaatgtagtggacatttctctgttgagcaagcaccaaataacaacggcgccaaattgatacaagggttttctgtgtcaattccctaaatgcatcttatgtcattgcagcatttaaggtgtcaatccaaatgggtgtaattgctatcaatcatgatatgattagagaatactaagtcaagcgaagtgtgaataggtttggtgtgtttctactaaacctaagcaacagattaacatgtaaatcaaatttagaaattgaactatactaagcagaagataaagaacatgagtgataaaaccaagaagtaaatgcaagaaccagagagtaaaccaagcacaaagagaagcactcagtcgagtaaactaccaacaggtcgagtacaatactaaaaacaccaattttgcacgagacgaacagagtactaaaaacacgagttttgcacaataaaacaaaacagagctcttaagaatgaggtaattggtcttagtggactcctcaatccattagctaactaacaaaatcaatcaagctatccctagacaatagattcaagaccaaatcaatccactttcgtgacaatgattctcataactttataacttcctaatctcaattttcattgatgaaacataataaagcaggctttaaacaccaatctattaaagtcaataagcagtctaaacatccaaggtcttgggctagaatctacaaatctctgaaattagttggtttagacatttcataaaacacttgttaggtggagaaagtctgaaatcaattttcaattgatcagaaagaaaatagcattaagaactcctaaaacagaagggaatcatgcatataaacacttagttagctaaagaaaagaggaatccacctaaacctaacccatcctcaagaactctgaagaagactactcaagaacaatgaagaacatcatagaaccacatgagtgaaggaggctttttgattaagaggttgttgaaagtaagttaagaaacagtgcgttttgctctgagggtgacaaaaaggcgatttagggttttaagcttctcacgcaagttccgaagccgccggaggctcttccgctgcgggatgctggaagtttgagtcaggaggcagttgggataccggttgacatagtggtagaggtggcgagggaagagtcgtttcaaaatcgggaagaacctttgagagaagaaggtgaaatagtgcaatctcaggttagggagttggctatgagcgagttcgagaaagtaggtgctgcagtaaaggattgtgttctggaagttgattctgaaacgcaaaacaaagttgggtctcctggaaatttaaaaggagcgtgggtagtagcggtattgaaagggatagagatgaaaacagaggaaatagatggtataccaacagcgacaataccaaacagtgtttttgatgaggcaaagccgttgtgggaagatttcctagttggaaagtttcttgctaaggctcctttttgggagggattcatgctttagtgaataagatttggacgttgggggacaagtctatgcgaatagatgtgttcgtggtggaccacacaacagtgagatttagaataaaggatgagcgcattcgctctcgggtgctacgaagaggcatgtggaatttatgtggggttgtagtggtgttatctaagtgaagtcctattgtggaagctgatcaagaagcaataaaaaatatacctctttgggtcatagttaagaatgttccaccaaaatatttctcttggaaggttctaagtgctatcactagtccactaggcattccaaggaaactacacccatatacagaagcgtgcaaatcttttgaagaggcaaaagtgtttgtagaagtggatttgacaaagaaattacctaaatatttctctttcaaatctgagaaaggaggtgatactaccgtggagtttgtgtatccgtggctatctccacgatgttgtaaatgtgaaaatggggtcacttggatgtgaactgtttgtcacaggagaaagtaagagctgttgggatctcatgtgtggataaaggggcatcaatcacaacagagagtacaagggaggagagggttttggttgcagaggctgagaccattgagcctacaagcgtacaagatgtggaagaagataaggcacttaaacaacaggaaaaccaaagtgataaaacgaaatcaatggatgtaagagacaaggactggaatactcctactaagataataagaagtccggggaggaacgaggagctcagttatggagagatctctattatgtctaattctttttcctgcctaagtgagaaaggaggaaaaggttaggacattgaaacagagaaccatgaatcgaataataacggtggaatagaggaacaagataaaaaagaaggggttaatcaagacaatgaggaagagagtacgggaaaagattgtcaagatagaagtgtggtactgagacaaactttacctcgcgcatcaaaagacagtcacaaagttctaggcaacaatgcaaaacaaagtactaggagagcaactcaatgcaatcctaacacacgtcccatccaacaccatcattaatgtctggtttcttttggaataatcggggtttcaacaacaaaagtaaacatggagtaatgcggaagtggttgaaagaagaaaattttgattttggttgcttactggaaacgaaagtgaaagaaggaagagcgaatcagatagtaaaatcagtttttaaagattggtcactactatctaattatgaagagcacatattaggaagattatggttagtctggaaaaatacagtaagggtcactccgatttacaagacttctcagttgataacgtgctcaatcctcatcgaaggtagtaaagaagagatatttgtatcttttgtttatgcttcaaattttgccatggaaaggaaaatgctttggagtgacctcagttatcatcaggactctcctttgtttcgggataaagcttggcttatctgtggggattttaacgagattttggaaggtgatgatcactctctttacatctcaacgccacacatatcaccaggaatgcgggattttcaggaggtggtgagaaaatgtgagcttactgacttgagttaccaaggcaagaggttcacttggtgtaataaaagacaagatggaataatctgcaagaaacttgacagagttctggtgaatgagacatggactcaaaaatatatcaaatcttatgcagtctttgagcatggaggatgtttagaccacatgagatgtagattctatctagcagaggagattcataagactaagcgtccttttaagtttatgaatgttgtgatgacgcattcaggataccaggcagaatttgaacagagttggaaaagatcacaaccactttttcactcgacttcagcaatgcacatattatccaagaaactaaaagcgctaaaaccgcatctgagagcgataggttaacagttaataggagctattattgttcgaaccaaagaagcttttaaaaaactctgtgagctacagcgacaatggctttcccgacatcgcaagctatcattgatgagactgctgcttatgacaaatggaggagattattggatattgaggagagattcttacaacaaaaggccaaactccattggatgaacattggagaccaaaataacaaggctttctatgcttctgccaagctaagggaaataagaaataacataagagaaattcagtgtgaggatggtacaatagctggaactcaagaaagcattaaggctgaagcagagagatactttaaagactttctctccatgaggcctacagattacgttcaatggtcaaaggaggagctggagaatatcttggattttaagtgtgatgaacatgacaaacaaatgttaacaagcgaagttttggaggaggaaataaggaaggtgctctttgcaatgcctgcaaacaaatcccctggccccgatggtttcacgtgtgaattttttaaagattcatggtctataattcacaaagatgtggtggtagcagttcagtcttttttcaagacaggttttctccctaaaggagttaactcaaccatattagctttgataccaaagaagaaggaagcaatggttatgaaagattataggcccatctcttgctgcaatgttcaatacaagttgatatcaaagattctcgcaaaccggcttaagagtattctccctaagttcatctctccaaaccaatcagcttttattaaagatagattgttaatggaaaatctcttactcgcaacagaggtcatcaaagactaccataaggactctgtttctcctcgctgtgcaatgaaaatagacatatccaaggcgttcgattcagttcagtggttttttttactcaatacactgagagcccttgatattccggagcagtatgttaattggattcaaaaatgtgtcacaacagcctctttctcggtgcaagtaaacggagaacttgcaggatattttaacagcgatcgcgggcttcgccaaggctgctctctgaacccttatctttttgtcatctgcatgaatgtgctctctcgcaagttggacaaggctgcagccgacgaaaaaatggattttcatcctaactgcaaacagatgaaattaacacatctatgttttgttgatgacttgatggtttttgtcgcatgaaataagaaattaataggaggagcactagaggtctttgatgattttgcggttcacacaggactcaaaatcagccttgaaaagtccacactttttatggctggggtacatatgagagctaaagaagagattctaacccagtttccttttgaacaggggacacttccggtgagatatttaggattacctctaatgacaaagcagatgacttcctcggattatctgccccttttggagaagattcgatcgcaaataaaatcatggacagctagaactctctcttttgcgggaaggcttcagctaattggttccgtgatattcagtttaacaaatttctggattgcagcgtttaggctaccaaaaacttgcataaaggaaatcgataagatgtgttcagcttttctttggtctggacctactttgaatccgaaaaaagcaaaggttgcatggtcagaagtgtgtacacccaaaagtgaaggaggtctagggctgcgatcactcgaagaagcgaacaaagtgtgtgtgctcaagcttatatggagactcctgtctgcgaaagattccttatgggtagactgggttaatagacaccttatccggggaggttcattctgggcggtaaagaataatacatcaagcgggtcttggatttggagaaacatgctaaaatatcgacaactagctaaggagtttcatagagtggaagtgcataacggtgagagcacatctttttggtttgactcatggtgttcgatgggacgtcttcatgagaagctaggagataggggtatcattgacatggagattccgctagagagcaagctttgtgaagtgatgaacagagacaggagaaggaaccatcatcgagacttactgaaccaaattgaggaagagcttcgatgccaaggacaacacagcttggaaacagagccggatgcagcgttatggaaagggaaatatgactactaccggaaacaatacagttctcgagagagtagtcacaaattcgcttaccaaaggctgagatgagtggacataaagagatttggtttgctggggcaactccaaggtatgcttttatcacatggttggttgttaaaaacagaattgcgacaggcgaacgaatggcgaactggcaactaaatgcggatacgagttgtgttttctgcaagcaccctatggagacgcgagaacatcttttttccaatgtcctctctctaggaaaatatgggagaaactggttcgaggtattctattacacaagttctcggaaaagtggctagaagtgatgaaggaactaaccaacaatgatcatgacaacaccaagagattcatccttaggtttgtgtttcagaacacgatacattccatatggagggagagaaatgatagaaggcatggagcattctcaacaccgaaaaaaatagtcaagttgattgataccaacattagaaaccgcttgagcacactaaggcaagggaaggtggaaaaatatgtgagaggaatccaaatgttgttctcatcgagataacatcatagagtcgagatttattgtctaagttttatgatatgttcctaaaaattttgcattaccatgtataaacgtttatttttctttgaatatattttaacattaaattcaaaacaaaaaaaggaacatcatagaacaaaacccagaaaattcataaaactcagaaatcattataaacttagcaaatgatagatctcaataagataaacaagtttgcagaagaaatcaaatccaaattcttaacacaacaaccagaaaatgcaaaagaaatctaagaaccctaatatcctgcagacaaagcaaagatattttgggcaaaaacataagaggtttatttataggcaatcctaggttgccctaattgggaataagacaaaataagaaagtcggcgctgcatcactcgggttttggcggagtagaaaagtcgagtggcttcctcttggtcacatcactcgagtcttagccgagtggcttggtcgagcagcttctcttcttccttaagtgcactactcggcctccagccgagtgccttggtcgagtagactccttgttcttcacgtgtgctccactcggcctccagccgagtatataagccgagtatatttcaagtccttccttagatcccacgaactcgagtctgtccatcccttgtgctagaaacctccaagttgagtccaaaagtacttgattcacctgtaaaacactccaaatgcaagtatgttatgcaatgcaatgcaaaatgtgcaaaggaaggaaaagagactaagaatgcatgaaaagagacatgaaactatgaaaaacaagggcttaaaaaggttaaaatctagtgttatcaatctctaagacatagctccaccaccaagtgtaaacacataaccacttgtggatttactatccgtacttccagaaatccaatttgcatcactatatctttctaatacatgagaaaatttagtgtagtgtagaccataattaattgtatgctttaaatatctcaatactctaaccaagcattccaatgttctctatttggattacttgaatatcgacttaatcgacttattgagtaagccaaatttggtcttgtacaatttgtaatgtacataatgcttccaagattttgtgtgtattccaactgagacacactttcaccttcattctttgaaagctttcacgttggatcaaacggagtaactaccggtctatcatcaaagtgaccaaacttctttagaactttcttcacataatgagattgagtaagtgaatacccatttggctcttttttatttctaattccaggaattacatcagccaatcccatgtctttcatttcaaaattgtcactcaacatcttctttgtgacattgataatgtctttatttgtttccattattaacatatcatccacataaagacatacaatcattgtatcctttttagtttcattaacgtagacacacttatcacattcatttattttaaaaccatacgatctcattgtattatcaaacttctcatgccactgttttggcgcttgcttaagtccatacaaagactttttaagcttacaaactttcttctctttccctttgactataaatccttcgggttattccaaatataattcttcatcaagttcaccatttaggaatgttgttttaacatccatttgatgaatttctatatcatatatgaaagaaattgcgattagatatctaatcgaagtgattctagtcaccggagaatatgtatcaaagaaatgaagaccttcttttgacgaaaccctttcgccactagtcttgctttatatttttaactcataccatcctgtctcgacttctttgtgaagatccatttatgtccaattagtttattaccatgtggtaaatcaaccaattcccatgtatgatttctcaaaatggattcaacttcactttgaatcgcctctttccaataaggtgcatccgatgattcaattgcagccttatacgtttgtggttcgtattcactcaagtacgtcataaagtccgtgccaaaatctttagcaactcttgctcttttactcttttttttgggttcattttcttcttcttgaacctttgaggcatattcattgtcctcacgtacctgtttagtacttgattccctagactctttgtatggaaacacactttcaaagaactcagcctcattagattcaatgatcgtatttacctttacctcagcattattagattattggtataacccgcttttcagcgattttatctatgttttaggtataggattttgagtctttatgttatttctcgagtctttttagtgtcttttcaggtattctatgcaatgagacaacaatggagataaagagacattttggagcaaaagctaaggaaaaggaagctaaagacaattttggttcaggaatcagcgaggagtgtcgatcgacacactcttggtgtcgatcgacaccagttttggcccagcagaagtccatgacgctttcaagtttacagaagaggaaatttgccccagaagacttccctatttgtattattagtccctggacgtttttacggttttatatattgtttttagacctaagtttaatttatcaagcttttgcaaaaccttgttacagagagacataagctattcatcgattgttttcagagtttaattcagatcttaatacagtgaaaatatcccttctttccccttctctatttactgtgtttatgccttcacactcaaatatgttgtttgcttcatccaatatgtctgagtagtctgcttgttcggaatagggtttctcattagggattcatatggtttagtagattgccccctttgctatgttatctgtagaattcttcatctttaattatgtctaatgctagatctatagtaattaactatatcttgaatccagacaatagatatgcccgccataggtatctgtagttggatttattatatgatgagtctagtttataggtgtgtaataagaatcggcctatctactaagatgaacaattgaactcgttaagaatgcatatttaggttgatagtttcgcggcacgcccaccggttattccataattagagtttgagtttaagaatgattcgataacaacctagctttcattagatctactaaccaatagttttcttagaataccctgttcctacctctttattaaatcgtttacaacacaatcatcttgctgttttcttactttgttttcttactatttcactcataccctgctagcttaatctcgacatttaactcactgttagaacaaaagaactctgtgaattcgatcctaaaatagtgcaattgatctcttatttgagagagtagttctaggtaatttgaaccatatcaattatgaactacaaatctataaactgcattattttccgcaggaccgatgtaaacgcaatccaccaatctataaacccacactttcatattttatatgaaagagtcttctctttccacatctcatatggatttttatcactcttcttgtgaggaatcttattcaagattgaattagccgtgagaatggcttcaccccataggttaggtggttgcaagtagggcagaaattgtgttggcaactctaaatgcttcttatgtttaggatcattgtaatgttctgaagcttactaagatcatgcaatttctaagcaaaattgagtgaagaagaagctaaagagattagagaattctcatattggcttctaattattggtgatgggagaattgttgagccaaatgacgaagaagctctcattgatattttcgaagaactcttgattacataagcaggaaatctaattgaagcaattagtcatgagagttatggagatccatcacttttaaaagataatgaagatcaaaaaaaaaaatcataagagagccattttatcacataccagcgatgatgtaaacacaatcaaccaatatatgctagagaagttggaaggtcagtaatatatcaacctataatgaaactttttggtttaagtcaatcatattataatttttgacctgatacttgcaggtgaagaaaagattatttctcagtgctgatagcatagatccttttgattatgattcaccaaaaaatccaattatcacgccagatttcttaaacaatatcaagctatcaggttttttgccacaccatcaattacgtttgaagattgacgctccaattatgctacttagaaatattgatcctaaatgtggtatatgcaatagaacaaggcttcatattactcagatgactaaacaagttcttcgagcaaaagttataactcgagatagatgtggtgacattgttttgattcccttaatcaacattacaccattggatacgaagctgcccttccggattcgtaggaaatagttcccggtgtcagtagcattcgctatgacgatcaacaagagtcagaggcaatcgcttgagagagttggtctctacttaccgaagccagttttttctcatggccaactctaagttgctttatctagggtcacttataagaaaggtttaaaaatccttattctagataaagaaggaaagattcaaaaacaaacagcgaatgttgtttccaaagaagtttttcagaatatcaactcgtaatggttctggattaataagtcgttcatcgaaagcataaaaggtatgtttccttttactttctttgatttagcatttgctttatggtttgcaaaacccacaaaatagacagtcctatgttatatactaacattaccattttcttaacagaaacaaataagttgggacaagctggaatggaatagctaatgtttctccgccaaaaccagccgaagataatatattagttaaacggagttgcgaattgtcagaatttcatgcgtcgggacacgtcatctctcacctccctcctctgttcgcggttgtttagcccactcctacaacgtctctctgcttcctccgccgatacgttctcgctttcgccgtgttattctgtttcgatatatattttctttttctttctttcttaatattgttggaattatatcttctatacaatataattaatatttaataacacctaatcaatcggaacagtaaatgatcataattttcgtacttagtctttgtttatctccttttcctctcataatgtgagattagatacaatccaaaacgcaaaaattttgtttttgttcattgatccaaagtttgtggtgtaacgcccgtgaaccggaaaatcggttagggtttgtttttaaatcatccggtttaattggttgggttaattggaaaccctaaagtgtgcctataaaagaaggaaactcgaaattagggctttagttagccatttttcgttttataaaggagaaaaagagagaaaaggagaaggagcagaatcgttagggtttgggagaaatcagtttcgtcatatcaaatcgtggtaaaaggtaacgaaatttggtagggttattcccaaatcctttatcgttattctccagtttacagagttgaatttggattaaaattggttgaggtattcgcagtttcgtgagacacgttttctcaaacgcgaattaggaccagcgaagattgaaactgagatcgtggtctcgtctgttttccgatcggcacgagattttgtgggcagctttgtgacgtctgcagctaggttttcaccggagagattgaatagttaacggttagcttgtattttagggtttcgtctttgagacggtttgtttctggtttttcctgtccagtttgtttcaaggttgcttttggttgtggacttgttgcaggacgtttctggactgtttcagacgcaaggaaagtctctcctgggtttaattgctattagaatcaatttgttaaggtgagtgcgtgaccatgagcttatctgagcgattgggttgtgtgatgatatgtaggtgtggtgaatgtgttttgggtgaattgttcaatgactggtttgtttgtattgtattcgtgattatacctttttatttgcttgtgtgtatagctcgtagatgggaggatcgcctcactaagtatttatgataatacttacgcatctcattgtgttgttgatgcaggtaaagataaagtgtgattgtggaatcatggcaaggaagagaggatgatctaggaactcgtttgttttatgtatggtgtttttggttattggaacccggttaggattgtcagttattcttggttttgttgatcgaattatttatttattcataaaatagtatttctgacttgcggtttaattattatgttattggttggtttaattagatatttatggaaatatttaattatatttttttttttttaaatgggtcgggttgtttcatgtggtgtttgtctcttgataagaggaaaatgtgtataattttaactgtcattttcagtaatgctaatgtagattttgtagcagagctacattatgtttgaccttgaaactcactaacatgtgtgacagagatgacacttaaagaacatttttttttttttccgtcaaggtttttcgtcaagacttagagaaacttatctacagtgaaatattagtaatgatgactaaagaaatgggaaaaatgtcgtttaatacatgaactttcaaaaatggtcatttaatacgtgaactttgtatgtggccatttaatacatttaaaaaccgttgactggccagtttatacggagttaatcgttgactaggccaaaatccacacgacgttatctggcgttagcagacacgataacggctgctaactagtctccgttagttcttaatacaacgtcattttaccatatcgaaacatggaaatatcatttaatactccaactttcaaattgaggttgttttatacatcaacttcacatgtgaccattttatacatgaactaaacgctgatcaggagtttggaaaatgagaatgcattgaccaagctaacaagacatacctccatctaggcctagacatatggattttggtttagatatttttcgaatttattcggattcagataatttgagtaggagagtttattagattttcttcgaatttattcggattcaaataattttgatgaatacgtgtaaatattttcagtatttacagtattttattatatggtttattttgatgaatacgtctaaggaaacctacttacaatattttgttatatgatttattttttctagatgtgatgttttgggactcttctttgcacaattattaggtatctcggttagaaggagcattggtttcttcatataatctaaagaatttggtccatttgtggatcccttgagttgtgaaataatttgtatcggtggtcgcaggattgtactggctttagtttaattgggccggtatgaaagatctgtgattgattcaagggtaaattgcaggccacacccgttgaccatgttttatttccatggattgtcaaagtcaaatgtggttttcaccatttgtcttttcgcctgcaaaatgacgcttctgcccttgcgcttctctcttagtaactgttgaaatgtacggtttagtttagcaggtttagttacgtacactgttccggttcagttgaagattttttgtttcacgttgacgcgattcggttccgttacaagtgagattatttccattattccgaagtgacatcaacatttaatgcccccaaaaagtttagatgtgactattgtcacaattaatgcaaaatcatcattacatcaaataatattaaaaaaattattgataataattaataaaaaaattgttgagataaagaagatgaacccaagaacaaagaattattgagaacgtacattgctgctgaagaagtgttgatcttgtttttgtaccaagtttggagccaaaacaagcattgctcgtgtaagtaatgaagttcttttaagaagttttttgttatgtcatattaggatcttgattgtgttcgaactccatttttttatcataaaatttgcaaaatctatatttgtttgtttaaaatagtcaaatgataattggtatttaggtttataaatgtgtagtatcgacattccatttgttttttatatgtatagtatttttcagttgcatttaatgtgtgtctcctgaatttatgatgcaggtgggttatggatattcccgtatttactatggtcggtgagtggaaatgcaaagaaggagaatggaaatttgaacttgaggaaggcatctttggtcgttgtgtacgcgttcaggaaaccatgacgtacacggactttgtccatacactccgagaggctttcagtttgaagtccaccgagatcaatcccataattagctattggatgccgggagaaatgtcagtgctgatagatactaaacgccctcatgtatacattgacagtcagatgggtctcgaaacgttttttttggttcgtggtgggtatctttctctcaacttgttcgtctctttcaataatacagtgaaggcgttcgggaatactgtctctaggtctcatggtgaagtttctgaaagtgaccgtgtgtttgatagtgctacaaatgttgatgaaaataatgaggatgcagaggaacaagccgatgttgaagacgatacaacagaagaggatgaagtggaggagggcaacgaagatgatgatgggtgtgatgattatcttggtgtggatggatctattgggggaagtaccacgtatcctaccacagacggtagtgaaggtattggcgaagaatacgattacaacaagtggaacgatgtaatagtagaagaatatgtacaaggaaatcttgaggaagacatcagtctcactcaacagactgctcaacatccaggggaattcagtcgtttattggaaacgtgtacgtacacgagtgttagtgtacctggcggagatacaggggaattcagtcgtctcttggaaacgtgtacgtacactggtcttagtgtacctggcgaagaaacaatttctccattgggttacggtacacgctgcgaagggcaaagggattccaatcttatttgtataaacgaactcaccggggatgaagtgatcgacggtattggagcttcctcaactgggacacagaatgataatggggtagttaccgcagctgagtcttaccaagtgtataatgaatttcctaagttacatggtggcgagttggcgaatctcggtaacgatgctgctcctgtgttcgatgacttactcaattttcgagctgatgagacacaggttgaaatcagcaccacaggcgaaactttgtttgttgaaagtgtttttaagaatagaaaagtcatgcaacaaacaatgtctcttcaagcgataaagcaatgcttttgcttcaagcaacctaagtcatgtcctaaaacattgaagatggtgtgcgttgatgagacttgtccatggcaattgactactcgcgtcgtgaaggattcagaaagtttcaaaatcacttcgtatgctacgacacatacgtgtaacatcgactctcggaagaactacaataaacatgctaattataagctcctcggggaagttgtgaggagcagatacagttctacgcagggtgggccgcgagctgtcgatttaccacagctactcctaaatgatctgaatgtgcggatttcatattctaccgcttggagagcaaaagaggttgtagtggaaaatgtaaggggggatgagatagcaaattacaggtttttgccgacctatctgtatcttctccaattagctaatccgggtacaataacacacctacactatacaccagaagatgatggtaagcagcgcttcaagtatgtctttgtctctcttggcgcttctatcaaaggtctgatatatatgaggaaggtagttgtggtagatggaacgcagctagtcggaccttacaaaggatgtctccttattgcatgtgcccaagatgggaacttccaaatattcccaatagcttttggtgttgttgatggtgagaccgatgcttcttgggcatggttttttgaaaagttagctgagattgttccagacagtgacgatttaatgattgtctcggacagacattcatctatatacaaaggcctaagtgttgtttacccgagagcgcatcatggagcatgtgctgttcaccttgagcctaagtttctgagccggccaatatagtgtacgcttctgtgttttctcggtgtacgtaagtttatatataatccacctgtaactatgtacgttgtgtacatatgtttaaactctacgttcgtataactatgtacgtttttgtctgtgtacgtgttaaagttcatgtaataagggaacatagaggtggttgctcaatattttgagtaatttgaaataagttttttgaaaatctaacttattccccctcttaaatgaacggagttggagacatagttgggtatattgtggttgtgttggtatttaatggaaaggacgtaactgttgctgtttattgtcaaatcaacgttataattaccttatatgacggttaccaggctattaccaaaaatttgaatcaagtgtagttggaaccgcattaataactgtagccgttccagatttcctctatttaagtctcctcctttccttaattttatccacaatcctcattctaaacccatttcttgtgccggcagttatatcattcactaaaaaaaatttagtctttcgattcgcttgttcttgctatccgtgagatggaggggtttcatatggtctcagaattgtgttctctgatcactgggtggcgaatatatgtctttgtcgtgagagtcttcaagaaggttatatcgcccaacgtcttcgaactcggccttatcctggcagattacgcggtaatttccgtcaaatcattatgtgtttttctcgttcattcgcttaacttgtatattaaactgtctactatcatgttctgtatgtaaagaataaccgtattgaggccaccgttgatcgtcgccttgctccgttttacgaagaccgattcgttgaaaatgagtggaagacgatcacctctttcttggtccgtaagtcaactgactcagtcagagcaacaaagcatgaatacggcatactatttatgtatcggaccgtcgtcgttcaggccccaccgagatcaccaccagttccagatttcgatttcgatcccttcgactacattttggagaaatctgcttacaagaacgttttagtcggtgaggaggaataactccgatgcttcatttattacatttttgaaattttttgtttattatctttgtttctccatcatctagatgtcgttggagcgttagttgatgttggcgcattgactacagactattacggtctcaaactgagtttcgagataaaagatagatagtaagtgttcttttcatttgttttatttacaatgtcactctaaacgctaactgtccttatttctaacgtagcaataaagtcttggagtgcgaagcccgcaatcaacaggcggagtacttggatggttactttcagagtttgggtaagggaaattttgttgtcgcactcagcttttggcgtctaaccgaactgtctaacccgaagcttgagagccatggtgctatttcaaaggtggttgccaatccggacagaccagaagttgcggatatctcgatggtggtgttttagctagagggaatgaaccattattctccgttttaatataatataagactacatttcaattaagttttctttcccagttgttgttgttgtttccataagaaccaaactacatttcaatcgttgttgtttcctgtttccgtttaaatgttaatctaatttgttgttttatgtacgtgccttgttttattgttcaaatcctctcgcaatgtacgtatagtttctggtgtacgctatcgtgtacgtatattaattttggtgccttcaacatcaaaaactattagatttatacttatgttgtgtacgcaatttcccaatgtacgataaaccaagtttaatgtactatatagtgtacgtagacgaagacatctagtaatacttaaagtggtaattcattcaaaagccagaaacataaaaaggacaggcagtttatataaagggaaattcataagataaataaactggaacgattcaaaaaacataattttttcaacgaagcatacacatgtgttacaaaatatgtgtgcatccgtcataccaaaagacttgagagtagagccgagtagagtagcttaaaccttagcagctttgcttctagcagaatatagcaatctccttgccctacgcaactcggcgggtggacaaacctccaagacctttcccagcggcgagcattttcagtgtgaagctggctgatgtgatacatcaccatctctgcaaccgcgtggccagcttcaagggtgggtgtcatttcccagaacttttcgctgatcgggaggaaatccaagtgattaccggtacacgtaaggaacaaaccggttgcaaagcaagcaaagggatcagataaagcgaccgttgtcatgactgaaaggccctgagctactgtcacgaagttgctcgcttggcgaacaccttcaaggtaaaccgccgggatggatccacgttctacaagcagctcgaagtatgaccggaaggtagactccggttggagtaacgacggccacgtcatgaattcatcgattgcaagggtgttgatgttacaactgtagactaagttccttagcgtctctatgggagtctggctgacggggaggtagttgacaagtatgcttatggggtttggcaattggattcctaggtacaactcggttggaggggttagcggaggtaggaaaggcattgtttttcaaacgaggaggtttagacggattcgtgtattcaactaagtgtgtttgacatgagttttaaagaggagaataaccatcaatgtaagtgggtgggtgacgtggatgtatatttagtgcatcatattagtaacttttaatttaaacaaactactgtgtacctctcataatcgcgtcgtgtacgtctataaaatactcattacgttttctgacagaaggttgagttgacgtctgtttgtattgcatataagtggaacaatctggcttcatgtatagtgttatattaggggtcaacgcatttactaacaatcttttcaaataaacattaacttacttattttatctgccaaatcaattgagtacgttgctcgggaaccgtgtacgtctaatagagatattaatgagagtgtgatggaggtcacttctagagtgtatttgacagcgagtaattaatatggagcgaaatcttctagatatgggttatacgacgtcaaatcaaatttcctttcgtcttcatttacaaactatatcgtcgctcactatgtaatctttatagttggaattaaactatgccacgtgtacattatcatatatcgtgtacgtagatattttattattttattattattttgtgttaatgatgtctcatattagagtagtttgagctagtatgtttgaataaattacgaagtggtaattattaaaagcaaacttccattactgataatcaacgtaaaaagctcacatattgttgcatagaaaacttataaatatgacaggatcatggcgaatgtgagctctacaggatctggctaatccatttagcacacaaccagatgtaacattggttgcaaagattattgaagagtctcgatctcatgtaacacatctccgtgcattcaggagtgcttacgtcaccacatttcgggtacgaaaaactgttagcgtatgtatattttaaagtattaccatatttctttatatcttctagcacctcctcacaaatgtcacgtgcctcctccgattccaaagcataatggttgcttccgaagagccgaaggtagacaccacccatgtgagcattaccagcacatatgtaaagaatagcgcatgcaagggttgcagcggcgttccttggggcgattcgctctaagtgtaggatagctccctgaatgtcagactcatgtgtaacgagacgcagtccttcatggtaaatagtcgtggggttaccagcttgtaagcaccgtttgaagaagggtctatagcgaccttcggagttgatgtcatttggatcgtggcctgccgcgtagaagtcatagggatcgttgcacatgctgaaaatgtttgcatctttgaggacatcccattcaccaggtgttagaaggttcgcaaaaaactcgttgggcactttgcgaaacccgaaaagagtgtgaatcctgtaaatccaaaaaaaatatttgataacaaccttaagacttggaaaaatgatgattgagatattaaataatccattttaatataatgtacttacacagagggtcctttaatgatattgctgaattcctctacttttgaagggtcaaccatgtccagggggttgtatgagacatttccagccctgataacaacctctatctgttgagttggtacatcgggcaccaaaactgtttttgccttaaaaccatgaggatgggcatcatcctgttcatagacaagttgcttcttcactttttttgggacctttggggacgattttttttttcttttgcttcgacagcagcagcattgtctgattcatcctgttaacaaatatgattgtcaacaacagtttcatacgtttttctatgtttaaaataggtacatacattatttttaggaatatcggtcttgtctgcttcatctgaccctgggttaggatcctcagttcctacagacccctcgacaatacccggctcttccatgactacttgtgcaagttaacgtacacaagtctatataatgtacacatataatcctatgcatgctattccgaaaataggaattgaaacacacaaattgttacctccacatcagtagttgcagccaaatcaccaacggctttggtatcctactcccgtatgacctgcataatataaattttatacatttgaacagtaaatagtacattttatttgttgcaagagttagcttacattgttaactacttgaaatggtgatgagggatcactgtgggtcttctcaggtatttcaacttccatccttgtcactaatttggattctcctgccgcctcaacctgtagaatttatcatcggaaagaaactttttagtaatgtatgaaacaatatatatgtacacagaacatagtgacaaaaatgtacgtacacttgtgccaggtacgtgagctgtatctccatcagaaggctcataagtttcttctgactcgctgccattagctacagtcgatgcactggcatctcttgcttcttcctgaaacaaaaataatttgcaaagtcttatgggcgtacacatatggaaaaagaacaagtgactaacacatacctgtgcagatgttgaaggtaaacctgatggattgtctaccatctctatgtcagcatcagctatttcatcggcccctgtatgggtaccaattaagccaggttcagcaacatcctttggtccattatcctgaaacataggctaccatagagttaagcgttagataagtggagaaattaatgtaatatatatgcatatagtcatggaaatctgtatataacgattaccagaagatctacctctgaaactcttgcagacacattagatggaacttcttccatctcggtgtcaacagtagcttcttccacaggcctctcttcctgtgtaatatagacagtccagacattgaacctaagaagacagtcttaccaacaacaatatttcctctatcctgaaacatagtttaactaacttcttaagcgaatatgtacgtacaccatttaaacagattgttaagagtattagtagacgacataccagatgggattgtgtggatccagcataaggaactattaaaaatccagtgtctaatatctcttcttcagcggccgaagaatccaatccatcatttgcagtaaaatcactttcattattagcgccatactgtatcgaagtagacagtacagttatacatatggattataaaatatttagcaatgtacgtacatgacttacctgttcatcaatgaatccttgcatatcttccttattggaatcaggtagctcagtagtgtcaacagcaaaagaaacatttttcttcggctttgaaggttttcttcttccgccgacagcagtggtatgtactccagggacatccaaatcttcctctttggaattacagccaacagaaagtgcaggagtgtccacatcatgagaaacacgagtcagccttgaagactttctcgttccagtgcttccttttgtagacatccttctcgatggcttcttcgcagtaaccggtgccttatccatagaagtaggtggttcccgcgaatcatgggaatgtatggtttgttctggccttttgccttttggatcaagggcagcacgtatctggtcacggacaaagtctttcatatcttcatgcatttgatacatttggtcttccagctccttgaaagacctcctcatttcaacaataaacctctcaggcacaggctctccaaaacaatcctcagcgttctcttctttatcacagtccatttcagatttctgttttttcatagcaggttctttagggctcgggcccggtgcatttcgtttcctcttaacatctacaatagaccagttgctgctattaattggttttcttctgggtgcaataccaaaaaaaaatgtaaacaacctttatacttatacttacctgtctcttctagttgtggtgggcacaactgctttggtactctagcatagcctccaacccattcatcctcctgccactggtgcccatctatcaacagtgcttcaatgtaatcaacccttggatcatcaacttcatcatcccatgaaagagatggaggacaaacattatcagctggtttcacaatatagttgacctcaacctacacaaataagtatgttaaccatagataatgtacatttacttattatgtacgtacatacacaatttaacacacctcatcagcagcctcacactccaaaatgcgagatgtccggattgctcgccgagaggcaagacgatggatagacctctcagcaaatgtcctgttaggtacatcatcaggtcctagcttagcaattgatgggattgtttcgaaagctaaaagctggagagctaatgggaagccatggagtgcataagaccctacaagtaaaccccttattagttgttgagcatcgtaaggagtttggaaatttgctatcctccccaaagtacgggtaaaggacacccttccccatgggtatttgcagaagaactccaggttcttagtcatctcgacagtcttcgaagtaggcctgttggggttactgtgggccgctaccacaccgtcaaccaaaataataagagatagtgccagttgcttccacccctccatgctttcctcctcctgcagccagctcaccaaatcagcaattgttggaaccgtgtccccaaacctctcatcaaacagagtcttccaaacactctcacactcaggtttcacactgataacatcatcaacgtctttcttcttgggatacttcccacattccagcccacttaggatactaaattctcttaatccaaatctgattggatgaccgccgaatacaatccacatctcattcaccttctttgtcactaactgacggcatattagtccaaggacaagcttagcattgaaagatgccttgtttttgggtattttaaaaagttccccaaatggagaatcgagaagaaactgcatctctggtttcccctttagtacatttgctatgtcagaaatgtactccggtttagagtacgcgttcatctttgtctcggaagggtaccggtctagagcaaagagtcttggtggtaactcttcaactgtaagatcttcagtcggagcaacacttggactacctgcaattaaaagtcatatactgttaagcaaaccgaagtagtgtacgtacacagacattttccagattataactcaaaatcatatttttggcggaaacagagatttccaattctacttctcaatttttcatcctaaagatatgctaaattccgacaaattctaaccctttaatcaaacaagctttacaattctgatacacccaaagacaacaaacggtaaattagagattctaacccagttcctccgttgcctttgtcgaagagcgttttctccgcggggaaactcttaatacccgcttctccttccctggaccatgctgcttcctcgggacttcgtcgttagctttattcccagccatagctaaagatgctatctcgctggaggttcaaattttgccggaataaacagtaactttctcttggcttcgccgggaaaaacagtaactttcacttccccggatgtgggagttcagtggctcaattcaactacccaacaatttgaagttatgtcgaattttgaagcaatggatactgaatttcgtttcgctttctgattctctcgcaaatctctccgttactctcttctctttttcgttttctcgggtttcttcgtttcagtttttttttttttgtcgttttcaaaactgaacgcatcaactaaaccgaaaccaactgctgtagggtctggtttacgccatcaactcaaccgatacgaactgctgcacggtttggtttgtgccattattaagttttcccagggtaatttggtccgaaattgaatgaaaacacaaaacgtgaaaaccagttctcactttgacaaacggtgagagcaaatcttttttcgtccacttctgtgaaaatttcttttgattcaatcggtctgccacgtgactcaaacaaacttcagtagatctatgattcgtaactgttttaggtaaattagtaaactatactactataatttagttgtagaaccgaatttatgtttggtcccatatattgtctagatcagcttcaagagcaaattttgacagatgtatgaaattgaatctaaaacaaaaagtttatgaattggagtaggcaagttgcactcacttccaataataatcacatatgtttctatatggcaatggggtcacatatttggtctattattggggtaacctgtcataggagtgtccagtccagtttaaccaatttaaaccgaactaaaaccattaaaaattgatccgcaaatgaaagaaaaaataataccgatctagatttttccatctctgagctgagcttacgataacccaacacaaactgtagaagtaaacctctaatgtattttctcaataaccgaagccataccaaaccggaccaaaatatggtatactttacttgctgtctagctacatgtcatttgtgtcttcattttcttatgacttgaccaagtgtgttttgaagcttgattcttgaataacattggaagctactttatttttttttgtaaaccaacaatggaagctactatagttctatagtttgttagtacttaagtacgaaatgctttcgtgtaattctctaggaaagcttatgaacaacggagcagataatggagcctttcttagggacttggcatcgtgttcttgtagggatttaaatcttgagaatcttaacatgttcttgtttgtttatacagaactaattaacgcggatgcagaggatgcgagttgtagtagcacgcctagttggagaatcaagaaaagtctaacatgtgtttgctttaaccgcaagagagcttatgaacgcatttgctctaacttgacaccattgcaggttaacacaaatagaaacaacagctccattaactcgtttttgtatgacaacattcaattttctaagtctgatttttttttttcatacgaagaaagactgaagaggttgaggaaaagaatgaagaattactatgatgcatcacggcccgatcatcaggatgcattgagagcactgtgatcagctacgtatgctgatgaaaagcttcaagatttgatctcagaccagtggaaaaatatgggatggcaaagaaaagatccatccactgatttcaggttaacctctctcttgcttgagtaaccatacatgtcagatagtgcttaatttggttttcttgtgactgttgttatcagaggagatggattcatttcattggagaatcttcgattctttgcaaagactttctcggtaaacttaactctcataactttctacttgagagattcataacctttttgatgtttttcgggtggcattggtgtagacttcgtttcagcgtctcttgaagaaacagggaggcaaaagagcagcttgggaatatccattcgctgtagcgggcgtcaacataaccttcatgatcatgcaaatgcttgacctagaagcatgtgagtgtccctaatatcttgctctttgtttgtgaagcaagaaaccttgttttaatacttactacatttgcagcaaaacctaggagttttatacggttggtattcttacaaatgttgtcaggtgaaatatggaaatatttggttatgatgatcatggctctctggtttacttgatttttaactaagtttttggaatatctagaaagcgaatgggcctttggtttgctttactgtgttgcctttgtggtaatggacaagcaatggctggacaagaacgccacctacatggaattcaacgtgagtcgatcatctttcggtttatattgcttggttatggtgatggcgatgtgatgataaattgtatttgtgtaggatgtgctaagatgtattaaggatatcaatcatatcctacatttattaagaggatcaatcatatacttgattgcaaaggttaaatgttcatatatgtaatgtcgtatatactcttctttattacaatttgtataccctagctggtctctctcttgtatatatattgtaatgtcgagaacataataaatcatcagttcttccaacatctatatggtatcacagccttgattcataaacctgcaaaagaaaagaaaagaaaaaaaaatcttttcttcttctttcgatacacgtatttctatagatgtacaaggggcagcttgagagagagctgatgatggatgatgttttcagaattgaggatatgccttcattctctcttctctcttagttttttactaatcaattcttgttgtcactttagatttagacaatttcacataaagaaactcaaagaggttgatttttttgttttacaaatatcggactggtaagatgagagaacaagtttgatattaggaattgctagtatatggtatatattgtaccctgtgagttttggtctaaattcaccaagtatgggaaagactctattcggtatagagggttcgaagttcaaatgaaagcaaggaagagataagagttatgggtcgcttagagggttcactttatgcgccaagtttgagaaacaaaaggcatgtcttcttgctctctctctctcgtcactttgtcgagttcgtacaagcagacgaagaaggaagctctcagaatctgtgtcaatcaaggcgccctcgacatggattcagttacaattgaggaccgtaattgaaggaagaagagcagacttgtgtaagatgttagcacgagctgacgggtaaccattctagatccttctctctgtctctataagaacatagtggttcatgttttgtagttaaggtgtgagagaagtttgtaacagagagagaaagttgtagaaccctaaaggctcaagtttagagtaagttcttagtggatttccgagaatatctcgacgagacgtagggattcaagtctgaatcctgaactcgtaaaattcctgtgtgttctttactttcaagtttctgcaattacaaacgagtgaactaaagagtgagttgagagttctaagttttgacaaagaacaactcaaaagcgttcaaatcctcacatacccttttcttactttttaatatcttagcttttatatatgaatactactgtatattgttaaaaatattatatattattccaaattcaccgtttttagtatgtaaagagtttatcaaaatctcataatcgtgattcatgcgttataggatgctttcaagttttactttgagtttgaagaatagtatcatgtgtctttcttcttaaatccaaatacactattatcgatttttcgttaaatttaaattaatcattttactaaaagttaattttttgtggttgagacatcacattatatagtgctatttggaaatttatttgtaagcgtgttacttcatcttttttttacaaagtacatttcattcattttttcataaaactaaatttatacaacaatccatatttttcttgattttcacaaagtttatttctgttttttttttgttctattttttttttttcttaacaagatttaaaatgtatgaaagattaaccaaaaaattaaaagcaaaaaataaatgtcatgtattttaatgataccataacacaattgtttgtaacatatcgcaaatttcctatttaattttatcttgaatgaaaaattactttatttttcttcaatttaattttgttttgtaacatatctcacaaatttgacagtattaatttaaagttttattatattgtattagaataattagccgttatgtttataagaaagtagtttgatatacttatatatacatatttaccaatcacgtttttatggatcaattatgaataaaccacttttttctctatgccattgtcgaatccagcatttttttagttccttatagatataggtacttataactcaatacattgactgttttatcttccaattcaatggaccattatgtttcttctccttcgcgtttatcaccggagcaattgtcggagatgtcatcaaagtcaatcgctataacagagaatttgattatttggtcaattgcttctccatcacctcaaccaaaatttcgaagttcagatcaatgtgtggtcgatcttcttcttcgaagaaacagacagttatcatctatacgtcttctgaattttaatttctcgatatgaatcactatttcatcatctctcgctttattttaaaaacggaagaaggaaaactgttgaagtttaaatagatttgattattgttcaagattggatcccttgggttcactatatagtatccatttagggtttagctttcttcaatcaacaagcagttaattgattctattgggttaatcggaatatgggtgttggtcgtagaaatgtttttgagttgtcgaagaagaagatgatgttgatgaaattccaggggtgatttcgtcaatccatctcacaaaaaagcctaaccctataagtccattgcgaaagtgcttaatttctcatttttaggccaaaaagtactcatttctgtaaaagccccccttttatatcatatcactatcttcactttatcatcatttctaacaaaattttatagtctcatgttgcagtagacaattaattatagtagaaacattaatacctttgcaatttttatgatataataattatatcttgaaagataattatctaatataaatagtaaatttgtttaatatgacatataaattgattttttttaagtacctaacataatttaattataaaatattgcatatttaactatattaatttcaaactcatataatgcgtaggactcttcctagactatggtatcaaatattgcatatatactttacttatgcatagaactcttaataaaatattgcatatatatagtattaattaatggaatttcttgtacttgtacctgagcgagaaagctaacaagcatccaccaaaaataaagggaaactacatgcaataccttaaaggtttttgttatgactcttcaagcaagccctttccttgtaccacatgacatttaccatcaacaccttgagagaatagcgaaattaagtaactgtgttgaacacatcaatctcagcaaaaaaattctcaaatttgataatcttaagattatgacgatcgttgaagatatgcacagtttttaaacagtatatatatatagaaagagcggtgagttttggatgagagagtgtgtttgagtacaattggaacagatcgatccccttacttccgttaacttgaacttttaaaagtgagagagttttggtatgttttgacgaaaaagtaattgaatccaagtttcgagcacacaatctttactttggtgtgcataatgatgaattctagagcccaccagatgaccattatgattgttaaatggaatgttccaactctactttgcactcgcaattggataagaggttttgcaaaatatgaaggtaacactttatgaacaatcaaaatggttatctggtaggctgccagcctgccacactagtgtaaagacaatgtgcttgaaacttggattcatttatttactttctagaaacgtaccaaaaatctttcactttcaaaccttcatactaaccgtaagggagtcaatttgctccaattgtccccaaacacattctcgcatccaaagaacacaacattgttcctatatctatatagtttaaaaaccgcgtatgccaattcaacgactatcataatcccaagaatctcaaacttgagaaaatattcgttgaagtttatgtgttcaacacagttatttcattgtatcattctctcaaggttctggtgctaaatgtcatgttgtacaacaaaaggactcgcttgaagattcataacaataaccttaaggtcttgatgtggcatcctctaattcataattcggttctgaatgtacgacatccctgcgatggacaggctctccccgcacttaagaccactacgaacggctctgcatgcgatattctagacctccgataagctttgcaccattaatttgcaagaaattgcgttctctgaaactcgaaccccaaacatagtgtataactattaatgaacccttggttaatcactggactaagggatttccaccctcttccatcgtttagacaatatacttgtcttaacagcatcttatgcgaacatttccattgggattgtaacaccccgaccatcatacttagtgggtcccacattctctcttggtctgtgggctcatccgtatcggacgaccggtccactatcagaaggctttaaaggcttgtttaatgaacctacaaatcactacatgatctttctctatattttgtcctcactcacacggttctgacaatcacttctccgaatatcacctattctgaaattgctccagcataagcacatttaattgtggagttctttttggatatttgaccggaaatatatgtgtactttgttgacatagatgatcaaaataattcttttaaacatctatgcatgaattaccatattcttgaaaccaggatgttacaaacacccccactagtaatagctcctaaaagaaaatgaaaagtttttttatttttgtaaaaaaaatgagaaaatcataaaacaaaatttaactcgatagtggcatatgaaccgaccaaaacgaaaacaaaattacagttacccaaaattaggtgacacagacaaaaataaatgaagcaatgatataaagattggtttttctctgatttgggcacgaccgaaacaaatgagaaatcctaaaatgcattggattctctaatcgtgaagagcatcacggagatgttgtaccaaaagattgattcaatcgaataccaaatgataatcagaaatgaaaattgatgtaaacataataaccaaaccaaagtaaaatttgatgtcatgaaacaattggagtaaacatctataactcaatttgaaattagagaaatgaagcttaaagcttaccttaaaaagttgatcgaaatggagataaacccaaaaatggagggattggcgatgattcaaaaaagaatcaaagatgttgttgacacatgagagttgggtgagagatacgattcaaagtctttttcggcggagaacacaaagttgtgtttggtcaaagctggatttgttttgattttgggtatccatcaaagtattattgggctaagccaattagacatcattatccttattatataaagtatgaatcatagaattgtgtcacatgtcaagtctatcaatcaaatgttgacatgtgttggaaaagagttgactcttttttctcttaaagaaataaaaaaaactaaaaaatgaaacaaatcttattctataaagtatggtttttaaagttaataactcatacaattgtgccatatatcaagtctatcgatcagatgttgacatgtgttggaaaagagttaactttttttgttctctcttaaagaaatataaaaaattacaaaacaaacaaatttacatatactatgtctaaatctaaaaaaattatagtttatttttcttaaccaaaacaaaaattaacaaatttgttttggtcaattaattttagcatgtattaatttggttctaaatcatttagtatggatattaactaataaaaatgctatttgaaatttgtattttatacaatgtttgttttccaaatatttttgcgtattttgtttttctagttagttatgtttggtaattgttaattattttaatattaactaagatatagatttcatctcatataaatataaatattattttgatataaaactgttatcatttaagatgaagtgtgtatagttaaactcgagtttattatgatgaaatagatagttaaattgtattgtaaaattgaatgtggaagatcgaattttttttctttctaaatgctaatttaaatagaaacattgtgtacgttagtatatagaattcaaatatcatcaattaatgtgtggagaattaaaatgtataataatataacactgaaattttgtttaaaacaaaattattaaattaaatatcaagaaattaaattatgtacaccagtattttactattcaaattttaaatattattgataaaatttatatttatatcttacactcagcctatttagtaaaaaccaaatgttttttaattttgttctttttttttatattcaagtcgagttttttttgaaattaaaaatactgattgttgtaaacactactagtctactatacctctaaatcttaattatataaaaatttcatcataatatataaaacaaaattaagagctctcataatatatgatattgtatgggttataatcgatgttagtacaattattttacgcgtgggttggtttattactttgataactaataaaaatttaaacttagaaacgtttaatatgacatgataaatgagaatatattataacgctcctactaacattttaaagattgaaaataagacaaaaacgtaagatattataaaataacatactatatgataatcttatagacatttcaataaataaataaattatgattttaaccaatcacaagggtacatctctacaaaagaaatacaattgttctttgtttggattttacttaagtttaagatgtctacataatgtaattaaaaagtttaaagcattcagaattagcccaaagacgatataaaaaaaaaatggtaaccgtttaaactggtattaatttactagacgatatcacataaaaattttctaaaacaaattgtattaattcttgttataagccattaggagaaagagaaactagtattgttgcatttaaaatattcagaattagcccatagattttatgtcacaaaaagaaagattaattatataaagagagaagaaaacaacatgaaattgttttgaaatttgtctttttcactataggttttgtcacataagactagagatactatttagaactagattcgaaccaaatttcatcagaagtatccaatactaaggttcttattaccctttggaagttccatcagttttgcaacggccgcttctatataaaacttctcaactggaggaatcaaagacgtctcgatcatcatcgtgttcatcacggtcccttgcgttataaaacgcgaagctaatgcaaactgtttcttattcaaaccactgaaattaaacatctacaaagcttccactcgaaattcagcattgggaaatgagttttcctcctcccacattttcatttgtgttccaccaatagaagattcaccttcttccttatacacattgtcatgctatatatacaagtacatacataaaaatgtttcgcatttgatacgtattaattaaacagaagtgataaacgaaaaaaaaacattaaatttatctacctaaattgaagactaaaatgttcgtaccttaaaacatatatccaactttttcatgattccattccatgcaactaaaatttgcctgaacatctcaagttctttcgtattcattatatccacggccaccgccaaagatttaagcctccccaaatagttagcatcgctactcatcaagaacctatgtccaagattttccatctccttttgattcatataaacaacttaaacatgtcaaataatttaaatatcattttctatatatatagatatgtaattatataacaaaaaataataataaagcaattgttgcttgctagtatgtactcgaacattatatgaaatgttatagttcatgcttggtactctctccgggtctatagccccatagtttttagtaaagaaaagtcttgaggactttatgaagaagttatattccctatcaaatatgtagtcaatggagaaaatatccaaaagaggtgcagacacttcaatgctatgaacataataggaagcaacatgcaagagctttagattattgttatgaatcttcaagcaagccctagcatccacatgacatgaagcactagcaccttgagacaggacaccatgcaataaccgtgttgaaaacattaacctcagaaggatacttgggttcacccctagtggttaacccttttattcacctcctattttcttatccaattagaatgtgccatataattaaaaaaaaaaacagatttaattataaaatcaaatctaatcatttgtttataaataaaaaacaattatttaataacaaatctaaacattaccctgttttttaacccaaactgatatttaattttgtttaattgtaaaaaaaaaatctaaacccaaattctcttttataaacccaaactgtcatataaactcgtttaattataaaagaaatctaaaccctaattctattttaaaaacccaaaccgtcataaagattttttttaattgtaaaatctaaaccctaatttatatttataaacccaaacatatatataattttgtttaattataaagtgtaaatcctacatataattaacctcatttaattaatagtttacagattttatttccttaattataatatgacatgacataatgataggtctagaataaagggggtgaatacaagggttcacccataggggtgaacccaagtatttttcttaacctcagcaaatatattctcaaatttcagaactttgagattatggcatgtcctgaaggcgtttgcggtttttaattcgtattgatgtagcaagagtgttgtaagcttaggatgggagaatgcgtttggggacaatcggagtatattgacacccttactgttaccaggaatgtttggaagtgcgagagctctaatttgtttctgaagagtaagtaagtgaatccaagtttctagttcaccatctttaaattagtatgcaaaatgatggattgtgcagcccatcatatcaccattgtgatttttaataacctttaagagaacaaacataattattttaataagacacatatacaatataagttgtcaataaaagctaatttgtttgtctcttgtgcttcagtttcgctaataaagatttgtatgtgaagctatatataatatcatgtaactaagtgaattaggcaagagatttttttattagattttcaataactaactattataataatatatttacaatctatatatgctcaccttcgaatatattgataaacaatcatttaaaatttgcgtgcgaaataccgttagtattatgttttattattgcgaaaaattaaagataaaaactctttagaaacacctaacaacaaagataaacgttggtgatatttataattaagttttagagataaacgttcatagagtttttcctgttgtcttatccaccatggatttataatctgagattgttgtttgcctcgagttatctaaggttttcatattaactgatacatcctagttgatttcaaattggttcatgtatatataacctttcttcattgagtcaaaatgtaaagtaatcatcaattcattcataaatacaataatccaaaagatttccagatagagaaaatagagaaaaacctcggttatcagtttggcaacacgattagaatgagtgggcaaaggttccataattgttaagaaagatttttgcatatcaaacaagacatatggcacttgcttccatacagtcttccatcttttagacaagacacttgttttgaccgcatcttctgttaacatttctttgaggatcatgaccaacacattatctggaagtttactaatctgatcgaccgtatcaataaggatctgtttgcctcttgctttcaatgatagatatgcattcatggattggatagatgatgaaattgtgaaattttgagagagagactgatttggagagaagagagactacacctacaaaagatgatgataggttggttgtataaactccatatgtttgtttacgaagagataagaaggatccttcatcacttcttataatccagattatagacaaagaaaatatttgtttggtgtttgttattgtaatgaaacactaatttaagttattatatttttttaataaaattttattggaaagaaatccacaattaatgcataaaaatgctttgcggtccaagtagaaagaaatagattatttatagtaactaaccatagaatacaaaagaatatagaaactaactatggagtaacagtatcggctgagagacaatttttatacctttttctgacaattttaccatctctcttatatgcagaccctctctctcttccatccagattctctctcttttcaactcggagacactctctctcttccatccctctcaacacgttggatctaaaaattcttaagagactactcttgtcccttcaatggtcaaatatgaacttcaagagagtattgtttacccccttaaatggttgactgtgattttttgcttgctatgctcgaatcgcatgtatatatgtacttaaattatgcaatttttataaatgaaatgatatatattttcaacaaatatgatcgtatgtaattaaaatcatgctgcttttataaactacatgatatttttaacaaatatgattatatcacatgtacatgtaattaaaatcacgatgttcttataaatgacacgatatatacatctaaaaataatcataccacatgctatttctatttactccaagaaatcatgatattttcttatatcacatgatatgtacatgataaatccatgtattttttacatgtttcatgccatttccttaaattcactgtattctttctttcaccttgtactcggatctccatcgttaaacgtttctcttgtcggaaagtgttatcaccagatcgatcaacaccaccgaatcactctcacactttctctcctatttttccatgtcgatgatctatccctcttgctcgaatttttgccgtcaagctatcccactctcgccatatccagagatctttttcactaaattccttccacaagataaaatgtttttctctaatgagatgcaattgatctctattacatgtgtttccaaaagtcaatacacgttgaaactttctttatcccacatgaggatatttacgtcttttagttggccttatttagccagtcgaagttattttccaacataaaaccaagccgaagtcattaacttaatttagttccaaaattaggctatctagtaatattacccaaagaaaaatattatggaataaccaaattctgcaacaaaattaagtaaatgacctcggtttagttttttattggtaaataaccttgactggcttggctgcctacataaatgtagttgaaaagacataaatgctcttatgtgagataaagaacgtcatagcatatatttagcatatatttaaaataatatgtatattgaaaaataacatgttccttaacaaaaaaacatgtgttagaaatcaatgacttgtaattttttaaaataccatatcatctaaaaatgaacgtgttacataacaaaataacatgtaatgtgttttaaaaagagtatgttatataacaaaataacatgaaatttagagaaaattggatatggtacataacaaaataacatgaatttgaagaaaaaatatgtaataatgtaacatggtattttttctaaaaagagtgtgttacataacaaaataacaagtaatttgttctaaaaaaaatgcgttatataaaaaaaaaataacatagaatttggagaaagaagtgtgttacataacaaataacatggaatttaaagaaaagtccagcagatgaaagagagatgcggtggaagtttcgataaaatggagaaatatccagaaattcagcagatgagaagtaagatgcgagagggagatgatacaaatgaatttaagattcggccattgaaggggctaagccacccttctggaaatttgcagatgcaacgcttccaggaagatagaagagagagaatccactcaatcagaaaaagagagaatcaagatggaagattagatctgattggagttgtgggagagataacggttgtggtttgatggtagttgactagtgacggttgtggtctgattgatgttgcggatggtggtggaaagtgaatgggtttaagatagatgatgttgtttacgaagaagaaaagcttaggaaagttgtcttcacaatgaaaggctaaaatcgtcaaattgggtataaaaaaagtttgcatgccgatactgttagtccaaagttactttcttaatttttttacagtcaaaggttagtttgtatatacactcaataaaaaaagataaaataatgtttttttaacaataacttagtaatattttttaatcatttataattttttatgtgaatatatgtttcttttcaaagatttatgaaggactactaattcgaaaacactgattccaggtgtagtccctctctcttgactgagtaacagaacatttaagattcggaagaatcttctattcttttactaagacattctcgataaacttaagtcccaaatcactttctacttttagagattcacattgttgtgaatcagtgacaccgattcagtcccaactcgatctcaagtcacgagtaaataacaaattttataaaagctaaagcatatagaaaaccaaaatttaacgaattagttttttcttgcatggccattctcccacaaacatacatccactaccaatcaaggtttacacaaatctctaaccgactctcttttttctttttgtgtcaggtatacaaatcttagggaggaacaacaacaaaaaaaaaagtaaagaaaaacctttaggtaaagacacaaactgttttaacattcttactataaatgtgcaggaaaggctggagtttatacggttagtcttcttacctaggttgcatggaatcagaagtgtgtatgcggaagcgatgcagatgcttaggaacgtgaaaacgattttttagatatttttgaaagcaaatacgtatttgaaaaatatatatagacagtttcaataaacatatgatttaatttattaacgaattttagttcaggattttgtttattaaagaaatagttcaggatttaaaaatagatccggccaatgttgaaggtttctttcaataaattctctatatatatctataataaaacattaagcaatatatcatattaaaaattataactaaccatacaaatctaatacataaattttcaatacctcaacaacaaataaaattcaaatagttcacgtttacaaaacaaatattcaaatatttcaaagtcaataatttagatcactatcttcattctcattttcctaattttatcaaatcaaattgtttgaaatttcgttttatccattaaaacattatcaaactcaagtttctccaaactcatttaattcaattaatcgttccaatatcttccaataaatgtttcatgccgttgtcattttcccaagcatatggtacctgtaaaataaaatagaaagattagtacgataaaatactaaattgcaaaattagttttggtttttgtttttatgtttgtataagaaaactatcaaaagtaatatattgattatttatttattagtgacagcaaaaaaatttaaatggacgcgcaaaatttcaaaatacgtatatcaattgtaagtttctaaagagcttccaaagtcaattttttgacaacgctttggaaacaagattccgagagcttccagttccgactccgatcctgaatgcggtgataggttcataaaagccattgcaataaaatggtattttttgtcatttaaacttaaaagcattcaatattaaactaaagattttatgtcataaaaaaaaattatcaatataaaaggaagaagaaaactacaagattatgttttgaaatttgtttttttcaccacaagcaatttgtcatatagggctagaaatattgttttctactagattctaaccaaatgtcataagaagcattcaatactaagattctcattaccctttggaagtttttttagtttggcgacaaccgcttcgttatctaatttctcatttgcaaaaagcgaagacgtcttaatcatcatcttcttcattgccgtcgcttgtattacaaaatgcgaaactaatgtaaattgttttttatttgaaccgttaaaatcaaacatccacataacttccccacgaaaaatcagcattgggaaacagatttgcctcttcccactttttcttttgtgttacaccaatcgaagattcaccatcttccttagagttagagacatgattatcctatatatatatatacaagaacatacaatgtaaaaatagtgattttaattaaagattgttacacatatacaatgtaaaaagttgtcaataaaagccaattcttttatatcttgtgaataagcacttgatcaattgttaaattcaataaactgaaagatatatggcaagagatcattttttatattttcattaactactataataatgcattcaaaatcagtggtcactttcaaatatactgacaaaatattttttttaaaactatattctctccgtttcatattagttgtcgtttttagaagttaaattttgtcttgaattaattgtcgttctcgattttcaatgtatttgtttgacagatttttcaattctatctttattctttaaacttattaattgatgatatcaactaaaataatacattaattagagataaaacataaaaatgagtattttcttaatactagtgaaaaaacttaaatgacaattaatttaagggagtaatatattttttcgcttgaaataccgttgtgattaccttttattattgtgggaaaataagataaaaccagataatcacctaactacaaaattaaacatgtttggactttcatgttttatatatatataagcaagtgtatttgattccaattggttcacgtacaacatttcttctacgaatcaaaatataatgcaatcatacaagttaagttaagggaaacatgttttgtattgcaaattcattgctaaacattataaacaataagtttaagcattcaaatattttcatttttatattattaactaagttttatgtataaatattatttcatacttactgtttttataaaaactaaaacatagtatggatttaaacgagattatgctgctgaagtaattttgagttactacaatctacatgaactaaccttttaattatgcaattcacatgttgcggaagtcactttctgaattcctctccgttattatatatgtaacgtttatatgataaataactatttcatattcatcattctaagaaaatcatatcaaaatttatgttgtaaattacattacgagctcttaaagtttatgaattatttgtagcagtcattatgtcgatgagttcccactaccttatcttatttagtccgttgctcgtgcctgtgaagataaaatgttttggtaaatcagtaaagaggtatgagttctatatcaaaacaattgtaaaaccaattgatataaatcacttacaaattgtttctctcgaatattgcttcttgatccttacaatcttagaagttatcatcatggatttgtgatgccaatcggattatgatcgtctattggaaaattgtggaatcttaacgttggaagtttaatcgaagagatagtgaaagtgaacctaaatcgacaatcatcatccgactgtttctttttttccttgcccaacaaatatgttatacagtagttaggctgatgatttattatgggcttcggttttacaattgggctttagtaatagtctattttcacataagtaaaatgtattggactttggtaataatcagaattcatgctgctaaatgtattattacaaaatacattactatatttattattattttgattattacaatttcattagtataatacataattagagttttgtaattgttataattattatagtgtcacaaattttatggttaaacaaataaacacattgtaaacttacataaaatttatatcaaattactattcaatattatcgttagattacgggtcatttaaattttgtacacacccggaaaaaattattttgtaaccaaataaaacaatagacatactaaacataaactacactccaaaaaacataaaataaaatcataaaataaataattaacatgcggtgtacctcgggtcatatcctagttggtataaaaaatgtaggagtctatggatgacactaggggataataaccctaaatatttccatgctctaacaagacagacacggactagaaattggattaccggattacatgatgagaatgggacatagtcttcagaatataaagatattcaacatatagcaatgtcttattttcaaaaattgttcacaacgactaatcctcaagatttggaggagtctttagtagaggttcaaactttaataacagatcaaataaatgattttctaactgcatcgagacaaaaggtgaggtgcaaacgacattacttataatgcatccggagaaggcaccaggcctagatggtatgtcatcttttttcaaaaagcttgggatacaaaaaaacggatttgttattctttgtaaactctttcttacaagatggagtttttgataaacggttaaatacaactaatatatgtttgattccaaaaacggaacgaccgacacggatgacggaattacgacctattagtctttgcaatgttgggtataaaattatttcaaatattctttgtcaaagacttgagacggttctcccaagtcttattccggaaacacaatctgcatttggtgaaggacgtctaatttcaaataatattcttattgcacaggagatgtttcatgggtgaagaactaacttgtcatgtaaaaggaaatacatggccattaaaaacgatatgagtaaagcatatgatagagttgaatagactttcattgaggaactaataagaaaaatgggcttttgcgaaaagtggatctcgtggataatgtggtgtattacagaagtccaatataaggtcctccttagtggacaagctagagaactaataataacaaaatgggggttaagacaaggagattcgctttctccttacttattcatcctatgtacagaagtgcaaactgcgaatattcggaaagcataacaagacaagttttacttacgggtatcaaagtagcaacatcaagcccttcagtttctcatatattatgtgtggacgataatttattcttttgtaagactaataaggaacaatgtggagtaatattgggtatcctaaaacaatatgaagcggtctcggggcaaatgataaaaaatttcaaatgttcgattcagtttgaccataaggtagatgattctataaaggcagaaattaaatcgatattgggtattagtaatctcgggggtatggattcttatcttttattaccagaaagtcttggggggtataagacaaaaatgttttgttcggttagagacaaattgcacactagaataaatggatggtcgacaaaattcttatcgaaaggagggaaataagtgatagattaaatcggtagatgctgcattgccaacttatgttatgtcttgcttcagactaccggaaacaatctcttccaaactaacaagtgcggtcgcaaaattctggtggagtacgaatggtgagtccagaggtatgcactggatggcttggcataaattatgcagtagtaaatcagaaggtgggttaggtttttgaagcattgatgattttaattcagccctattagcaaaaaaattatggcatttgattaaggttccaaatcctctttttgtgaaggtttttaaagagagatattttcggaaatctaactctttggaaaatataaaatgatactgtcagtcctatggctggaaacatatatgttcagctagatctcttgttaataaaggacttatatatgaaaagagtcggttctggggagtccatctcagtttgggaggacccttcgatttttccagcttaattcccgagatcagccattagtaatgggtcaattattgatccatctttaaaagttaaaaaccttatagatagtcggtcaaaattttggaatattgatctcttaaaggaactctttgatccggaagatgtccagctgataagtgcattccacttgggtgcgtcaacgaaagaggatactcaaggttggcatttcacaaaatccggaatatatacagttaaatcggtttatcatacaacgcagttagaaaattttggatgacaatttaacttttactagcccacaaatcaaagcactaaaagcacatactttgaaagtgcagtgtccgcctaagttacgtcattttgtgtggcaatattatcaggttgtgtgtcggtcacgaaacatttgcgaaaaggtataaaatgtgattcaagatgtgctagatgtgacgcattagaggaaacaattaaccatacacttttccaatgtcacccatccagacaaatatgggctctttcatagattcctattgccccaacgaattttccgacgacttctatttatgcgaatttggatcacttattctcaagaataccttgagaacttgattcttcttcatcttcatggataatttggtatatttggaaagtaaggaatgaaaaaatatttgagaatgtggataaagatccgctagaggtattatgtttagttgaaaaagaggcacaatcatagcagttagctctagttgcgcttcatagtgaaaatcaccgctccttgagattggaaaaaataatttgggtgagggatatctcatatgataatatatatttattcaggattttgctactttgtggacggaacatggaaaggaagcgataaattttcaggaacaagatggttttgtacgtcatcaaatgtacagtcaccaaccatgggagctgcaaatattcgtaaaagtctatctccacttcacactgaattcaaagctctactttgggggatgaagtttatgattggtgccgacaaccaagatgtagccttttttaaagactattcagaattggtgaaaatggtgtcttacccaaccgaaaggccgacatttttagcatatttggacgattttcagagcgacaaggaagaatttacaagtttctctttatatttaatttctcgtaatgtaaatgttaaagcagacaatttggcacgaaaagttcgtactgaaccgcttcatgtcacttatgtaaacaattttcctcaacattggctcttttgagctctaaataaaaactgatgacaagagaaaaaagaaaaaaaaaggtggcttcttacaaatagagataacttatgggtattttttgtagtcttcaaaacattaaattctagagactttttgttcgaccgcaaatggtatcgatcgacactggtaacatggtctgactctaaattcttctctttagtttaattctcttggttttactccaaaatgtctctttattttcaaacgcatctcaatcatataaatacctgtaatgacaataaaaaatattctaaaacgaatacatttatcatgggtaaaaacagtaaaaattttgatatatcaggttttatccaataatgcttttttctgaataaccgacaaaataaaagataatcttttctctacctgtaaataatttctcttaaaaatatctaataaaaaatttagtttgatttggcttttggatatgaatttttttttttctgcatgatttgatcttaacacaaatatggttgtatgaaatatgtctttgcaatgattttgaattttatactgaaaactagattttaagtagtgattttaaatatttaatgattatgtattatatataaaaatttgtaaatagtataattttgtaggacattcatatttttatagtttacaattattattaagcaaaggtatactacgagattatttttgtctatataattttatttaaatcaagctgattcgatatatttaataatagtggtgttaaaaataataaaatgagggtttaatccatattgaagcgatgaattaataatattttaaaaatttattaatgttaattcaactcatcccgctatatagtccatccttgcaatataatccgttttgtgctattttctattaatatgttcaaatttaataatttaaaaaatattgattttattctgcctcgtattgaagcggcgaattaatgatattttaaattttttattaatgttgattcaaactctgtccttccatgccaccataaaaactagttccgcaatttcatctgtctcggttttttttatatgttcagatgtttataatattataaattttttattgcttttgaatatattaattattatatttccagtgaaatgaaacatttttactaaaaacagaattagcacatattgaaatttttaaatttggatgcttgttgagttaaggtccctagtcattcggatttggattcattttgattttatttacagtgtgattatgaattattttctaaatattttagctaatgtgtgatgttaaacatatactttttcaataattggataatatatgttcgttttcaaaatttgaatcaaaatatatgaaaaaaaattgtttactttatgtattatacgattatccaaaaaaattaaaaaaaattaaataaagatgaaaagagaatcatagatttaaattattaccaaatattctaactatatgtattatttaatatagaaacataattagtagatatgatctaattttggtaatatttgtatccaactttagataaaaaaaacaatagaagagtcgggtcaaatataatccgatccacccaaacttttatgaataatatttttattaaattgggtatcatatgtatccgaaaatagtttaacccatccgtaaaaattatacttaaaaaaatactatagagataagtagaaaacaataaaacggaatgtgacaactaagaaaggataaataaatgaaaaatgttgaaataataataaaaaatgttagacatttatctgaagaggagaattaatacagtttaacatttgtatatacaatcaaatcaaattgattcgatttcgtataattgcgatcaatcactcttatatttcctattcgacccctctaccaattacaatattcataaaaaaaatatgaaatcaaatgttttctaaaagaaaaataaaagtcagggaagaagatcgtcgccgaagaggtaaagaagtcgttcaacagcccaactagtttgagtaacggttgagtaatcagtgaaagatggaagcaacggcgttcgacataggggacaagtacggtggttatcatcatcaccgccgcaacattcataatctagccatcggtcaatacaatcacgatgaaacacgtgagtacagttcctaagctctctgatttcgtcctcgtcttcaagatctcctagacacacggcacacatgtcgtttatcgccgcgggagatctctccaccgcgtcgcggaaagcggacacggctaggctttctttgatggtttgtgatgaaatagaaggagaagaggaggattgagatgatgatgatgaggaggatcttgagcggtaacggaggatccatgcaaagatccatcgtaaaacggtgatgataagtgccgttttgtagagaacgtggctgatgatgagactagtgtcttcgatgaagaatgtcattgtgaaaacttggagtagagaaagagaggagaagaagagggaggactagaagttagagtcatgcgtctttataaagacaacttaaaggtggtgatggtttggtttttcattggtgtaagtggctttttattttatttattttaactatttttattattatttttgcaaaagtatttatttatttacaattgtttttttcattacaactttcggtgtcaaattttctgttatgcttatctgtatccacatattttaatctatataataaattatgagtctgcattgaggatatatttttttttattcagctgttgatgttggaaaacttaatcagtcaaatttaatgtgctattaagctattttattcatacagtacaattgaaaattcaatgcatgaactgttagttagttgaaattgagtaaaaggagaagattaatgtttggatagagttctgttagttaatgtaatgaaactttgtaacataattttatatatgatcgtggaatataaacccttgaacacatttataaagttaaatgttactcagaggatcaatcaaaagagttttgggtgaagaaataagaatctaaaaatatctaggtgacgacagttgagagaagagactaaagtgaaatacaagagaaagagcaggagaaggtgacgttgggatagtggcgttcgtgtcacagtctgtgctactctggcttgcagtatttgcttgcatgagagattgagagagacggtgaggaataaaagatgatcgtaatcgtttctttttctcttccttttaccaaaccacctaaaaagagaaacatatatgaaaagaaaaaaaaacattttgacgtaacagattttagtatcattatcgttggttatcttttagaagcaatttggtcacattcacataaacctttaaatttgttactccatttgtggcttattgccttaacgattacgccttgttttctttacatatatattcatgtgctttttatgttctctgttagcttttacgtcagaaatatagtttacaaaaaaatatatatatatattttcacaattccaatatcccatattctcacataactttctttgggttttttcttttctttggttttcttttgattttcattacttatctattttaatttaacaaaaagaaaccgaaagaaaaatgattaaacaataaaaacttaaaaggtgtaaataattttatgatatttcacgaataaatttatagggtccgatggtaactaaaatctgttagctgttagctttttcgaaacaatgcaaagctgtaaaaaaaactatacgagaaaattataaaaaaaaactaagagtaaaatttttagcaacgtttttgtgattggtaattgttaaaattatatattttataacgttttgtaccgttttgtaaagtgattatcaatcaaaaccgtagttaagtatattatgatatgaatgatggtactagtgaatcgagatgatattaatgtatatcaaatatttcggcttacgtcgcatctttttcattatattaaaataatcttatacgtagcaccttcgttgaagtttaaatattaatcgtatagcaatagctaattaataaagaatctcaattgtggtgatagacatcaacccatttataacagtggtttggcttcttctgtttctcggttttactttagaaatttacgtaagcatcactatttttttaatggtaagagttcaatgatgtattcaatgaagtattagttaggatataaaaagaagaattagagaacgatttaactttataatgatagtccttaattatgttctaggaaaaaaaaaaaaaaaaacggaacaaatcctttccacatgcacatgacacatgatgtcgtctacgaacaaaaagacaaggtggtcccaatctgacacatcaatttcctaactatcctactcagattccattacttcaactttcatgtcaaatgctcaacctccaaatgccataccttttcttctttcttttcttgtaaacctaatatatatataaacaaagatgaaaaaggcatatttgcaaatgcccaaaatcttctaccattttgcatcattgactttagttgcctctttcagtccattgtgatatgtattctattgaagctttgtctatgtgacatgcacaggtccacacggacacagccactttataaaatatagttttttttctttcttttaagtcatttatttttgataataatagtgaaaagaactctccatccccttacttttcgttcttgctatgaaaacaactctcttctcattccttcttttttttttttgaattttgtcgtttctatatgtttttattttccttgaatttaataagtttctccggcacgtttcatcttttgaaagcctccatgacatgtgtatgattcatttctctgtgttcattgcgggaattagattggcaatatatcacacaatcttaggtatagcatgtaggcctaatatgatgcatcttggtggaactgagatttgggtccttttgttatagagttcttgagattttatcaattgacaaccggtctgaaaaaggtttggctaatgatatgatagaaattgttagtttttctccctaatcgcatgttgataaaatagtgtggcattagttttacgtggattaacatgttcagtgctcctctatctgcttgtttccacctatatatctttttaatttccttagttacaatattcacattgattagaagatcccccttaaacgcaaattaaaagtcgtatagaacttgataatagactaggataatctttactctgatatcgacatccaataagatactgcaagagaactagagaagtaccgagcacttgcatactataataacaaaaattggtaacaatcccctattagtcttctcataggcatgcacctagagagcacttagcgttcatgtttctctttttctttttatcaacaattagagcttcactgtttgatgatacatatcaccattatatcatataaacaaaagaaactgtgcaaaagaaaaaggaaaaaaaaaaagagagtaaggaaaccagatacattgattttcaaaagacaaatgagaaagtgtccgctagagcttaaggccccatgtgagatatgatctttctttttatgctttggttgactaaaactttacgtcgacaccccatttgagtatttacaacgactaaattctaatgtgagctcaagcttttccaatttatttaatatttgtatctatgagttaaccttatatctcaaggatcactccacttttgctaaataaaatatatccacttcactgttaagttcattggttatttcacaaccatgtttcttaaaaagataacaatatatatatttttttttgtcttctaacaacattagatttgaatagatgtaaggcgaaatttgaatagattttacaaaaatcatttgaacttctctaaaatatatattgttccattaaaattccactttcaatacaccccccttagagtttcatataatataaatacatttcaatataaaaaacaataatgttatttatttaaagattcatggaataaactaaaaataatctaaactgaaccgaaccgaaactcatatgttttattatttataaaaccgaaaagaaaaaaacaaagtgtaataagctgaatcacatactatttatatatgtatttagtttttataaaaccgataaactgtagaaccaaaaagaaaatacttgggtgaagggtgaacctttatgttcacatctttaattttagccaatcagaatttaccatctaataataaaaataataatttaatttagttaaaaaatctaattttttattaaaacgaaattatgtatcggtttgggtttattagaaaggattagggtttagattttatgattaaacaagtttaaatatcggtttgggtttataaacgaatttaaattttataattatacgaggttaaatgtcgggttgggtttagaaagtacgattagggtttagattttttacgattaaacgagtttaaatggtggtttgggtttacaaaagagaattagggtttagattttgtaattaaacgggattatatatcggtttgagtttataaaaaaatgattaaagattagatttaataattaaataagtttagtgagttttaatatatttatttatttatttaatattaattgttttagtttagttaattagatgacatgacaaattttaattggtgaatgaaagaggttcacctctaggggtgaacccaagtccttctcaaccaaaaaccaaactgaaaaccatacgccatcctacattttttttcctttggttagaaataaaaatatattatggttaaccaaaaagattgtgtgggatcttttgtaggaagaatcaagtttctctctcctgagtgactttctctctcctgaacgactttctctcttctgaacgactttcttggcaatttgtccttctctaacctaattgcctccggcggccggcatctcgccggttgacatgattttttccaatgtcaaagaaaaagaagaagctgccttgtccttcttcttgttctccctctctctaagttctctcgagttttggcctcggccaatagctcgtctctcctccctggttcgagtgttcttatcggctcctccttggttgtctcgccgtcgtccactgagagtgacacggctcattcagttgagatgatggggaatctttcatcgtctcctgtcacctagatcgcgctttttcaatctggatctggctccactcctcctccatctgaagcatcggttttgtaggttgagacgacggggaatcttcgactcctgaatctcagattaaccttattcagcctagcgctgacttaaatcctctcacacatgctatttcgattgaggccctgagctcgtcctctaagcttcatgtctctaagaaggttccttccccggatttgaccaaagtgtctgagatctctttcaatatagtcatagtgattgatttggataatgctctggcgactagaatcgatcctcttccgctctctgccccctttccaaccaaagtcctgtcttatgcgaaaatggctaagccttcaaaggccaaagatccttgggctttgaaattcaaagcgtcgttgaggaacctcaaacagatggagttcctaaccttccttgaagatggtactccagttgtggtggctcctccttctgtcatgttgaagacggcaaccctgtggaaagatcatttggtagctcaatttcacgggctatgtccttcatctaatcgtatttttaatgacttgaatttgatttgaggccggtttggtaatattacagtgggactaatctctgaaacgacaactctcatctttattacggcgcctcttactcgacaatgggttattgatgtcggcttttggcacgcggggaactgttcatgcacagtttatccttggtctcctgacggtcctcttgagctggaggaacttcatacggcgcctacgtgggcggttttgcgtaatgtccctcctcaactatattccttagatggaattatagtcattgccagtggtattggagattctctccacactgagaagtccaagcttgatctagtgaacattggctttaccaaagtcaaagttataatcaaactagacgccctgctccccaccacagtgatagtaaaagactgtcaaggaaacgtaactcgtattgtaatggaatatcctcggcctccacctaaatgtctgaattgtggaagatatggacatctcctaagccgttgtcccaagcctctgatgaaaaaacccctttttagaaggtttctccctctggttcaaaagaggtatatcacactcatgtgcttctaccgccctccaatggtctagctggaactgacgaagtgcctttaggcacatctttggcttctagcttcaaagtgaagtgcagacgttctcgctccaagaagagattcactagcactcctcctagactcattgctaatggtgtggttgagaaggggaagaagactctagaggggccttttgaatgcgttaagaagtgggtctgtaagcctgggtggacacattctgaaccttcacagggtgaggcgatcttgtgcaccccagcgagcgacctatccctcctaagggttttggaacggagaggatggtcttgtgctccccagcgagcgacctagctgcaggtttatctgcaaggatttctgatcttccggacttagatatgtttcctactcctccgagatgggataacatgaccaagaaagcaaggaagaaaatgcagaagatctggttcaaccacatgagatgaagagttcaagctgttgctcgggagtttcagaaaaacactttttgggtagtaatgatgatattttcttggaatattagaggtttgaatagccaatctcgtcaaataatagttagaagctgggttgtttcaaataaattactggtagggagctttttggaaattcatgttgaaaaggaaaatgcagctacagttttggcttctactctaccaggttggagaatggataacaactattggtgttcagaaatgggaaggatttggttggtttgggatccctcagtttatgttttggtcttcaaaaaattgcagcaaatgattctctgcagtttaaaagtgtcgggtacttataagatttctgctgctgcttttgtttacgagaagaataatgaagttgagaggagagtattctgggatgaaatttcctcgctggctattacctctcctttcaacaaaactctttgggtgattctaggagatttaaatcaaattcttactactgctgaataatattcggtttcccattcttcttactccccgagaggtatggaagatcttcaagattgtatgagagacagtgatttggatgatgtaccaactcggggagttttctacacttggtcaaatcaccagcagaaaaatcctattatcaggaagttggatcgggcattaggtaatgcggactggttcgacacttttccttcggctattgctgagtttggccctcctgaagattctgatgatgctccttgcataattaacttggccaataatccacaacgctcaaagaagtctttcaagtatttctcattcttggcttcgcatcccacctttatggcctctattcttgaggctcggagcagaaacacatttgttggctctaatatgtttctcttagaggagcaccttaaggagattaaaaaagagtgtagaagattgaatagagcagggtttggtaatcttcagcagcgcactagcgaagccttggctgccttagaagatattcagtctcaattactttctcttcccttagattctctctttagacgagagcatatggctagaaaaaatgggatttctttgctgtggccttggagtctttttatagacaaaagtcaagaatcaggtggctaaaagaaggggatgctaatactcggttcttccgtagagctttccttgctcatcaggctagaaatcttatcaagcagttgcgtggtgacaatgatattttggttgttaacgtggatcaagtcaaagatatgattgtggcgtattactctcaccttctcggctctgaaaatgactcaactattcctttatctattaaagttataaaggtcttacatcctttccggtgtgatgagtctctggctactctgttgtctgctattcctactgatgaagagattatagggtcactgttctcaatgcctaagaacaaggcgctcaatccagatggttttcctgtggattttttttgggattcgtgggctgtggtgaacgatactgttatttttgctgtgagggaattctttcttacatctattgaagaagttcaatgcaactgccattactcttattcttaaggaatgtgggacagacaaattatctaagttcagaccggtttcttgttggaatacaatttacaaaatttactagaatcatttccaagcgcctcaagctgttcagaactcaagcagttcaagggaatcaagtgggttttataaaaggaaggatgctttgtgaaaatgtgttgttagcttctgaactagttgaagggttacatattgaaggtgaagtaactaagggctgcttacaaattgatcttaccaaggcttatgacaatgtcagcagggagtttctaatcaacatccttgtggctttggatcttcctcctatttttataaacttgatccgggtttgcatatctactccttatatagtattgcttttaatggtgagttgattgggttttttcagggtaaaaaagaaatcagacaaggagatcccatgtcttctcatatatttgtgcatatcatgaatattctagcaaattcactggataagggcgcagttgaaggccgtttcatgcttcacccttagtgttcagcccctctcattactcatctcagctttgccgatgatgtgttagtcttctttgacggttctaaggattctgttgctgggatcatatccattcttgatgagttcagaattggttctcgtcttggaataaacaggcaaaaaacggcttggatggtggtgacttgcataatgtggccactatctctgagcgttttggtgtttctcagggtgttcttccggttcgttatctggggattcccctaatgatctagaagatgaaaaaacaagattatcaacctcttcttgacagaattaataaaaagttctcctcttggactgtcagacatctctcctttgctggtcggcttcggttgctgaaatctgtgatctttgctaccatcaacttcttggtgtcagttttcctccttccaaaccaatgtctccaaaagattgagcagatgtgtaatgcctttctttggaaaggtctgcctacctacgctagaggtgcaaagatcacttggaacgtagtatgtacgcctaagcaaagtgatggctttgggttgaaaaggttgatctcttggaatacggttttcgttttgaaacttatctggttgtttttcactaaggctagttctctttgggtttcttggatgaggattaatcttattggtaaccggaatttttgggatctgaatccttactactcagggagttggatttgaaaacgtttgtgcaaactttgtaacctggcgagaccttttttggtgtgtgaggtgggttaaggaattacaacaagtttttggcatgataactggatggggttgtggccgctgattgatctctcgggtccattaggacctcaagttatcgggttgaacaaaaaagcggttgttagagacgcaacatcttgcaatggatggaagatcatgacttctcgaagtcgtaatcccatcatttcgacgatcaaaaacgccctgccatattggattgatatcattgattgtgaagtggatgatgtctatctttggaagctcgagcatcatccacccacaccattgttctcctctactctaacttggctcgctttgcacccatctacctgtccggttctgtggcataaatctatatggtttaaggactatattccaaatcatgcgttcatcaattgggttgtggcttggaacagggcttcacactagggaccgaatgcggagttggggaatttctattcccacggattgtgtcctttgctctggaagttcggagtctagagatcacctcttctttgagtgtgactttagtctggcggtctggagtcacttcaggaatagaacaagattatctcctccggtccccttcatggcctgcctcttatggattaattcggcttcgtgtgatgcttatctctgtctcatcatcaagctagtgttccaagcctctatttatctcttatggaaagaacgcaatcgtcagatccattctcatgctccccgtacctctgctttgatcatcgaggaacttaaggttattctatggtcaaagcttgatcccatttctcggcgtagtgaatttgattctccaggatcctctctgctctctacttggtttcgtttcttcagctaagggcagttccttcgttctctgttcttctttttgggctgtttgggtcttgttgggccattcaagtttagtttcgggcctgcgtgacttggatttgggcttcttgccgtgtatatttttcgggcttgcgtgcctttttttggactctttgttttgtaacttgcttttatctttaatggaaatttaaacctaaaaaaaaagaaaagattgggtgggcaaatgcatgttacctactgatgttaccgagtatctcaagtactaacaacagctctatgtttctcaaaaggaaagtctcaaagcgacgacgtattattttcacgcacgttttaaattcttgatgcctttttttgttttattcttttttcttaagttacacatttaaacaaacaaaaaagaacaaaatgagaaagaaatagattgttttcgagctttctctctcttctctctctaaaaaatcttagagaaaagggaaagttttctcttttgtttcgctggcctgatggcattccgacgtttatgtgttttaatatagttgggttttatatctaacatctctgtcgtttttagcagtgatggctggctcttgcctgacagcgttcgaattccatgaccatcgttggccggatctacttttcttatcagtgtatctgatgtttttttttttttttttctttcaataatctcatagatcctctattggaaatttaggtgtttttttgcttaaaggtgtttattatccaatttgatcttttgagtttgcgatttgcaggaatcaatccaaagagttacatcttaagttgcagaaaagaaaacaatttcattgcacactaatattgcttttagctgtaaatctctattttgatgttcgattggtttatgaacaatgaaacctagaagaatcaagcttgcttttataatcaatgatgatttttctcactggaatcgatctcagatggcgaatgatctacaattgaggctatttgtctaattgatctatggacacgagtgttttcctttttgtttttaggtgttgctgaaaagctccatcggcttaatatctacgttgatgttctttggagttcgggagtcattgcccttgtgaagatcttttctttacagatttgatgatgtagttggtaggattctctagttaaaaacctgtggacttatttcttgaagctctgacggttttcggtagttttggagttcccttacgcttcgtaccatatcggctatgagcggcgaacggcgacaacatctacttcaactttacttcataggctcacacatggttttgtgttggatttgttatatttcttagttccttaaaggggtatctttatggattggactttttaagttgggtctccgcttataagctgaattgttggtgaagtggaagcttccactgttgtaccttttacgacatagagttttaaatagaagagaaaattcccaaaaaaaacttcaactattaaaatttgccaaaaaaacctcaactttttcggttgtcaaaaaactcaaactaatttattagtgacaaataaaacccaaactagaaatattggcagattatacatacgctctaaaaacaaattatagttttatccttaaaaaattaattcttttttttttgaaacgaaaagaaatttcttatttactttgtatttttttagtttatacgtttttgcctttttggaaattatcatagaaaaatgatatgagtgtctcatttttaattctcttttcatatatttttactttttagattttcaaactttaaaaaccaaatcgtttctctatttcttttttttttgcttatttctttctaatttttggttcctcaatatcaaaatgattcaatgttcttcgactaatttacatattttgattttttcatcataattatatagttagctttgtgttaatatatcttatttaatttattttagcaatacgataacggcggtatgcatgtactaaaaaggatgcgtaaagagtattaagtttttcacatcgaacaaaattgtccactattttatttttttaaatagttgtctatattacaagaacaaatgaaaataaataggtattattagataagtagtttttttttttggtaaggcattattacttattagataagtagttagatatataaaataatcaaatagttgaggtttttttggaatatttctgagaaaaacaaaaagaaaacaaaattgattgaataatgaatacaccgaataacgaacgttgcgtagagaagagaaccaattcccaatcaaacggagaagacagatattattcacagagaggctcatggctgaggtaaacggagatttccccgttcctagtttcgccgacgggaccggttctgtttccgccggacttgacttgctcgttgagagatcgattcacgaagctaggtatgtatcactagtaactggaatcaatttgaatcgttaattctcatttctctttatctgtctttgtgtttgaagttttttcttagcctatagttctgtgatttgttagttcttagtacactataggagcgtgagcaattgacgagacttggatctatatgaattgttaaattagcagatcaatttgggaaactcaagaggtttaatttcaaactcttgtttcaaggtccacagagccagatgcttcaactcaacttactattatctttggtgggagttgtagagtcttcaatggtgtccctgcacaaaaggtttggtccatctagctttgagtacatacattctgattttgtttatgttggttgcatcagagtttctaattgtattggtgatcaatgcttaataggttcaagaaatcattcgcatcgcttttgctggtaaacagacgaagaatgtgaccggtatcaatccagcactgaacagagctctttctttctcaactgtagctggtaagcaattgcttcattcggttactgtaagcattatctacggagttacggactattaatccctgtttgtctcagatcttccaattgctaggagacgttcgcttcaaagatttctcgagaagagacgggacaggtagttagatattcagtgtttgctttattaacatattgatagttctggaagtgttagtgtgtatgaatctgatttgttagtatgtattagtttgtgacgtcaaatattgttcttgcatttaggaattttcatgtgtaggtaggttgttgaagctt

SEQ ID NO: 1345 - DNA, 100678 bp, Arabidopsis thaliana
aagcttcatgtctctaagaaggttccttccccggatttgaccaaagtgtctgagatctctttcaatatagtcatagtgattgatttggataatgctctggcgactagaatcgatcctcttccgctctctgccccctttccaaccaaagtcctgtcttatgcgaaaatggctaagccttcaaaggccaaagatccttgggctttgaaattcaaagcgtcgttgaggaacctcaaacagatggagttcctaaccttccttgaagatggtactccagttgtggtggctcctccttctgtcatgttgaagacggcaaccctgtggaaagatcatttggtagctcaatttcacgggctatgtccttcatctaatcgtatttttaatgacttgaatttgatttgaggccggtttggtaatattacagtgggactaatctctgaaacgacaactctcatctttattacggcgcctcttactcgacaatgggttattgatgtcggcttttggcacgcggggaactgttcatgcacagtttatccttggtctcctgacggtcctcttgagctggaggaacttcatacggcgcctacgtgggcggttttgcgtaatgtccctcctcaactatattccttagatggaattatagtcattgccagtggtattggagattctctccacactgagaagtccaagcttgatctagtgaacattggctttaccaaagtcaaagttataatcaaactagacgccctgctccccaccacagtgatagtaaaagactgtcaaggaaacgtaactcgtattgtaatggaatatcctcggcctccacctaaatgtctgaattgtggaagatatggacatctcctaagccgttgtcccaagcctctgatgaaaaaacccctttttagaaggtttctccctctggttcaaaagaggtatatcacactcatgtgcttctaccgccctccaatggtctagctggaactgacgaagtgcctttaggcacatctttggcttctagcttcaaagtgaagtgcagacgttctcgctccaagaagagattcactagcactcctcctagactcattgctaatggtgtggttgagaaggggaagaagactctagaggggccttttgaatgcgttaagaagtgggtctgtaagcctgggtggacacattctgaaccttcacagggtgaggcgatcttgtgcaccccagcgagcgacctatccctcctaagggttttggaacggagaggatggtcttgtgctccccagcgagcgacctagctgcaggtttatctgcaaggatttctgatcttccggacttagatatgtttcctactcctccgagatgggataacatgaccaagaaagcaaggaagaaaatgcagaagatctggttcaaccacatgagatgaagagttcaagctgttgctcgggagtttcagaaaaacactttttgggtagtaatgatgatattttcttggaatattagaggtttgaatagccaatctcgtcaaataatagttagaagctgggttgtttcaaataaattactggtagggagctttttggaaattcatgttgaaaaggaaaatgcagctacagttttggcttctactctaccaggttggagaatggataacaactattggtgttcagaaatgggaaggatttggttggtttgggatccctcagtttatgttttggtcttcaaaaaattgcagcaaatgattctctgcagtttaaaagtgtcgggtacttataagatttctgctgctgcttttgtttacgagaagaataatgaagttgagaggagagtattctgggatgaaatttcctcgctggctattacctctcctttcaacaaaactctttgggtgattctaggagatttaaatcaaattcttactactgctgaataatattcggtttcccattcttcttactccccgagaggtatggaagatcttcaagattgtatgagagacagtgatttggatgatgtaccaactcggggagttttctacacttggtcaaatcaccagcagaaaaatcctattatcaggaagttggatcgggcattaggtaatgcggactggttcgacacttttccttcggctattgctgagtttggccctcctgaagattctgatgatgctccttgcataattaacttggccaataatccacaacgctcaaagaagtctttcaagtatttctcattcttggcttcgcatcccacctttatggcctctattcttgaggctcggagcagaaacacatttgttggctctaatatgtttctcttagaggagcaccttaaggagattaaaaaagagtgtagaagattgaatagagcagggtttggtaatcttcagcagcgcactagcgaagccttggctgccttagaagatattcagtctcaattactttctcttcccttagattctctctttagacgagagcatatggctagaaaaaatgggatttctttgctgtggccttggagtctttttatagacaaaagtcaagaatcaggtggctaaaagaaggggatgctaatactcggttcttccgtagagctttccttgctcatcaggctagaaatcttatcaagcagttgcgtggtgacaatgatattttggttgttaacgtggatcaagtcaaagatatgattgtggcgtattactctcaccttctcggctctgaaaatgactcaactattcctttatctattaaagttataaaggtcttacatcctttccggtgtgatgagtctctggctactctgttgtctgctattcctactgatgaagagattatagggtcactgttctcaatgcctaagaacaaggcgctcaatccagatggttttcctgtggattttttttgggattcgtgggctgtggtgaacgatactgttatttttgctgtgagggaattctttcttacatctattgaagaagttcaatgcaactgccattactcttattcttaaggaatgtgggacagacaaattatctaagttcagaccggtttcttgttggaatacaatttacaaaatttactagaatcatttccaagcgcctcaagctgttcagaactcaagcagttcaagggaatcaagtgggttttataaaaggaaggatgctttgtgaaaatgtgttgttagcttctgaactagttgaagggttacatattgaaggtgaagtaactaagggctgcttacaaattgatcttaccaaggcttatgacaatgtcagcagggagtttctaatcaacatccttgtggctttggatcttcctcctatttttataaacttgatccgggtttgcatatctactccttatatagtattgcttttaatggtgagttgattgggttttttcagggtaaaaaagaaatcagacaaggagatcccatgtcttctcatatatttgtgcatatcatgaatattctagcaaattcactggataagggcgcagttgaaggccgtttcatgcttcacccttagtgttcagcccctctcattactcatctcagctttgccgatgatgtgttagtcttctttgacggttctaaggattctgttgctgggatcatatccattcttgatgagttcagaattggttctcgtcttggaataaacaggcaaaaaacggcttggatggtggtgacttgcataatgtggccactatctctgagcgttttggtgtttctcagggtgttcttccggttcgttatctggggattcccctaatgatctagaagatgaaaaaacaagattatcaacctcttcttgacagaattaataaaaagttctcctcttggactgtcagacatctctcctttgctggtcggcttcggttgctgaaatctgtgatctttgctaccatcaacttcttggtgtcagttttcctccttccaaaccaatgtctccaaaagattgagcagatgtgtaatgcctttctttggaaaggtctgcctacctacgctagaggtgcaaagatcacttggaacgtagtatgtacgcctaagcaaagtgatggctttgggttgaaaaggttgatctcttggaatacggttttcgttttgaaacttatctggttgtttttcactaaggctagttctctttgggtttcttggatgaggattaatcttattggtaaccggaatttttgggatctgaatccttactactcagggagttggatttgaaaacgtttgtgcaaactttgtaacctggcgagaccttttttggtgtgtgaggtgggttaaggaattacaacaagtttttggcatgataactggatggggttgtggccgctgattgatctctcgggtccattaggacctcaagttatcgggttgaacaaaaaagcggttgttagagacgcaacatcttgcaatggatggaagatcatgacttctcgaagtcgtaatcccatcatttcgacgatcaaaaacgccctgccatattggattgatatcattgattgtgaagtggatgatgtctatctttggaagctcgagcatcatccacccacaccattgttctcctctactctaacttggctcgctttgcacccatctacctgtccggttctgtggcataaatctatatggtttaaggactatattccaaatcatgcgttcatcaattgggttgtggcttggaacagggcttcacactagggaccgaatgcggagttggggaatttctattcccacggattgtgtcctttgctctggaagttcggagtctagagatcacctcttctttgagtgtgactttagtctggcggtctggagtcacttcaggaatagaacaagattatctcctccggtccccttcatggcctgcctcttatggattaattcggcttcgtgtgatgcttatctctgtctcatcatcaagctagtgttccaagcctctatttatctcttatggaaagaacgcaatcgtcagatccattctcatgctccccgtacctctgctttgatcatcgaggaacttaaggttattctatggtcaaagcttgatcccatttctcggcgtagtgaatttgattctccaggatcctctctgctctctacttggtttcgtttcttcagctaagggcagttccttcgttctctgttcttctttttgggctgtttgggtcttgttgggccattcaagtttagtttcgggcctgcgtgacttggatttgggcttcttgccgtgtatatttttcgggcttgcgtgcctttttttggactctttgttttgtaacttgcttttatctttaatggaaatttaaacctaaaaaaaaagaaaagattgggtgggcaaatgcatgttacctactgatgttaccgagtatctcaagtactaacaacagctctatgtttctcaaaaggaaagtctcaaagcgacgacgtattattttcacgcacgttttaaattcttgatgcctttttttgttttattcttttttcttaagttacacatttaaacaaacaaaaaagaacaaaatgagaaagaaatagattgttttcgagctttctctctcttctctctctaaaaaatcttagagaaaagggaaagttttctcttttgtttcgctggcctgatggcattccgacgtttatgtgttttaatatagttgggttttatatctaacatctctgtcgtttttagcagtgatggctggctcttgcctgacagcgttcgaattccatgaccatcgttggccggatctacttttcttatcagtgtatctgatgtttttttttttttttttctttcaataatctcatagatcctctattggaaatttaggtgtttttttgcttaaaggtgtttattatccaatttgatcttttgagtttgcgatttgcaggaatcaatccaaagagttacatcttaagttgcagaaaagaaaacaatttcattgcacactaatattgcttttagctgtaaatctctattttgatgttcgattggtttatgaacaatgaaacctagaagaatcaagcttgcttttataatcaatgatgatttttctcactggaatcgatctcagatggcgaatgatctacaattgaggctatttgtctaattgatctatggacacgagtgttttcctttttgtttttaggtgttgctgaaaagctccatcggcttaatatctacgttgatgttctttggagttcgggagtcattgcccttgtgaagatcttttctttacagatttgatgatgtagttggtaggattctctagttaaaaacctgtggacttatttcttgaagctctgacggttttcggtagttttggagttcccttacgcttcgtaccatatcggctatgagcggcgaacggcgacaacatctacttcaactttacttcataggctcacacatggttttgtgttggatttgttatatttcttagttccttaaaggggtatctttatggattggactttttaagttgggtctccgcttataagctgaattgttggtgaagtggaagcttccactgttgtaccttttacgacatagagttttaaatagaagagaaaattcccaaaaaaaacttcaactattaaaatttgccaaaaaaacctcaactttttcggttgtcaaaaaactcaaactaatttattagtgacaaataaaacccaaactagaaatattggcagattatacatacgctctaaaaacaaattatagttttatccttaaaaaattaattcttttttttttgaaacgaaaagaaatttcttatttactttgtatttttttagtttatacgtttttgcctttttggaaattatcatagaaaaatgatatgagtgtctcatttttaattctcttttcatatatttttactttttagattttcaaactttaaaaaccaaatcgtttctctatttcttttttttttgcttatttctttctaatttttggttcctcaatatcaaaatgattcaatgttcttcgactaatttacatattttgattttttcatcataattatatagttagctttgtgttaatatatcttatttaatttattttagcaatacgataacggcggtatgcatgtactaaaaaggatgcgtaaagagtattaagtttttcacatcgaacaaaattgtccactattttatttttttaaatagttgtctatattacaagaacaaatgaaaataaataggtattattagataagtagtttttttttttggtaaggcattattacttattagataagtagttagatatataaaataatcaaatagttgaggtttttttggaatatttctgagaaaaacaaaaagaaaacaaaattgattgaataatgaatacaccgaataacgaacgttgcgtagagaagagaaccaattcccaatcaaacggagaagacagatattattcacagagaggctcatggctgaggtaaacggagatttccccgttcctagtttcgccgacgggaccggttctgtttccgccggacttgacttgctcgttgagagatcgattcacgaagctaggtatgtatcactagtaactggaatcaatttgaatcgttaattctcatttctctttatctgtctttgtgtttgaagttttttcttagcctatagttctgtgatttgttagttcttagtacactataggagcgtgagcaattgacgagacttggatctatatgaattgttaaattagcagatcaatttgggaaactcaagaggtttaatttcaaactcttgtttcaaggtccacagagccagatgcttcaactcaacttactattatctttggtgggagttgtagagtcttcaatggtgtccctgcacaaaaggtttggtccatctagctttgagtacatacattctgattttgtttatgttggttgcatcagagtttctaattgtattggtgatcaatgcttaataggttcaagaaatcattcgcatcgcttttgctggtaaacagacgaagaatgtgaccggtatcaatccagcactgaacagagctctttctttctcaactgtagctggtaagcaattgcttcattcggttactgtaagcattatctacggagttacggactattaatccctgtttgtctcagatcttccaattgctaggagacgttcgcttcaaagatttctcgagaagagacgggacaggtagttagatattcagtgtttgctttattaacatattgatagttctggaagtgttagtgtgtatgaatctgatttgttagtatgtattagtttgtgacgtcaaatattgttcttgcatttaggaattttcatgtgtaggtaggttgttgaagcttaagcaaatgaagagactggatctatgtgaatgttaatttgtatacattgactggtttcggaaactgagatagtcttttagttttttttcttacaagtgtttaagcttttattctcatgtattattctacttctatatcatatttggctgacttatggccaccagataattgtgtatttcttagtgatcatgcctcacaaatacattagatgttgttgcccattctttagtatcggttttatgagcttgaatttgaactaggcttgtgtgtttgattttggtaccgttgaatgcaaaaatagccttctatctactgttagatgacatcatcagatgatttaaatttagtaggttgtttgaactgatgtattgatgggactgaggttagttgatagcctaagcggctgtaatattgtagtggaatcactattttgttcttctcccttttgcatcaatagggtcttaaaatttgggtggattattattatcttccatcattcataactagctcttgtttcttctattgaaggtccacgaagccagatggttcaatgatccttccaagtcaactaaccattatttttggtgggagttttagcgtatttgatggtattccagctgaaaaggtttggtccatccaagttttgagtacattcgtatttcgtttttgttgggaagcagttgcatgagatttcttgttctcttggtgatcacacttaataggttcaagaaattctgcatatcgctgctgcagctaaagccactgagacaattaatttgaccagtataaatccagcattaaagagagctatttcattctcaaacgcatcaacagtagcttgcgtatcgacagcaggtaaggacttgctacattggattaccgtaaacgttatatagtccgagtatggaaaaccccatgagctttatgtaagatgcatgtttatctcagatgtgccaattgctaggagacgttcacttcaaagattttttgagaaaagacggcatcggtaggcatatctgcagtgcttgttttataaacatatactctcatctttctccatcactcacctatgagtttgaccattagatttcatctaatagtaacttggaccctctttattttcagatttgtccacacgaagccttactctgctacgacttcggaagcagacaaaaatgaaaccagccccattgtgacatgagctccaagactgtaagctaacctcaaaccttactttcgaagcaactcagtatcacagttatctttgacaagattaacacagctcatatataagccttccgttgttgtacgataatcatctgcctatgtttcttagacaaaacacaaaattgttttccatgtttgtgatttgatgtgtttatcatctcgcacctcctctttgaggaagatgatttctttttcttcacaatgtatgttgatgctgtatgataaggtctcagagctatataagaacacaagagtactcaaaaatgaccatgaaagacttagtgtccttataagcaaatcacgaccaagaaacatacagagaaatcatcaaatactaaccggagagattagtagggacctcagatcaaaattttcaggtctggttaggcatgtgattattaccagaaccaaaattttcaaaccaagccaatccagtttttggtcatttcaatttagggtcggtcactaaaagtgaacaggtcggcataattttttagtacatatatttaacatgtgcccaagttatgacaaacgatgaaacataacatatttattataaatgatttatacatcataactcataaaaacatcaaaattatgaaatattttggtagcgctaccataaccactcaatcatccgactgaaatcatcaaaataaaaaaatattttctaactttttttatatttacataaatatatctacaaaatgatcccgtataaacttgtaataaattatatatgtgcatttttcaagaccaaatctctaagatcaaagactaatgctaccacatcattcaacgaaacaatgcaaataaattttgggataactttaactttgatcatcttttaaagtatttaaggattttacatacaaatttgtaatttaaagggttcacaaacggcaacaaaaaacaaaaaaaggtttactaacgaatttgtaattttaagaagatcaaaatataagaaatataaataatatcataaattttaaagggttataatgcaaatgttgaactttaggaaaccagctgacctcctttaatcgtctttggatgtctatgcggcggacccataaatactttttatgggtccatcaaatataatttaaaaataataagtaattaaaaacaaccaaaaactaaaaaaaaaaaaactcatctctttaagtttacatatgaatttgtaattttaaaaaggaaaaaacaaaataattttaaaggtctacaatacaaatatagaattttagaggggtcgtctgaccccttttaatctttttgggtctgtcgcgtgggcagacccataaatactttatatcagatcaaaatataacttaaaataattagtaatttaaaaaaaaaaactaacaagttttaaaaaatattattagtttaaaatataccgcaaattaggttcaatatttatgggtgaatcacattaaaaggctaaaagtatcaaaacacaaagtagaagaaaatatataataaaacttaaaaggtttacatcaaatttgtaattttaaaagggtcaaaacatatgaaatataaataatatcataaattttaaagggctataacacaaatgtagatttttagttgggtcagctggccttctttaatctttgctctttggatctgcctatgcggcggacccataaatactttttactaggtcaaaatataatttaaataattaatagtttaaaaagattaaaaaactaaaaaaaatattcatttgcttattatataccatagagaatgattcccaattttttttttgtcggcaatgattcccaattttaaatacagagaatgatataatcataatttatttatttaaatattcatacattgacaataactgagtacatccatgattctttatttttgaatcataatgtcctttcttcgattattattcgcttacaaacaacactcttataaaatattttcatagaggaattaagcacgatcattgctcggaaagttttgtatactagtttcatcactaccgatatatagataattcaagataaataacattcatatttaggggtgtcaaagtgggtcaagatttatggatcaactcaactcaacgcaacttttgaaccctaatgagttgaaatttttgactcaaatgagttgatgggtcaaatgagttattgggtcaattggtttgatgaataaaatgagttgggttgtaatgattaatggtttcaatggtttacccaattaacccattaacccataactcatttaaccctaaactcatttgattatgagttgagttgagttgggtaacccattttgacaccccatataaccaaaagaataaaaaaaaaagataagttggagagtagacagtttttgctaaaataatttgaaaagtagacatttttttttagagataggaggcatatgtagttttatctctcctctctaatagaactccctctcaaatacaacttttagtaaagtactattttacccttctgttgttttgatgaaataaaatggacctcattaaaagcagcccaatatcatcttcaatttcgaattgttcatgggcttgacatcaactaaaccccatattttcttaagtcattagaaccaaacacactcataaaccctcgtcgtcgacatcttcatctgtacggtaaagacctcgtcgttgtcaaaaaaggataaaccctcgtcgttgccaaaatcatagagacattgtcaatttcataccagatggaaggtatgtttatcataaaacgctttaaagtttttgaatttttgctgtcagccaactaataactttgactctgttttcgttttttttcaggggacgaatcatgcgtctccatggtcggccgctggatttgctactcgaatggttggtgggacttcaaaattgataaaactaggccaggaaaggggaaaatgcttaattatttcctaaaatatccaaaatgcgcagattaattccccaattacctcagacgcataataaactcccaattatactttgacgtagcaaagttagacttcattattgtcaacgttaaatattaaacatgtcgttaaatatgtcgattctcatcttcttcttctccaaatcaaaaaccctaaattcctaaagctttatctttaaactcgaaacaatcaactgtaaatctactttccaaacttatcttccctaaatcaaacatcaaaacctaatccgattggcaaaacgaaagttttaattttgcaaactgaaccatgacaggaagaagacgaaagcttccaatacgaaggtatgcacaaaacgataggtggaatcaaaattgtttctaatattaaatccattgatgtttcttttacttgtggtttctgattttattgtagttcaatacccgttccttattttgcttttatcaattagtttacggtgttcatgttattagtttctatggttgttcggctatgatgtagatatttttatttttataggacactaaatgaagaaacagttgaatctgatggtgaacgaagggtgcatgaagaagagatagaatctgatgctaatgtaggtgtggaggaagatttttgtgaagtgattgtcgaagatatgggtggatataaagagacagaacctgatttggctgagtttgaggtagcggataatcactatgttgatgtagagatctgtgaaaacttagaagaccattttggagacattgcatgtggagatgaaaatggtgattctaatgataatggggatgatattcgggatgatgaaaatattccagatccattatcagattctgatatagaggagagcagaccattcacttatggattaggtcctaaagaacttttaggattagggaagacattcaataatgcagatgaattcaagtatgcacttctcaggtattctctaaaaacgaaatatgatatcaagatgtacaaatcatcatctaacaggcttggttcaaagtgcacacattggatagaagaaaagtgcccatggagagtttactgctcttttgaaaaaggtagaaacaagctgatggtaaaggttttcataaacgagcatatttgtgtaagatcaggttatattaggcttttgaagagtggagctattgcacaactgtttgaggaaagagttagagttaatcccaaaatcaaatcacaagagatggtagacgaaatcaagagggagtacaatatgattgttagtgtccatcagtgtaggagagcaaagatgttgcttgcagagaaaagaaaagctagtcatgaaactcattttgcaagaatatgggattatcaaggagagatacttaataaaaataaaggttcaactatggagattgagacaattcccgggcagtacccggaagcaagcaaagattctaccgtctctacgtttgttttgaagctttgaaaaactcgtggaggaaatcatgtagacctattattggattagatactgcgtttatgaaatgggatatcaaaggccaaatgttagctgcggttggtagagatggggataacagaatctttcctattgcttgggcagtagttgaggtagaggataatcctaattggttgtggtttgtgcaacttctcaaaaaagatttgggacttgaagatggagcagacattaccatcatctcagataaacacatggtgcgtcttaatataataatttccatgtttgtttcttattatagttttttatgttgtttgtttttatgtgacagggtttgctaaacgcagttcatatcgagcttccgaaagctgaatatcgaatgtgtgctagacacattttggatcgttggaagaagacgaataaagatatagaacttgagcgtttattttggaggatagcacgaagttacacaattgaaacctttactgataacttagaagcattgaagaaatacaacaaaggatcgtttgatacactataacgtacatcaccggaatcatggtctcgagctttctttaaacttggatcttgttgcaacgataacctaaacaacctatcagaatctttcaacagaaacgttagagagtcaagggggaaacctttgcttgacatgttaacgaatgttagaaggaagtgcatggagaggaatgccaagaggactattttaaccaacaggtggaaaaaaggtttacacctagagcagacaaagaaattgagctaaaccggcaaaaagctaaggattgcaaaagatacatgaccacaggaaatttacatgaaatagactttcatggtgatggttatagtgttgatatggaactgaaaacttgtggatgtggctattggcaattgaatgggattccttgtatgcatgctatgtgtgtcatcacaacaacatggttagatctcaacgactatgtctctgattattacttgacttcgaggtggcgcgaactgtattctaagggtatgaaaccagtccaaggcatgaagttgtggacacggttaggccgattacctgtgttaccgccatcaagatttaaccgtggaagaccacatggtcatgctaggagaaaagctcctcatgaatcttttttctaatccgaacaagttaacacgccttggtcgtgtgggaacatgtacgaattataaacaagaaggacataacaagacaaggtgtcctaatcaaacggcaccacctcaagcaaaacgaccacgaggtcgtccaagaaaagatcaggttcatttttctttatttaaatttggttttacgtcatttggggtttgattcagctgttaaattctggtttggttttcaattccttgtttttcttgttccattgtttcaatttagggagaagcatcacaagcaagagcttttcaagatggatcatctcaagtaggagcttctcaagatggatcatcacaaggaagatttggtttctctctttaattcattcgctttgctcaagactgaaaaacatgtttcagaatttgttttttttttaacacgtttctgattccggttccttagtttcgatcatgtgtttttcaactttttttgttctctttgctttgtaataccttttctttcacgttttacacatccacaaacttcattttcagaatttaaactctacttagaatacaaagtttcaattcaaacttcacgaaaattcaatctgcaatttttaaaacacaacaaactaagaaagcattagttttagaaacgattacatgacagttattctcttcacattctcactgttagaattctctgggtatttaatttggggaagaaaaggaaaagaagaccatgagaatcgatataaactaattttggcttttaattttaacgacacacgtttactatttaacggtgataacaatgaagtctaattttggtaagtcaaaatgaaatagagggtttattatgtgtctgaggtaattggagaattaatctgtgcattttgaatactttaggaattaattaagcattttcccgccaggaaagtgtattaactgcggaaaaattgacactttcaaagcccttgaagaagttatccggcaaagattctcgatggttattaacaacgtgtttgttgagatgtcatactgggctgatgacgttttggtgaggctcaatggtcaggaaacacctccgacggaaatcaaagatgattggtctttcagaatgttcaaatctcttctaaggtctgacagttctgtgaatctttttgtcacctttaaaagaatggtagacgataagcttgagttcctagatccccttgaaattgctgttccgccttacaacagaggcttcccactgatacaaggtgataacactgtgaaggagttgcaaccctttattgttggtgttccagataaaacgaccgtacaccatgaaaatgagtttgacgtacaccagcaacttgaacattctcttcgaaaaccaaatccagtttcagacaacagtagtccagctggagatgtccgagacctggtcatttgggatggtactgttgataactcactaatagctcacattgaagaaattgaagctcagttaaaagatgtaaatccacaagaagacgttgttgatgaggatatcgaaagcaatgatgattctaatgagttcagtgaagaagacgatgagccagactatcaatctggatcaaaagaggatgaagatgatgacgtctggtctgagacagttttagacaagaatgtggcgttgaacaatgatgatttcacagatccccctctaagaaaggtacaaaactatactgatcttcttcgtgaaatggatgattttgtctgccatcctcttttggtagacaactgtgaataagtgacccaaatgcatattatccttaagtataggaaagcctctattcaagtgagaaggtcttcggttttgggttagtcaaaccttaacacgtgagagcacacgtgcgaacgactaaagctgagaatcagctttataatccaagtctctgttttcttctgttgtagagtttgttttgtaacccaaagagagagagagagagaagagagagattcttgtaatcaagcaatattatttgtggcttagtggattccggagagagcctccggcaagacgtagggttccgttgtggagcctaaactcgtaaaactcttgtgtcttttctttctttgaaatcaaacgagagtcgtgagtgaagtgagctagattgttcttcgattcaagtcagaatcgtacaaattggtatcagagctccaggttctcgcgatagctgatcattgttacaaggataacgaattcgaagatcaagatatcggtgttcgatggaactggtgatttctcactgtggaaaacacgcatgttctctcatcttcgaatccttggcttgaaggatactctggtggaacaagctccgttcccaccactgaaagaggaagatgaatcagatccggataagaataagaaacaaatcgaagaagaaactgagagaatcgaatgatgtgagaaagctatggacattatcttattcaatgtcggtgataaggtactgagaaagattgatcactgcaagactgcagcagaagcatgggcgttgcttgaacgattatatatggtaaagactttaccgaatcgtgtgtatctacagctcaaggtttacaattacaggatgcaggaatcgaaaacactagatgagaacattgatgagttcttgaagatgatatcagacctaagtaatctgcagatctaagtccccgatgaggtacaagcgatcttgattttgagctctcttccagccaaatatgaaacattaaaagaaactttgaaatatggaagagaaggtctacaacttgaagaagtgataagtggagcaaaatccaaggaattagagtttcaggcagaatccagttctaagtctacagcagaaggtctttatgttaaaggaaatcagaacaacaattcaaagtcaagatctcaagatggtaagaaggtatgttggatatgtgggaaagaaagtcatttcaagagacaatgttacaagtggctagagaagaataagtcaggtgggaatacacaagatacatgtgagtctggacttgcaaaagatgatgctcaagacttggttggtctagtagcctcagaggtaaacctaagtgaaaaacagctcgaccagaatgaatggatcatggacaccggttgttcttttcatatgacaccaagaagagatatattcattgagattgaggagctaacttcaggaaaagttagaatggcgaacaactcggtttcagaggtaaaaggaattggtaaagtaagattcatcaacacagatggaaccacatttgtgttacatgatgtaagatacatgcctggaatgtctcgaaacctcatctcaatgggtactttagaagcaaaagggtgtgtgtttaaaggaaatgatggtgtacttgaagtaatgcagggaaatacagtgttcatgaaaggtctacggagagcttcattatacatcctgcaaggagaagctaaaaggtcagaagccatggtagctgagtcagaagagtcggatatggatttaactcatgtatggcacaacagactcggtcatgtaggacagaaggaaatagatgaattagccaagaaagaatgttttggcaatgacaaagtctcaagtctgaaattctttgaagactgtgtcttcggaaaaacacacaaagtgagctttgggcaagctcaacatgtcacaaaggagacgttagactatgtgcactcagatttatggggatcaccaaatgtgcctttgagtcttggtaaatgtcagtactttctcaccttaacagacgactggtccaggaaagtttcaatctacttccttaaaaccaaagacgaagcattcgatgcctttctattatggaaaaagatggtagaagttcagagtgaaagaaaggtgaagaggttacgcaccgacaacggtctagagttttgcaatcataagtttaatgatttttgcaaacaagagggaatggtgagacacaggtcgtgtacttacacaccacaacaaaacggaattgctgagaggcttaacagaactatcatgaacaaggtgagaagtatgttgagtgagagtggtcttggtcaaaggttctgggctgaagcagcttcaatagcagtgtatcagatcaacagaacaccttcttcagcaattgacttccagattccagaagaaaagtggacctcaggaacaccagatttgtcaggactcagaagatttggatgtctagtgttcatccattcagataaaggaaaattgaatcctagagcaaaaagaggtatcttcacaggttatcctgagggtgtgaaaggattcagagtgtggcttctagaagaccagagatgcacgattagcaggaatgttgtcttcagagaaagagtgatgtataaagacatcatagcacaagaaaaatcaggtatgtcctctaacctgtttgatttgtctactgatgagtctgttagtaaaattgcagaaacaggtagaacgaaaagggacttatccccaggtggagctattgatcaaggtggagaaaacacacctaaacagaatacaaatgagacaacaccagaggcaagaacaaggactcctgttaatcgtcaaatagcaattcacagagcaaaaagacagattgtcagacctgccagactagaagactacatcacagatgaagctgaactagatcaagtagctggatatccctatatggccactgaggatggagaaaagtcagaactaggaagctttcaggaagctttagatgatgttgatcaagacaagtggattaaagcatctgatgaggagatggaatctctcatgaaaaacaaaaccttgatactggtggacagaaataaagaacagaaacctattggttgtaaatgggtgttcaagaggaaagctgggatagcaggagttgagggtcccaggtttaaggcaaggcttgtagcaaaaggttattctaagaaggaagggatagattaccaagaaatattttccccagtagtgaaacatgtctccatcaaattttttctaagtatggtaacccattttgacatggagcttcagcagatggatgtaaaaacggcgttccttcatgaaacaatatacatggatgaaacaatatacatggaacaacctgagggttatattgatgaaaagaatccagaaaaggtgtgtctattacataggtctttctatggcttgaaacagtcaccaaggcaagggaacaccgggttcaatgaattcatggaggctcatggttacaagctgagctcatatgtcagctgtgtgtatttcaagaagtttgcaggtggtgattatgtgttcatattgctatacgtagacgacattttgatagctttaaagaacatgaagcatgtaagtgatctcaaagagctgctgggatccgattttgaaatgaaggatctaggtgaggcaaataaaattttgggtatggagataaacagagacagacttaaaggtactctttctatctcccaggaaggttatctattgaagctgttgggaacattcaacatggatcaatccaagccggttctaacgccaatgggaatacattttatattgaggtctactacagatgaagaagttaaaattcaatatgaggcaatgagaacagttccatatcagagtgcaatgggaagtctgatgtatgttatgataggtacaaggcctgatctagcacattctgttggtcttgtctgcaggtttatgagcaaacctcttaaagaagattaacaggcagtcaagtgggtccttaggtatattcagggatcattgaagagaaagccgtgttacactaataagggagatttcataattcaaggctactgtgattcaaatcatggtgcagatcaagacggtagaaggtcaacttcaggagttgtattcactgttggtggtaacgtggttagttggaagtctagcttacagaaagtagtagctttgtcatcaacagaagctgagtatatggcattgacagaagcatcaaaggaagcagtttggttactaggactcatgaatgaactcggttttgaacaggaaacaattgacatttacagtgactcacagagtgccattgcattggctaagaatgcagttcatcatgacaggactaagcatatagagatcaagtaccatttcattagggaattgatctacagtggtttaataagagtgaagaagattgtcacagagaccaatcctgcagatatattgacaaaggttgtaccagtgggaaaacttgaggaagctttggagtttctcagagttacagagaaataagaagagcgggttaagcctcaaaatataaagctgagtgggtttactcaggagatatgaagctcggtgggattactcaggagataagaagttgagtgagtttactcaattggtaaaagctgggttggtttaaccaggtccggaggtggagtccagaaagctaagtcatggcattagggtcaaggtggagaattgtgaataagtgacccaaatgcatattatccttaagtataggaaagcctctattcaagtgagaaggtcttcggttttgggttagtcaaagcttaacacgtgagagcacacgtgcgaacgactacaactgagaatcagctttataatccaagtctctattttcttctgttgtagagtttgttttgtaacagaaagagagagagagagagagaagagagagattcttgtaatcgagtaatattctttgtggcttagtggatttcggagagagcctccggcgagacgtagggttccgttttggagcctgaactcgtaaaactctggtgtcttttctttctttgaaatcaaatgagagtcgtgagtgaagtgagctagattcttcttcgattcaagtcagaatcgtacaacaaccctcttctgtctcctgtccaagttaagaggagaaaagtctcacaaaaagagttgtcctccaatcagaaggaagaacaggcggcagccttaaagagagggataacattgtctgaaatatatggctttcaagacgttgaaccaatgttcattgagagtgactcacccgatttcagaagtcataacattgatctttctaaagaagacgatgttctgtttaaaggaagggtttttgaaaccaaggacgagttcaaagtggcactgtctatttatgcaatcaatcaaattttccggtttaggtttgtgagatacgccaagtgttatcttgtagcacaatgtgttgacaagaaatgcgactggcgggtgtacgcgcataagattggtgatagcgatgagtacgaggttaggaaagtgaagcttcaacatgtgtgtgatgtggaaacccgaggtcaatttaccgtgcacgccacttctaagataatcgctgctttattacggtcgaagtatgtcaatgtcacaactggtcctagagcgagagatctaccctaagctgttttagacgagcataatgtgacaacttcttattgaaaatgctggaaagccaaggaattggcaatatcttctgctcaagggacagaggagacttcttacttacttttgcccctatatttgcatttattgcaacatgcaaattcagggacatattaccatttagagatagaggatgatgatgtcagagataaaaggtttaagtatgcctttgtctcactgggtgcaagtatacagggtctgaaattcattcggcgtgtagttgttgtggatgggactcatcttcaagggaaataccatgggtgcttattaactccaagtggacaagatacaaatttccaagtatttccaatagctttcgctatagtggacagcgagaatcataattcttggacgtgggtttgatctaactatcatatctgaccagtcaatataccatgctaagtcactagtgtacactcaggcgcaccacgtctgttgtcttgtacacctgaggcgcaatgtgaaaagcttgtataaaggaatgtccggacttgtatggaaagctggggagatgttcagagttaatgattttaagaaggcatatgcacgtattaaacgaaggaagcctgaatgttgggagtaccttgaggctattggtgttgaacattggactcgtgcacactgcaaaggggagcagtataacctaatgtctagcaacattgttgaatctctaaacaatgccttactaccggctaaagacagcccagttgttgctcttattgaatgtttttggaagatgcttagtaggttgtttgaagcccgcaagaagaaagtgtctaatacccttggattgattcctgcagaagttgagaaaatcttattgaagcagcttccagactcaataggtgtaagtgttcgaagtgcatcggcttgtgattatgaaataacagcaaaagatagaggaaaattctacgtatcattagagaaacgtacatgcacttgtcactcatttcagctactacaaattccttgcccacacgcaatggctgctgcccatagcaggggaatagaataccgatcacttgttggctgcatgcataagaacgacatatgggctccaacgtttgacggtgttatcctatcggttcaagacccatcagaggtgggagtacctgatagcatcaggttccgcttcattcttccacctaagactaaacgtccttccaggaggccccctaaagttagtataccatcaaccgaagagtttgaggttaacattcttgctcttcatttatattatgatgtaactaattcatactcacaacaaagtatgattatttatgcatgaagaaacagaatactggtacaaggaagaacaattgcggaaggtgcaatggtttaggatacaacagggttcagtgcccagttccgctgaaatgaagtgcatgcgtttgaggaatggtgtacaaccagagagtcttcactggtagtttgtaaactcgtttttatttttttcggctttaagaaggggatgtgatttttgatactttaagggctgaagaactatagctcaatccgttttttggattgacataccccttatttgatactcttcattaaaggtgtacacttgttttgctatgtagtgtacacccgtcgtagttgattcaacggatttattatgagatgttgtgatacattctgtgtttaaatatctatttttgcaattatttttggttatttttttgcgaattaagttacatatgtatccataatttgctgttattaaaaaggtaaattatttgaaactgagaatgaaatgtttccctccttcctttttatcctaactatttaaaaaaatttgaaatgaaattccaatgtcggattgaaatgtttccctcattccttttatcctcactatttgtgcttatcctaactattctagatctttctaaatgtttttaaaaacattgcgtgtattttattttacacaaaaagcataagaggacaaactaggtgtttaaataaagttgtcaaactaggtgccaaactaggtgtcattgcgtgtatatatgtttaaatatagctgtccccctttcactaaactagtctcgcctcactaccaacatgtagggtacgatttaaaaaatcaagggccaatactttcccaaaaaaaacttctaggccatcacaaaaatagtaacaagacaaagtaggttctattttgtttgtaatcttacatatagctgtccaacctattttaatactttaatactttaatatgaggactgtgtcagccttttactagactagtccttttaagttaattaaatcaacaaaagtcttctcaccaccaacatgtacggtataataaaatcaatacaagggccaatacaatccggaataaaatattgtagtaggataacaacttttttattattttaataaacaagcaaacaattcaacaaggggtctcgttcaacaaacataaacaagacaaattaggtgtacacaacttaggtgtacacaactacaacaattctcttatgcgaagtaacaccagaataggtagtagtcgtcacaactgattcgataatagtgccactgagcgcactcggggaagctaagtgtgtcggtgtttagataaacccacttatctccgaacgtgttttgtgaaggagggtagaatcctttgaagtcttcaaataatttctccccaatttctcgaatttccttcgtacgttcacaagcatgtacaacaaagaaggtcttgaaaatctcatctgcaatttcaaacttccctgcgcaaagcaagaacattgcatatgcaaatgttgggcttgaataataaggcacaagagaagcgaccattgccaaagccccatctagatcttgttctcttgtaactaatctaagcgattcaaagtagactgccgtagggttttcgtaatgtaaacatctctcgaagaaacatctacccagtcccgcttcgaagataaacccattgattgggtttatcgatttgctgaaaatttgaggaggctcaacgcacaactcatccagattagcttccatcaacacttccttactgtatacttgcaccagacctctacttcctgctcttaaaaatgcccccatgtgtaaacacgacgccttgcccactcttctcacgatatctaccaatatctcatcaggcagctccggcttggccataacaggattttttttagatctgttttgtttattgcaaataaggaagtcaaatatataggcatttctctctcatgaatttacaactttcttttttctacaagtacagatatatgtatcttacatagacaagttgtacaaaaagtattatggtggacatactgtctaccttgaaagtctacagaaacgaatgtggtgtacctaacctattataaattcatagtaaaaccatgaaaattcgaatacaatccgtttcaatttaagtgttttgaaccataaaaaacaatcaacggttatgatgttgatatagaaacttactcattgacttggaatttcaaagagtttagtcatgtatcatgtatcttagttttgaatttcattgcatttcaataagggtttttcccttgggtttagtaatctatcttggcttttagggtatagttttgaattccattgcatttcttaaatgggtttagtaatctatcttcgctgctgtactattctagtgtacctatgtggtgtacagttctagtgtacctatgtggtgtactattatagtgttcgcatttggtgtactattctaatctactattataaagtcatagaatcaatgcaaattcgaataaaatacatttatattcaagtgttatgaaccataataaccaatctcgggttatgattttgaaataagaattttgtcattgacttgaaatttctatgagtaatctaaggctttagggtctagttttaaacttcattgcatatgttaaatggtttcccttgggtttagtcttctatctttggcttttagtgtatagttttgaatttcattgcatttcaataatggttttaccctaggggtttattaatctatcttggattttagggtatagttttgaatttcattgcatttattaaatgtgtttagtaatctatcttggctggtgtactattctattgtacctatgtggtgtacagttctagtgtacctatgttgtgtactataatagtgttcacatctggtttactattctagtctactattataaagtcatagtatcaatgcaaatttgaataaaatacatttctattcaagtgttatgaaccataataaccaatctagggttatgattttgaaataggaatttcttcattgacttgaaatttctatgagtaatctaaggttttagggtatagtttttaacttcattgcatatgttaaatcgtttcccttgggttgggtcttctatctttggcttttagtgtatagttttgaatttcattgcatttcaataatggtttttccctaggggtttattaatctatcttggcttttagggtatagttttgaatttcattgcatttattaaatgactttattaatctatctttgctggtgtacaattatagtgtacctatgtggtgtacagatctagtgttcttatgtgatgtacaaatttagtgtatgtatgtggtgtattattctactctacttatgtggtgtacaattccaatgcatgatgtagtgtacatacttggtgtacttatacgagtgtacaaaagagtatacgtttagagattatcgtgtacatccaaagtttaaagtcaacaaaaagcatagcacttatagaagcaacaaatttaaaagtcattaaaaagcataacatttcaatatccataaaaacacgtacatccaaagtttaaagtcaacaaaaagcataacatttcaatatccataaaaacaggtacatccaaactttaaagtcaacaaaagatgaaaacaccagcaatgtctcgattaacgtttttaaagaaggtaaacaaaagaactttagattcatctgcaaatccagtcaagcttttgtagcttcaacactcttaatgaactcagcgtatgcatccagtgcgtatcctttccttaactcattgaccacctcctctgtaatctcacccatatcatctatgtcaagcccaaacgagtgcatctcaaggtattttgttgcaaggggtcaactatcacctcctctctggttctggtatactcttataaccctctccaatgtcagtgggtttgttgagaagttctttgtatacttcctacctacaacctctttaaccaaccatggaatcatctctaaaacaggcgccatcaaaccttgtacttcctcatccgatgttgcttcaattaaagggtcaaagacctgaactatatgcaacctcaagttaattaccagacctacccaatgtcaggtgtaccatttcatagggatgtacaccaagtgagcatgttgcagaaaagttgttggtgcccgtccttttgccctgtctacaacaaacgctctgatgttcactccccaattgaacttactcttattcttgcaggctttgaaatctgtgtacttctcatttagaagggtcagaaaccatgtatcaacgaaaacagctcctaccgtgttgtacaaaccatgccttctgcgccacagcatagccattattacctacacatgttgtttaccaattgcaccatgtgagatactatcatgtatggtgttcatactaagtattcaagaggtttgtacaccaattactaaaataagtaatatagtacaccaaacaataactttacaccacaaaccaaaaatacagttttttacctggaaataattgtcttttgctgtatcttggttaggtggcagatcaacaatatcaactaactcaatgatgtcttccacacctttgtaagcctcgtcccatttgtttctctcatagagagcaaagtcctttccttccttttcagtccttttcctcttcttcttgccccttgacgttgtacctgtctctaaactaatgacctcatcatcagatttgtcgtcttcctcattctgctccattgtggtgttagcttttccatcttcattcggttccattgtggtgttgtcttccccgtcttcctgctgcttctccattgagctgtcttttgtagatcgcagtccaccacagccacatttgatcagaccctcgaataactgaaccatctctttcttcaacgtgcttgctgtttctttgtgttgctccacaatgaattttttcaacatctctatagtttcttcgtcatctttaattacagcagcatcttattggttcttctcctcatgtcctcctctcgtagctggctctttcttgactccccctctcctagctggccctttttgttactccacctcgccttgtaggcgctttcttaacataccctagggtaagaggcaccagtccactagtctctgtgtctccacctggccattctgactcagtaaactcatgtccttcaattagcagcttctccatataatcctccttctcatctatagcatcgtcatcccacccaaaattcatgcattccacgcctcatcaccctcaagcgtgtaagcaaccttcaactgaaaaatacatgtcttaaaacaatgtacaaaaatgtgataaattagtgtacaacattaaaattttcacttacaaagctgtacaccatatgtttaaaagtattgtacattacctgttcatcggattcaacctggatgatgtctttttgatgtagaatcagttttgtgtcgagatcgtcatatgtcatctgagtataatcacgcttgtcatctggatccggtagcttagaggcaataagtaggattgcctcaaacgccagcatttggagtgccaatggaaatccataacaacagctactttgttgtcttagacgtgctttaagctctgtgatgggatcagtgtcgctaagtgtaggaggtccaaacctctccatcgttgtcttgaaggctactctcccccacgggtatgataagaagaacctaacatcatcaagcatcttaacatattctggtgttatgttaaggtacttgttactacagactatcacaccatccaccaggagaatcaaaagtagacaaaaccgcttccagcaagacatcttctcaccatcgggcatcttgacatcttttcctagcatatccaaaacatctgtaactgtgacatctttttttgaaccaaacaaagagttccaaacaggttttgaaactattttctgatgggataagatttcctcttcacttggaattggtcgacattccaacccagttgtaatgtgaaattctctcaaagagaacctaagaggcttacctccaaaaatgaaccagaattcgtgtctcttcttcgtcactagctgtctagacaacaaaccatggatcagtttggcggagtgagctgtttggcaaaccggatacttgaacaatttcccaaattgagattttaacagacgctcaaaatctgatgaaccgccaaggaactcagcaatttcttctaagagctcaggtgaagaataaatgttcagccttgcgtccttgggaaaaaaacctcttgcaaggactctctctggaagcccatggtccacgccgtcctcactttccgaatcctttgaagtcgttgacagatctggccatgttaagaaaaggcatgttgaaagcacttgtcggagatgcaacatgaaaggacactagtactagacgtgtcgtataccaaacaatttagccgatatgtaccaatcttcgtaaaaggcgaaagaaagggatgttgaaactaatctcttctgtgatgagccgggaccttcctttaaaggccaacatgatgatactcatcttgatatgacagattctctcgattgatcatgacaacgagaaaattaatgtaatatattatagctatatgtataatcatgttatgtatgacaagcattattgatgcttttgtttttatgggataatgtttttattgtaatatattatgacatatgaatagtttatgtcgatgttttaatgaataaatattttattatagaaaaatgtcaaaatatgagattgaggatgaacatatatatcagctgacagggttctatgcacacaatctttaaagataaaaatacttctcctctctcgattataaaagacttcgctagaaacgtgagtactatatatgaccatgcaaagataatattaggctttagcgaaaccaattttacaatcccaagggaaactcattttaaagtaaatgatgcattatattcccccaagtctcatagaaaattgataagttttaaagatatctgaagtaatggatatcatatagagatgacattgaatatctttgcataaaattcgagaggcaatatatattagaagaattgccaatgctatcatctggattattgatgcaaacctcgaaatccacctagggtttacgcttcttggtttctcgacctaaagcttgaatgattcgatgaatgatggtagagatgaaagatggaggttttattgaatgaatccactctcaacgtgcttgattgaatccacaatcaaaccacgaacaaattaacttgaatccacaagataattgatctgcaaacacacaagactttagtgaatccacactaacttctaatgcataaaactcaaagacactctttaaagaaaatacttgtttatttcgtaaaagacttgaatacaaatgaaaactaaggtgagcttatatagaggctcatacaacgttcatgtgctctaaagaagtaaagaaatcgcaacaataaatgaaaatatggccgttggaactttagtgacgaaatcggccaaataaggaaacttgtgatgtgtcttgagtcttgacaacttgggctggaagtgatgtgattttgggacatctagagtcattgtaggaggcttcttaattcccaaaagatgatcaaaatagagtcgttgtgatttgatctcatttagatccggaaaaggaaagtcttcgctcagcgggttcacataaggaaagatgcaccaaggattaagtgtgaatggttctgggtggcgtagaggatctccaggcttccatatgtggctctgggacgcacaaaagggaaggaaaggatagctttccttagttcgcacaagctgatttgatacatgaagtacttcaggtagtccgtcagaaagtccatcaagaagtctaacaagcaatctgtcaacaagtgcatcagccggtacgtcagctcccattcttacattatcccctccttcttcaagaggttttgtcctcaaaacttgtttacctacacatagataagtcaagttactccattgaagtgtataagggtttagaagcttacattgagtttggagaaattgttgagcattcggtggttcttctttgatcggtataatgtctttgacactctcatctttgttgacaacaacttttttcaatgtcagttctccttggttttgagtttctttcgtgaacactttctccattgttgaaacttttccttgatccttaatgatctcttttgtacctgaaactttctcaatgcttttggcactagacaagtgcattaaaagagtcataggaacattataatcaatttgacaagcttcagtttgaacctgatcatgttgaagagtggaaacgtccacttgtttttggagtacttgtggatgaagacaaagagttggttcttgtcttggtgaactttttttggtgggacaatcctttgctatgtgtccttgtcctttgcacctgtagcaagttagttccatagaacattcaagttcagaaaacttaccatgatttttcagtcagatttaaggttgttttaggcatcttgtctccttggatggcttgctttggagggaaagttgttttcctcccttgattcagacattgtgggcaatacttttcgtacataatccactttaggttctcccacattctgatctttggtctcccatcacctcaacggttgtactcatcttgatccgaccacctcaaaacactactcttgagttgccctagggcaatcgaaagcttatcttcttgtggtgtggaatggtactcgaaatagtaatttatattactttcccactgtagatagcccaatcctgaaaacaaaaagaattcgggtccataagttttactaccattatgcacaaataatttgtatataactttgcgagtggggtagaaagtgggataggaattggtgtttggtatggggttccatgagatccatgacttcggataactcggtgtggtgtagctgctactataacgatctggtggctctggttcaggtgctccaccatatggttcttcctcaaaatccgagcctgatgagtagccatcatcatgccatgactcaacaaatctagtctcattgtagtacgagtcttgactatatccatatgagtcctcttcatcagagctggagtactctattgtctccatcgttctcaaattttatttgtggtacctcgtaaaagagagtaaaacaaagaagacaatgaatcataacttaactcaggaagtaagtcaacaaataagtcaaaaataacaacatttgatttatttattttaacgaaaatagcaaaaatgaaacaaataacaaactaaacaaggaaaaattttattttgtttttctattaaggttgcggaatcaaaacaaaacaaattgcaagaaacaagttttattttggtttttcgatttaaatttgaaaataacaaaaacagaaattgaaagggataaaagggaacgagttcaccttgtgggataggagcttttagctctgataccaatgatgcaaacctcggaatctacatagggtttacgcttctctatttctcgacctaaagcttgaatgattcgatgaatgatggtagagatgaaagatggaggttttattgaatgaatccacactcaacgtgcttgattgaatccacaatcaaaccacgaacaaattaacttgaagccacaagataattgatccgcaaacacacaagactttagtgaatccacactaacttctaatgcataaaactcaaagacacactttgaaaaaaatacttgtttatttcgtaaaaggcttgaatacaaatgaaaactaaggtgagcttgtatagaggcttatacaacattcatatgctctaaaaaagtaaagaaatcgcaacaataaatgaaaatatggccgttggaactttaatgatgaaatcggccaaataaggaaagttgtgatgtgtcttgagtcttgacaacttgggctggaagtgatgtgattttgggacgtctagagtcattgtaggaggcttcttaattcccaaaagatgatcaaaatagagtcgttgtgatttgatctcatttagctccaaaaaaggaaagtcttggctcagcgggttcacataaggaaagatgcaccaaggattaagtgtgaatggttcttggtggcgtagaggatctccaggcttccatatgtggctctgggacgcacaaaagggaaggaaaggatagctttccttagttcgcacaagctggtttgatacaagaagtacttcaggtagtccgtcagaaagtccatcaagaagtctaacaagcaatctgtcaacaagtgcatcagccggtacgtcagctcccattcttacatcaattatattgcacaaaaataaatataatcgcatcgaatgttacagtaaactcgagtgataatccctcgagtgagtttactagtacatttaagtcatgatgcgaaaaattgtgcaaaattttaatggccattcattgaaaaaccataaaatatttaaatctggtgagtttcatgtaaagcatgttctcaatgaaaactcataataaggccatcgccaactaaaattgggaaaaaaagacctgaattcttgttgagaattcatggtgatatatgtggaccaatctacccaccatgcgggccgtttcgacattttatggtattaattgacgcatctaatagatggtcacatgtatgtcttttgactacacgaaacacggctttcgcaagattcattgccctaataatcaggttaaagacacaatttcctgattatggcataaataaagtcagacttgataatgctggggaatttactttgcaagtctttaatgattattgtgtatcgttgagaatcgatgtaaagcattcgctccctcatattcatacacaaatggcatggccgaatcattaattaaacggttgcaactcattgcaagactgttaatattgagaacaaaacttccaatttttatatggggtcatgctatattgtctgttgcagatttggttcagattataccaagcgcagataatgaatattctcctttacaaatgacttattgtcaagtaccaaatttatcccatctccgtagtttttgatgtgcggtatatatgcctatagcaccgccacaaagaacaaaaatggggccccaaaagagattgagagtatatgtcggttatgtatcactgggtataataaggtatcttgaaccacaaactggtgagttgtttacggcacgttttgccgattgccattttaatgaagatgaattcccagctttagccccccctccccacgaagcaacgtgagctgaaagtacatttacaaaaaataacaaatcaattaccagattcgttcacctatacaagaaaggtgacaaagtcatatatccccgctgcaaatgtcatatcaagagttaaaattcctagtaagctggaattagattggagcaaaattaatgaatctaaggttcaattaaagcgtgggaggcctattggctcaaaagataaaaatccccgaaagaaaaagaaaatgagagaaaaaaatgaaaaggttcttcaacaagaaccattttctcgggacgatagagaaaattatgagatttccattaactatacccatgatggtatcatatgggatagagatgatattgatgatgaaaatggaatattctccttttctttctctaaacagatcgatcatgagaatgatgatccggatccaaagacattatccgagtgccagaaaaatgctggattgggagaaatggaaaaatgccatgcaagttgagttacactccttaaataaaagaaatgtctttggacctattgttactgcatctgagaatataaaacttgttgggcacaagtgggtattcgtgaagaaatgaaatgagaaagatgagatcacacgatataaagcccgacttgttgcaaaaggtttctctcaaagaccaggagttgattatgaagaaacattttctccggtcatggatgcaattatattcagatacttaatgagcctttcggcttctaatattttagatatgtaccttatgaatgtagtgacgacttatttatatggatctcttgataatgatatatatacgaaaatcccggaaggattaaaagtttccgaggcattagactcatcaaagtctaaagatatatatgcggtcaaattaaaatgatcactttatggattgaaacaatccggacgtatgtggtataatcgtttaatcgattatttattaaagaaagggtatgtgaataatgaaatctgccctgcgtcttaattaagaaatccctttttggatttgtgatcattgttgtttatgttgataacctaaatataattggaactccaaaggaggttgatgatgcacgaactcatatgaaagaagagttcgaaatgaaagatcttggaaagacaaaattttgtctcgggctccaaattgagcatttccaagatggtatatttgtgcatcaaaccaaaatgaataattatctatctgtttttatattttgttagttattttggcaccaaattttcttgcattattattacatataagaaatataagaaagagaacgaatatgtgcgtgaaggaataataagaacttcatttatttgttctccaccttttgttcttatacatacaaataatataaaaatattatttcttttacgatactccctctcttccagcaaatttgatgttttggtttttttttatttgttccaaaaagtttgatttcttacaatttatttaatatatttattttattaaatttaattaataataaaaaattagaatggagtgtcattttggataagaaacttaaacgttcaaaatttctccattctatttacactcattaagtattaatattaaatttttaccttaatctatgtggaaaagctaaaacatcaaatttgcaggaatagatggagaatatattatggacctgaattgtgacaacaaatagagcggagcggacagagcggataatacggacaaagtgcagaaaaagtggttgcagtgtacaaagcggataaaatggcgaagctgattaagtggatgaagcatagcggttttatgagttgaatggtaaaaaacggacaaaacggtttaattttttcaaaaacatattttgtaacaaaaaatttctggacaactattaatttttttttagtaccacaacattttgaaaaatgtatcaaaaatataaattcaaatgtaaaatcaaatattttgatttttccataacatatttgctatcgtttctcgaatgtttgccatatgttgtccttcttcattctctacttcatcaagctcaaatgatgcattgttctgatcttcagtttgagtcacggtaaatttttcaacaaatctgcatctgtaaaatttgaaactctaataaaattatagagacttattgttgcgaatattttaacgcattatttcaatttaaaactaatattaaatatggcagaattgaaaaaaaatgatactttacgaatttatgtaagcttaatttaaaatatggcaaaacaagtcgaagtattaatttaaaatatttctaaaatatcaaaaagttatattatattatgttactaaaatttaaattatgaaattataaattgattccttattttaactcatttaaatttatattcaaatagtttataatttctatatactatgcatgcaatctcacaaaataaataaaattaaaaatgtgaatgaaaaaatttctagttgaaaatttatccgttttcgtataacagattgaggtccggtgtttgtatttgtgcgccttgaagacaacactctagcaaaaaaaatgtgaaaattatatcaataattttgaatagaaaaaattaatatttttaactagttgtttaccttttgtgcaatatgtttgtttacaaagaaacaaattgaacaaaaaaaaagaaattttgaaacaaatagaacaagaaaatagaattttgagagagttttttttttgtattttcgtttcaaatgctaagatggtagagattttttaggtgagatctaagatggtgtagatacgagatgtttatagtggagttacttctcttttataaagaaaataaagaaataaaagaaaataaaaattaataaaaaaagaaaaatctgactggtttactaaacccaatccacttttcgaccagctcatccactcttttcttgtgcatggttctgtccatacggcggaccttctttattacagtccacttttacctttttagttttttaatttttttttattttgttcactgtaataaggacaaaagctgaatggtaaataaatttttgacgaaaacacagaaaactacttcgtctgtagctcccattcatgccctaaggttttgaatggttacagcggtccaagcagacaaaactgtctacagagtgaaccgctttttattcaccattcacaaacaaaatggatggtaaataaaacgcagttcagtcggtagacggttttgtccgcttggaccgctgtagccattaaaagcctataacaattatgtggttatgattgtccgttgtgcagacatagattatagcggttagggtaaaccggttatttacttgtataatttgaaaaccaattatttaccaaaatcttcttcttccttaaccaaatcattcgaaatttagaaatttggaattaaggttttgatccctgagttatgccgccgaagcgtaaagatataaactttctttttgatgacggagaagatacagttgccattatagatgatgaagctaatgaagatctaagattgaagatattagagaaagctttttcgaggcgtaatgttgataacaagcttgattctgatctctccttcgatcctggtgtagttagtactgtgatggttaatggaggaaagtcggaggaagttaaaaactctaagagtaataagaagatgaagagaaataagcttgaagctgccaatgaaattgtaagtatgaccaattctctgctttatcttcttctcattacagtttccagtttttgtagtcttaattgctccattattgcctcacttatgttcttcttgctctgaatgttgtctgtgaattgcaatttgatatttgtttaggaaactttgttgccttgtgttttaatgcttttcgatttttcctatattgttcagcccattgtgtggaaagacaagatgaggataacatggtggaggatgtagtaagaggtgaagaagaagatggagaaacaactagcaattcggttatgacaaagcttcttgtgagttgattgaaacgtttcttttagtcttatctcaaaaccgtgtaacttgtcctgtgatgatgatgaccatttttggggtcttgttgttgttatcagcgtggagcaagatactttgaccctcttgatgctggttgggtaacttgttatagctgtggggagaaagatcatataactgttagttgtccaactcttaccaattgtaggaagtcgtgctttatatgcgctagtttggagcatggtgcaagacagtgtacaaaggtatggtcttaagtttgatggtagtacttaatatgtccaactcactccataaagctcatgtataaagcttgcacaagtgttttatgtggttaccatggaagatttaggatgagtgatcttttttctaagtagatttttccttatttctaacagggacattgatgcaaacctcggaatccaccaagacaagactcaaagattcaaaggtaaactatgcggaagtggtgatgatgatgaagtaaccgatttgatgttgaatccacaacaccgagggctagagaatatgatccaagggctattcctcgcgaggatcagagactacacgaaacctaagtggtttgattccacaaactacctagaactcgcaagaacaatgatttgattcaagacgaagtattgaagcaaaacaaactgaatatcttattatcaaaagcgtgaattgaaagtacaaagtgatggagcttatataggctcgaaatagatgaccactaacggtctaaaacaaagtgagaaaggaaacaaatcattcaacataaaggaggagaacgttgtagagtttctatccgtttggctttaataggggagcgtcaatgattctggctgaagagatatgcagatctttaaggcttaatggacgcctaagatatccttgaatagatggaggatccagattaaatagaagaatctcgattggtgctgaaaaggaagtagctttgtcggaaaaggcaactttctcttttgttggttccacacataaaaacagcttgtgtgtcgttttggcaactcctaaacagcttgtagtcttcatgagagtgaatataaacagcaggaaatcttcaaaatagtcgggtggttcgtcgagtaggaatgggctgtcagctagttcgtcagcgggttctttagaaagtccttcaagaagtccgtgagaaagttcttcagccggttcatcagcaagtctatcaggtggtctgtcagtgagtccatcagctgcaatgtcagctctcattcttatatcagacatgattgctattaagtacaacagtgggtctaaaagagttgtatgtttaagatgtggagacattggtcatgacatgattttgtgcaagtatgagtagtctaaggaagatttgaaggtaacttttgttttcctaaattacagtattttgcttatgatttctttcttataacttctgttatttactttgactagaatatacaatgctatatctgtaaaagctttggccatctatgatgtgtcgaacccgatgattcaatgtcatgggttgtatcttgctacaaatgtggtcaactaggtcatactggactcgtaagttgtagagagtttagtttcgaattatccacactgttgattgagttgtccctaaacagagttgatcactttctctctaggcatgtggtagacactatgatgaaagcaacaaaaatgatattttcagtccatcatggtttaagtctaagggagaagggcattttaagcgcgactgccctaattcttccggcgtacgctttctagaaaactgtagtgaagaagggaattcatcgagtataaactcttcacaggcagagacacatcgagtgtatgctacaaaagtaaaggagtaacacatttcgctcgtgaatgccccaaatcgaattcctcccacgtaggctttattacactatacatttggtgctttgagctcttcacttcgtttttttctctcatgttattcacttatcaaacgaacctatttctttttgattttgtttttcaggataaattggatatacttctaacaagaaactcccacttagtgcagtgcatcgagcaattactaagtgaatgatttaactgactatattaagtctttctctaattttacgatgagtcttcttttttttctgcagatttgatttacgactaaatatatgttctaagattaaatatctattgtttataaacatgggttcgatggtagtataagatgagccttgttggatggaattcaagttgtttaaagttgagttaataatagttggactgagtacagtttaatatatatatatatatatatatatatatatatatatatatatatatatatatcttcttcacaaagccaacatgtataattgttttctgatgaatttctaacagaatttagccattacatctatatcgtcaaatgtttttgatgtattactaccaaaaacagcaatatctttggattttttgcgatagagtacatacggattaaattccttcaaatcaacaacaaaatatagtcgtcggaaaaatgttatggaaaaaatatcaaaaatagtagttgaagttttaccgataagactaccagtctagaaaccggatttagatctcatatactttattttacattacaatttaactatctatttcatcgtaaataattatattttaattatatgcatttcatctaaatggataagagttcaaaaatatatattaataacaatttgtttcgtattttgtttttctcgttctagcttagctatatctctcgttcgtgtaattttaaagtggatgggctaattcgatcttctagattagtatgctaaattaccaatttatagtttatgccaaataatttaaaatcataattcacaaacacttcaaaattaagaaatattatttttattattaaaactgagaatagtttatagagagaacaagaaaaatcaagcgttgcaactataagtgcagacgcattgcttgcttggctttggcatacatgtgccttttgcagctgtcccgtgcatccaaatacacttagctacacacttgtcttcttcacatagttctgttcctgacatatagtcgtgacacaattcttgtccttgcgtctcttttgtcacaagccctattataaatatttaaacataatctcaatttcttttttgttattaaaaaataaaatgcgacgaatataagaaactatcaaataaatgagaagactcataaaagaaaacttcacataaaagagaaaagtcatgtataataaaagtgtgaatcaaacctaaaacgaggacaaccatgaaaatagcaataacggtggttttagacatctttgatgatatagtcgaaatgaaaacttcaatataaagggatggatgtaatagttatgtacaagtgaataatgtatatatataagaaattagatgcatgcacgaactatagaaagtagaaaagaaaagtagattacggaaatgtatatatggctaaagatcataataacacatataggaaaaaatcttttaaaattattgactaaaggtgaaagttaattacaaagtgataaaacatatccaaatgtcataaaagcagtctaaaaatacatgataaaaacactatcttaaaatatccccttaaaaataaataaatgagaaaataaactctattggttatctttaatcatttttttcatattttcgtaatattcaacttatttactcttttttaatacatatttatttaaaaatatattactatattaatgaacgtatattgttattagttatatgtttttgttttgaaatatcattagtgttttatttatttatttttcaaaagaaaaaataaaataaattgagaaacagattttttgaagattatgttccataaagaattatgtacttttattttgaaacaaaatacaaagatgttgtaattaattttggaaggtgtttgattacacggtttgtgggatttgtttggatatgctatgtatacccttaatgatttcaattgtgattttgcatcttttgttaccttccaaacaaaatctggagattaatctatttaaaaaaataattattctactaatattaaaaaggaaatacatcttaaagatttgtagaatattgcattataataatataccctttatgaatatttcattgatttgtagtaataacagatgcaaaatcacaattgaaatggaatttggttccagaaaaatacctacaatgttattacttgtcatggtgagaacaatgttatcacttcccagtatataaaatattctccaataatattaatttaatttgaacttataattgtttaactgtcacagaaaaaacaatgatgtgtcatgtgtttatgcatacattgaaattcaacatatttacacatttactactaatgttggttctttgcttgagtctctgaatccacaaattcagcgactgaagaagtcatctgatttggtttcttgggagctttctcttcagggatgatgtctctctcaggttctttcctcttcgaacttacactctgagaacctgtatgcattgttcctagactcggtctcatttctatctgagaagagcctgtggctgcactaactgtaacccttttttttccactcctgagaaactcttcctcagcttttaatcgttccaccaacatacaaaccgttagaaactcctcttccatcaatctagtcacaaagccactccacgacgaaggaaacttggaaatgatggtactcacataaaacgtctcatcaagaaccataccagcacccacaatggaatctgcaatcttgataaactcttgaacttgctcaagaaccggtctctcttcaaccattttgaagtcaatgtactttctgacttgtaccatcttagaattggattcctcacgacggtaaacccatttcaactcttcccacagttccttagcatgcttgaatctcttcaagtactgacggtacagatcatcagacaatgatttcatcaaatgattatggcaaagataatcatctctcaaccaatcttgagagctaccactaccaataccaggataaggctcagagagaacataagccagcttcatttgcttcaaaaaaagctccatctctgatgcccatgaaagataactcctcccatcaaatcgccaagtctcgataagcgaaaaaccgtgagtgctactgcttctcgtatccaaagcctcacaagcatttccatttggtgttctgcagcaagatatgcggtccaatgaatataaaacaccaaaaggagaacatgaataaggtaacattcttacgtattctttaactggaaatgcttaatagcttcctcagtagcagagaaatttttcttgaacacagaccattggtgtgttgggaaacttattcctaacagagaacacaacatgaaagctttttcatcattcacaagagttgcttcagagtaaagataacaagtaagtgtgtgtgttcaaaaattgtacctctaaattttgcatctttttccttacgaacatgtttcttcccaatcaatagagaagttttgccttggtatttattaaccatcacatctttcgtctccgagaactattaaacatataaaaacagattccagaaaaatatctcacagaacaaatcgaaaatcaaaaccattcactagaatagaacatagagagtagagtaagcaaaagtcgtaaccttataaagaaagcgttcttcttcagcaacggaaacttttcttttatacgccggaggcactttctccggtacgggtgcttcaccgtggtctatgtcatgagatttaacttctctgagagtgtctttcactgtttcctcgtttttatctgtggtaattatctccgttgtttcgccagaatcgagcaacgatttctccatttttagagacgatttagacggtggatctccggtgaggagggttttggttttctgcgttgatttattgggagactacacatacatattgggatgaaagaccaaaaacgacgtcgtttactaatgcgaagacctgggcagatgtaccggacccatccgaaaattttggtaatttgggtattcttaaaaccgttcagaaacttgtttttgaaatcagtgaccggttcggtgatatgaggaggtgcaccaatcggttaccaaaatattctttaaattgtccaatttttgctataaatcgatggcaaaattgtttgaaatgttccgaaatattgaaaaatatgccgaaattattggaccaatcggaatttaaactgagcaaaccgtattaattattgttgtttcaattcagaacacttcagaaccgaaatatatcacttcagaactgaggaaaaccgtagttcaaattcggttaatttggttagattttttattaatcaaacaaaccgaaattccgaactgacccggaccgaagtaccgattgcaatgcctaataaagtaagatctaatgaaaaccggtttgcagataagaccaatttagccggttaaggttcattatttgattaacgttttttgttgttgattttctccaaaatcaatcaatcactaaaattagtcgttaaacaaaaagcttgcgaagaagaagacgaagaaaatggcggatttgattttgagttcctcctctgcacaatcctctctccttcacgtcagacctaatcactatctactcaatacctccactgcttcaccgatccgaagtgtcagattccaaaattccaacggttttcatcctctggcgttcgcatctggtcaccgacgacttcctctcggtgcagtagttccctctgactccactaagacgatcaccagtacgattactgctaactgcgttgattcgggagtcaaagctgttgaagtcgagcctacgatcgattacggaggtggtggtggaattggaggtgataaatttggcggcggtggtggaggcggcgatggaaatgacgacggaggggaagacgataaggaggagagtgacgggaagaagagcacgcctctgtctatgtcgcagaagttgactcttggttacgcttttctcgtcggaggtgagattcattgtaactctagggtttatacttgattcttcattgtgaaattgatttagaacttcggtataaagctaagattatccagtttcttgtgtagtaggtgagattcaattttgtgaatgtgatgaacttctagggtttagggtttacctgcttcttcatttatactttgaaattttgaatttgaagatctaacgtgatgtgttagggatagcaaaatcatcacagttctttatcgtggatgagaatttgatcagtgttcttgaactctaatgttcttggggaatctatattttggatgattttatcttggggggttttaagaattggattagggattagaagcacactcattagtatttgtgagaagaaaaaggttcatagagggttaattcctatttgcatatttcctagagatggagatgttacttgaattctgcaaaacttggtttctggatctgactgtcatagctttaggttaaacatggaggttccttgttcttgttgatgcctttaagattctttttatgagttgatgttactaatgtgattgagatcggagagtccaggttagttcagtctgtatatgtgtatgcttattaggtgaagttgagttctcattttattaatggactcacagatatattgaaacgtatcgaagaacagtgatgttatgcttgcctataaagcgatactcaaatgctcatgaactgttagatggttttgatgtagttggtgggctgatgggttatctgaagagcggtagccagaaatcgttgcttgcaggtggactgtcagctgctgttctgctgtatgtcttcagtcagctcccaacaaaacctgttcttgcatcaaccgttggtgtaggtaaggaaaaacaattgttaataacagagtagttgtgtccaatttactagtttcaaaagctggattcctgaacggcggtgatactagcttttatttttgtaagtctgatgatgtggcgtctaaacatctgcattgttttgtgttgttaaaaaagtgatggcgggtgcgttaatgtacgtaatgggaacccgatacatgcgttcgaagaagatatttcctgctggagttgtgtcgatcatgtctttcattatgaccggaggatacatacacggtatcatgcgcagcctccactaagcagtagcaaacactctcgagtctgttacaaaagtgtcttgtctctgacctttttctttctttatgtgtgtgtttcacggtgtataaagcagctttgctactttgttttgtctgaaccataagaaaactagcaccaaaacgttctaaaggactttatggatttagctctgtggtcagaatctaaaaactcaaattattcccgaaaatcttcaaactcgtggaaccaaagtaccaaatttaaagagtgagacaaaaaaaatatatttaattttttgattcacgtaaaaatatagaaaagattgaaaagactttctctctcttttctctcttaatctttgagagagagaaagtcttgtccgatgttccgatttggtttcggcaacgatcagttttttagtggtgttggtcggctttcgtctagtgtcgttgactctcttagcaatgtcaaatagctctatttccatcaattcgctctcgattcggatggcttaggtatcggcttttatctggatttgttttttcatttttcgttcctttgtttctatttagtttcagttttcttgtgcttgattgctttgattagatccttagatctgggtgggtagttctttgctcctccttttcttaaagggtttatttcgttcttcaagcttattgggtttagtcaattaagaacagattgaagttgcagagcaaaatcaggttcgtatctttgggttttttgaagtaattaggatctttggggtttttgaagtaattaggacttaatttatgaagtgatgctttggattcaattgattttttgttttagagaaaagcaagcctagatttggtgaactgcaaatttccatggagattgaaaagctcttgattaaagaagaagatgaagaaaattttcggaattgcattttgtaaagtcataatctcatcaaaattggtcttcacttgtatttttgggcgaagattgagatatgtcgactgaagaattttccggtgactttggccagaattgaaggctttccgacgtaacaaagatcagcgagtgttcggagactcccacatctttgtcttcccacgtgtctgctaacatgttccctgcttgccacgtgtcatatgctgtgtagaagtttttcttcagcttaagttctcttattggactttgttttcttttattgggtttgcttgttttaaggtttgtacactataacctgttactttgtatctgtataataaataaaatacacttatccaatgtatcttctgcatataatggttttggattttctgtttttaccaacatgaatcatctgctcccaagtctctcaacaacagttactcccttcaagtgttcaaaatttgctttctcgatcatttggaacctttggaaaaataggaatcaacttatatttgaaggagacatagttcatgctaatgatatttataacaaagcaatggatgaagaaagccaatggagctttgctcaaaagaatgtgatgtttcaagaaaagtagccaacgtatatggaatttttgcagcctcccttgatgggagaagtcaaatgtaacattagtagcttgggttgtcagaaatctggagggtgatgttctcttacatagtcgcagatctttttcccaagtacactctctctttcaagtaaaattttgtagttggcagtaggctttggaaagtatgaaaagtttgggattttctcatgttctttttggcgcttcaactccggaaattatcaatgcacttaacaaacaaaaagattggccagccatcattggtcacattgtagtgttacttatgttcaccaaagatcaactacactggtttattatgagggaatctctctcttgtaatcaaggtactatggcaattgccacaagtgtggttactgattttagactccaatcatatgttgccagcagagctcctcaatggttgcaacaattttaacgacaatgaaagacctcaaacatttcaggtttgactcggttctatctaatgaagggagtagtttgttgacttttgaattcttacctccttaagaagaaagctaaggtcgggtttttttattcgtatttgtcttgatccatttttttttttttttccttttatcttttattttcattaacttctaatttttctcttatctcttatctcttgtcctcttctttctagtgttttcattttgtttttaactacattaaatttttacgttctttgagaatgtcttagtcatacttttcatctcggtttgggtttttacatgggtcacctaatttttttaggtgatttattatctcttcttttctttgatctctattgtccttttcactctttctcctctaataaatacttcgttcagagtttataaacgactttacacgcacaacttctacactctgcttccctttactcttctttaatggacgatgatctttgggacgaatagtaaaacatggacctgggaaggaatgatcctaagttattcattccttatattgcatatgatgaagctgtgtctcgcaatcgattgagtttaattgctagacctttgaatccaacagctcagaacctcttctctgtcgtctctgtgttgccaagaagtaggggacttacttccagagtgcatgggcgtgtacttgataatacatatgttcaattctattagaggcaacaaagaagcccaacaattagcctcataagaagcccattatcttatgttattagggttgtctagtatcttagattcatatatatatgctactatgagaatcaatgtaagcaactttgagagttggaaagaactctccttcttcaccattttatgaaatcaaatctaaagtgttattgttcttggtgacaaacctaaatcttcttcatttctattctttacatttcaataaagctcattgagctattgtattttccaatattagatttctatgtcaataagctcatttgagcataagttctaaaatgtcaacatggtatcagagccaccattggcccaacaagaaaatttccacaaaaatggtttccacttttgtggcccgtacaagtggcatgtctcgtagtatttctgagatgttgggcttgggctgttttccgttggaccgtttcccacccacatctcgaaaaggtccattagaatgtcccacatcgcttgggattaagatctttgggcattatagaaaggatgtggcaatccttaactcttgagctagcttttgggttaagttatgccacattcctaatatggtattaaagcataagttaagaaatgtcaacatggtatcggagccaaacagttcatcgacttttttttattctctctagcttctagcctccgctcataccgcaatattgaaacgatgagctttgtgccttctctgaaaaagcgatggtgagcgtgaggtttcacatcttaggagtcagattttcagagacaagggaatcaacttggaaaatcttcaaagagctcgagacataaccaaactatggtattcaaggtaccgtttctctctattctatatgggacagaacgtggagtatttgtcatagcttgagaaggatagctgctggtttagatctataggtttggaaaatatgaagcaagattgcaatcagattgtctcaggtttgataatgatgggtttatggctgcaaacttctggttttgctgaacgcactttaagtgttcgatgaaatgccaaatagaaaggctggaggtgatttgcaaattgtcgttggctattggatgggaaatagatagcaattaggatttaagttattgtgggaagataattattcatcatcatgaggcaaattagaggagttaagtgggtaaagaagcccgtatttttgggttaagtggtcataaatacttttgaaagagattgactaaggtctccaagaacaaagatacctttgagtgagcaaagcaattctctccaactataggccttaatagatctcacactcatgtttgttctccttggtgaataaaaccatccatccacatcacaatgatcttgcttcagcaatgcatcctcacaccaaattcatctttatttgaggttcaaacttgtcatgttgctttcacaccacgccaagtttgcgggagagtattagaggccacaaacaaatccaacaattagcctcataagaagcccattatcttatgtcattaggcttgtctagtatcttagattatatatatatatatatatgctactatgagaatcaatgtaagcaactttgagagttggaaacaactctccttcttcaccattttatgaaatcaaatctaaagtattattgttcttggtgacaaacctaaagcttcttcatttctattctttacatttcaataaagctcattgagctattgtattttccaatattagatttctatgtcaattagcttatttgagcataagtttagaaatgtcaacatggtatcaaagccatcgttggcgcaacaaaaaaatttccacaaaaatggttttccactttgtgacccatacaagtggcatgtctcgttgtaatttcgatatgttgggcttgggctgcttcccgttagaccatttcccacccatatctcggaaaggtcaattagaatgtcccacatcgcttggaattaagatctttgggcattatataaaggatgtggcaatccttaactcttgagctagcttttgggttaagttatgccacattcctaatatggtatcaaagcataagttaagaaatgtcaacatggtatcagagccaaacagttcatcagtttttttattctctcgagcttctagccttctctcataccacaatattgaaacgatgagctttgtgtcttctctgataaagcggcggtaaacgtgaggtttaacatctaaggagtcagattttcagagacaatggaatcagcttagaaaatcttcaaagagctcgagacataacctaaccatggtattcaaggtaccgtttctctctattctatttgggacagaacgtggagtatttgtcataggttgagaaggatagctgctggtttagatctataggtgtggaacatatgaagctagattgcaatcaaattgtctcgggtttgataatgatgggtttatggctgcaaacttctaattttgctgaaatgccaaatagaaaggcttaaggttatttgcaaattatcattggctattggatgggaagtagatagcaaataggatttaagttattgtgggaagataattattcgtcgtcatgaggcaaattagaggagttaagtggataaagaagcccagatttttgggtaaagaggtcagaaatacttttgagagaaattgactaaggtctccaagaacaaagatacctctgattgagcaaagcaatactctccaactataggccttaatagatctcacactcatgtttgttctccttggtgaatagaaccatccatccacatcacaatgatcttgcttcaactaggcctgggcataataaccggacctaatacccaaatcgatacccgaaccgaaaaagctgggttggggcgggttagggtaaggggatattacctcattgggtttggttttggttaatccgtgggttcgggttcgggtagggtattacccattacccattccgggtacccatacacccgattcttgtgcttataacctatacacctatacaccactaattaccttttgtgcttataaatcccttgaatatcggcttctcttcttaaattctctttgaaccatattctatcaaactggaaacccttgtcgaaacactctcggcgacctcaccgtcaccgacgttcccgttatacccaccacagacagctcaatcgcgaaatcattctgaggtaagtacgttcatgcaatttcaattctaggtttcgattattgatctcaatctctgattagtttcaaactttcaagtttcaagtttcaattctcgatttctcagttcctagttcggattgttgtttgcttgtttcaattcaattctcgatttctcagttcctagctccgattgttgtttatgtagatgacgtcaaatgaaactctacctccagatgattttgatgatgttgaattaagtggaaatgacgatgatgatgttgttcaacatactcctacttctggaaataagaggaagcgtaaagagaaggaaacaagagatgaaggtgatggaggtaatagttcaaagaaaaagaagacaagtagtcgatcctatgtttgggatcacttcagcagaaagaaaggtaatccaaacaagtgcaattgtcattacggtgggaaagagttgtcttgtccttccaagtctggtacctctactttgaaaaaatatttagaattgtcctgcaaagcactcaaggcatggaaaagtactaatacagaccaaactcaaactgttattggtcgtgatggtggtgatggtagtcttaccatgtacaaggtctctgaattagtcattagagaagcttctattgagatgctgattttaggcgaattaccattatctttcatagagagtgtggcttggagacatttctgttctaaagctaaattgtataagcctgtttctaggagaacaactacaagagaaattgtgatgctttatgtcaagaagaaagtggctatgaagaagattctagggaagagccagcagaggatgtcactgactacagacatttgggtttcaaacaatactggagagagttatatggtaataacagctcattttgttgatgttgattggaagttaaagaagatgataatcagattcaagcatgttactgatcataagggtggaactatttgcaaggttcttctggaatgtttggctgagtgggatataaggagaatcttttgtaccacagtggataatgctacagctaacaacactgcattgactaaattcaagaaaacgatgaagctgattggggatgatgcattggtactgaaaggggaatatatgcacatgcggtgtgctgctcccatcctgaatttagttgtaaaggaaggcttgactgaagtggatgcaagtgtgactagtattcgcaatgggattcagtttgtgaggtcttcaacaaatagactcaaatcatttgatttgcgttgtgatgctggaaagattagtgaggtagcttgcctttagatgtgaagacatgatggaactctacttatctcatgcttgaacaagctgtgaagtttaggattgcttttgagaaaatggaggctgaagataaaccatataatgactattttctggaaaaggtggatggagaaaaaaagattggaccgcctatgtcaagtgattgggatgcagctgagaggttaattcaaatccttgctatattttacaagtcgacattggtgctttcaggttcaacttatgttacttctcataagatgtacaatgagataatcaacatggctagaaacctaactaccttaaacacatacactttttctgatgagcaactaaagaagaaagcaatagcaatgttaggaaagctgaagaaatattgggatccgtttggtgaaggagtagaaatgaataggttggtgatggttgctactgtttttgaccctagaaagaagatgaaatttgttgagcttgctttggaaagatgtatggtttaggtagtgtggaggtttttcttctttctgattcagtgattcaaatcttgaaggatttgtatgatgagtataacaaggcaaatttgttgagaaaaaatggaggcagcgattcaatgtcatcttctcagtcacaaggatcatggtctcagtctcaagagcaagatagaagtggagcttatgagagaacagtcaacaaaactggtattcaattagaagatatggagaacttatttgatgagattgtgaaagaaacaggtattcataaatcatctaatgagttggatttgtatttgaatgaggctgtcgagactccacatcttctaaagggaatagaatatgatgtgttagattggtggaagctcaatagtgggaagtttccagttctatcgctaatagctaaggatatattcgctatgcaagtattgtcggtggcatcagaatctgcatttagcactagtggtagagtgttagatccatttagaagctgcttaacacattacatgatagaagtcttgatgtgcacaaagcaatggttaaagtctgagatcagtatcaatgaaaaaggagtgtcaaccattcatgaattgcttgcagataaagtggaggaagatgagcttatgagaggtaatctattccctttaaagtctctttaaattctggtttaccaattatagcttacaagtttgcttatagtccgtgtttcttaaattgttcatgtgatttagagtttgaacctgaattccacatccatggttttgagtaggccgagttatcgtttcagccttcaggagacaaaaatgcaaaacaaagtcatcacctcatgtcctcatcaactatcgtttagactttaaacttctacttctatgtttttcattttcggattgttgttttgcttttcaagtactcttgtttgagatttgagaacttctatttgtcatatttgtgttcttgtttgtgggttgccaattaggcttggatttggatgctaattttgtttctcctcatttgttacacatgattagaatatcggtttttcgggtttatgggtaacttttacccaataatacctgaaccgaagaaaacccggtttttttggggtatttaccggttcttatattgattacccaaactgatccgaacccgggtgtacccgaaccggaccgaacccaaaaatttcagtttaccctattgggtaataatttcattacccattcaacccaaacccgaacgggttttacccgaacccgaacgggttacccatatgcccaggcctagcttcaacgatgcatcctcacaccaaagccatctttatttgaggttcaaacttgttatgttgcttttacaccacgtcaagtttgcgggagagtattagatgccacaaacaagcccaacgattagcctcattagaagcccattatcgtatgtcattaggattgtctagtatcttagaatcatatatatatatatgctactatgagaatcaatgtaagcaactttgagagttggaaacaactctccttcttcaccattttatgaaatcaaatctaaagtgttatagttcttggtgacaaacctaaatcttctacatttctattctttacatttcaataaagctcattgagctattgtattttccaatattagatttctttgtctataagctcatttgagcatcagtttagaaatgtcaacatggtatcagagccaccgctgtcccaacaagaaaattcccacaaatatggttttcaaccttgtggcccatacaagtggcatgtctcgttgtatttccgagatattggatttgagctgtttcccattggaccgtttcccacccacatctagaaaatatccgctagaaattcccacatcgcttatctttgggtattatgtaaaggatgtggcaatccttaacttttgagctaacttttgggttaagttatgccacattcctaatatggtatcaaagcataagttaagaaatgtcaacatggtatcggagccaaacagttcattggtttttttatttttcactagcttctagcctccgctcataccgtaatattgaaacgaggggctttgtgccttctctgataaagcgacggtgagcgtgaggttcacatctaaggactcagattttcagagacaagggaatcaactttgaagatcttcaaagaatttcagacataaccaaaccatggtattcaaggtactgtttctctctattctatttgggactgaatgttgagtatttgtcataacttgagaaggatagctgctggtttaaatctataggtttggaacatatgaagctagaatgcaatcagattgtctcgggtttgataatgatgggtttatggctgcaaacttctggttttgctgaacgtactcccagtgctcgatgaaatgctaaatagaaaggctggaggttatttgcaaattgtcgttggctattggatgggaagtagaaagcaatttgactttaagttattgtgggaagataattctttgtgcacttggagtgagcaaagcaatactctccaactataggccttaatagatctcacactcatgtttgttctccttggtgaatagaaccatccatccacatcacaatgatcttgcttcaacgatgcatcctctcaccaaagacatctttatttgaggttcaaacttgttatgttgcttttacaccacgtcaagtttgcgggagagtattagatgccacaaacaagcccaacgattagcctcattagaagcccattatcgtatgtcattaggattgtctagtatcttagaatcatatatatatatatatatatatatatatatatatatatatatatatatatatatattgctactatgagaatcaatgtaagcaactttgagagttggaaagaactctccttcttcaccattttatgaaatcaaatctaaagtgttatagttcttggtgaaaacctaatgtttcttcatttctattttaacatttcaataaagctcatcgagctattgtattttctaatatctgatttctatgtcaataagctcatttgagcataaattttgaaatgtcaacattgtatcagagccaccgttggcccaactagagaattcccacaaaaatagttttctaccttgtggcccatacaagtggcatgtcttgttgtattactgagatattgggcttgacctgtttcccgttggacaaattcccacccacatctcgaaaaggtccattagaatgtcccacatcccttgggattaagatctttgggaattaaggatgtgacaatccttaactcttgagctaggttttggattaagttatgccacattcctaatatggtatcaaagcataagtttaggaatgtcaacattgtatcgaagccaaacagttcatcggtttttttttatttctcattagcttctagcctccgctcataccgtaatattgaaacgatgagctttgtgccttctctgataaagcaacggtgagcgtgaaatttcacatctaaggagttagattttcagagacaagggaatcaactttaaagattttcaaagagtttcagacataaccaaaccattgtattcaaggtactgtttctctttattttattcgggacagaacgtggagtatttgtcatagcttaagaaggataactgcttgtttagatctataggtttggaacatatgaagttagaatgcaatcagattgcctcaggttatataatgatgggtttatggctgcaaacttctggttttgctgaatgcactctaagttctcgatgaaatgcaaaatagaaaggctggaggttatttgcaaaccgttgttggttattggatgggaagtagatagcaattaggattgactaaatgggtaaagaggtcctgattttggggtaaagaggtcataaatacttttgagagagattgtctaagctctccaagtacaaagatatctcccagtgagccaagcaatactctccaactataggcccgaatagatctcacactcatgtttgttctccttggtgaatagagccatccatccacatcacaatgatcttgattcaacgatacatcctcacaccaaagtcatctttatttgaggttcaaatttgtcatgttacttttacaccacgccaagtttttgggagagtattagaggccacaaagaagcccaacgattagcctcataaaaagctcattatcttatgtcattagggttgtctagtatcttagattcatatatatatgctactataagaatcaatctaagcaactttgagagttgaaaacaactcttctttttcattattttatgaaatcaaagctaaagtgttattgttcttggtagcaaacctaaagcttcttcatttcttttctttacatttcaataaagctcattgagctattgtattttctaatattagatttctttgtcaataagctcatttgagcataagtttagaaatgtcaacatggtatcagagccacctgatcgttaggccaccctgttagatgttgttcccacatatgtttgagctttagagtgagtgatttatgagcgtgagagggggtgttaatgaagaaagtctcactctggaagtttgagatattatcaagtagtatatacagggttaggaccactccacctattgccaattggttttaggttggaaggccatgttaagcctgaatctatcaaattcctctttcactcagaagttgatctcctctctgtccaacgacgtgaaccgtgggttttcaatcattggctcgtagcgtttcaacgttgtaaggagaattgttgagtccttgggtcaagtgattgaaatagatttctaggatacaatcactaatcatattaggttcatcagagttcgagttaagtttggcatcactaatagtcttaggttcttcagaagactcaggtttcaatatggtgaaagagcaatggtgagttttcaatatgagcggttgagaagaatttgtagccactacctcagattcactcatcatagtagttattgtccttactttcatactccacgaaactgtcttgaagctcctgatatgtctgtcaatggtagaaatgaagatgtggatcagatgaatagaggcagatctgaagtttttacagtcactggtctttgatcgttttcaagaagaagacatctcggatcctttagtgggttttactaactttgagaatggtgaatcctccaaagggaagagttcaagttcctcatactgacaacttcccccaacgaaaagataaatctctttagtagagatgatgatttcactcaacaaaatttttgtcacactttttggtccctacaatctacattgcagtaggaagtttcagtttactagctctttaactttgaaaacagtttgatgggtgatgtgtataacataattggtgatgggaaaacagtttgctgactggtattttggacgaagaccatacgcaagtgcttaagtgtgatttttttgtattactaaggtttaatctccttgtaaaattgatgtaagtattttgataagcttgtggtttctgcaactattgtaacatgaagttaaatgtaattttttttacaacaaaacttatatagaagcccaaatactataccaaagaagaaggtaaacttcaaggacgtgtcttacgataaagatgagtcaatggacatgtgttgttccaacaaccttcgccgcataagagctcaattcaggtgaattgatagtcgacgggataccaatcctaacaacaaagtttgtttgctcaccggtgatgactaaaacgggtgaaaaggacattcaattgaattgaagtgtccatgaccgtttacctagcatattgaagctctcaatacaaaggaatagcaacaaaaagagattaagatcaacataggaaaagaagctataatcattactcaaaggtataatcacaaccatgaaccgtttgagtgacatagccgcagattcaacagatcaaggcatagaaaaaagtgcagcagaagcataaatattaaaaagacaaaaagaaacggcaaaagagccgataacaaacaattgaagagagctgataacgaagccgacaatcgctgttgtgtaaaaagaacgatgccggatgagagctaacgaagcacaactttgggtggatattagatagtagccggatttgacataacccggacgacaaagttgaaatacatcgacgagatcttaacagaaagaaaagagtttctctttctaaaaaatttgagagagataagagagagactctcactttcctataagttgaatgtaataaaatgggaaattagcaaaactaacaaaaaaaaactatatatttaagaaactatatttaagaaagtaacaaaaaaaaaagatgatatcctatatattttgtgaattaatcctaattttgccttgtgtgatttacactctctttctccctctccctctgtctctctctccctccctttgtctctctctccctctctctttccctctctttttcgtgcgtcactgtaactcgagtcttttatctttttcctaccaacttatattactcactagtagttgggtacccatttatttgtgtgaaatcccatttaataaatggatttagttgggctaacctatttaacctcatttaacttttttaaaaaaattagtttaaatggatcaatttctcttagacatactcgttaattaaacatactcattaattatatgaagtttgcatacccatattaacattattactcactacattggacaatgatctcaaaagctctctactctccaaaaatgagtctaaatactctcatataatctgacatactcttatactcttaatgaattttaaaaatccttgtctacccttacccaacgaaccggaaccggacgaaccaaaccaaccaattacggtttagtctccaaaccaataccatttaattcataaaataaaattaacctatcagaaattcccaaatcttcttttcctccctcacaaaatcaaaattgacgactgcagccatcatcgaatcctccgacgtggaatccaatcgaccaagctcgccgtcgttttgcttctgttattcaaagtgacctttaccattttttcttatactttggacatcttaattcatcaagtcttgtgttgttgtgtttgtactttgtagatttcaattagatttgatagatttgaaattggtgttggaaattaatggacattatgttggtaactatatattttgggtctattaagacattttaatgtactgtaatggttgattcgtagttaatcttaggcagattaatgtttttggtccgaaaatctttgctagaacagaataatctaggtataactaagaaacgtggtatagctgtttgaagtactatttatagtataactggtatttctgaaaatgagcgtggtatagctgtttgaattactatttatggtataactggtatttctgaaaatgagtgtggtatacctgtttgaagtactatttatggtataactggtatttctgaaaatgagcgtggtatagctgttcgaagtacaatttgctagaacaggaaaatctaggtatagctaacgtttttttttgttttttccaggagaatgggcataatcatatattttgattatgatggatattattcaaaaaccggagaagcatatcaatggaatccaaaagtagttggtttgtatggtatgttgtttaggacatcatcaatgaaggagattacttattcgtggttagtggataagatatgcacaaagatgaagatagatgaatctacgatgaagctgaaattgagttacattccatcgggtgttagacctcctacatatttatatattagagatgatgatgatgtatatgtttatctaacgatgttggatgaggagaagagtagaagtgtcttgcatgtagaagtcggtaatgagttggaaatggttcacttaaacgagcaacaatcgagagtacaaggaaagagttcagttggtgtgaattatgtagaggagaatttcggtggtatagataatgttgatagagctaatgttggtgctataattctttacgcaaatgagcaactaggagaacaacttcctgagcctttggagacattggagcctttagagcctttagagcctcttagagatgtagataatggtgttgatagtaatgtggatatgagtaaggagaatgatggtattcgtgaatatgttgaggaaccacgtggcaaccaacattctaagtttaaaggtccatgggatgatggtcttgatctagtagtaggtcaagaatttgaaaataacgatgatgtgaaatatttagtagagacaggagcaaataggaattgttttggactatctatactcaactcggatacgaagcggtatgtggtaagttgtgcagaagaagggtgtatggtacatacgattttcaaaagcaaggattcaactcgcttctcggttcgaacatataggaagttgcatacatgtttacggtcgaatactgctacaggcattaaaaggagaggtacaccacgtttagttgcaaccgtattgcatgaagattattcaggtcagtacaagaccccaactcctaaaagtctaattagccttgttcagggaaaacatggtacaactgtgtcatactcaactgctaataggggaaaaaactaactgttagtgatattcgtgctagtcccgaggagagtttcaagatggtttatcaatatttgtatttagaaaaggtgaatcctgacacaaagagtagtgtggtattagatgaagcaaaaaggttcaagtacctatttgtcgctttgggggctaccattgaaggatttaaagtcatgagaaaagtgattgttgtggatgcaacatttttgaagactgtacataaaagtgtgctcatttttgccacagctcaagacctgaatcatcaccattatcccttagcgtttgttgtagctgatggcgaaaaagatgttacttggaagtggtttttcgaaactctcaaaaccgttataccagacagttcgggattggtctttatgtttgatagaaatacaagcctgatcaaggcagtggctgaggtgtatccaagctctcaccatggaaactgtgtttatcatttgtcacagaatgtgagaacgaaagtttcatacaacaaagaagaggttgctaaaaagttcagacaaattgcagccatttgttcagtgtctaagtttgaacatgaatatgcagattttagaagaagacaccctaaggtagccacatatcttgatgaaaacactgatttggaaaaatgggcaagatgtctttttcctggagttaagtacaacactagggatgtgagggggtatgcgctattatcaatgatagatgcaattattgggaaatttgcagaatggagctgcaataataggaaggaagccttaagtggatcaaatgcacagagacttgttccttttgtggagaacgagatacatgatacatgtgaagttgcacaaaaattactggtgatagagcttaacacctacgagctttaatatagtgtcattggtcgcgatggtaagacctatgtggtggacttgaggaataaaagttgttattgtcgttgttttgatttggacaagtatccttgtgtacatgcaatagcggctgtgatgactcacttgaaacaaaaagatagatccgaggaggtaaaaagtttatatgatttgatcaagaaatattactttgttgagatgtggcttatggcatatgttagtaccatttatcctgtgccgcataagtcagagtgggttattccaaatgaaatccaagaattgtttgcatatcctcaggttcatgttgttaaaaagggaagagttcaagaaactagacacccatcagttggagaacgttgcccaaagaataagcgtgtgaaaggtagaaacttggagagctggttttttccaaaccacgaaagtgatagccaggggagtggccaatacacaagcggaaattaatgtactcgtgttttttagtattttcaaattttgtaaaactcggttaaactttattctctaatggtagaactatgtatggctctgattttgtgttttaaagtactttcagattttgtaaaactcggttaaacttaatttttaaatggtagaactatgtatgtctctgaattcgtgttttttgtactctctggttttgtaaaacttgattaaacttggttttgtaaaggtacaactatgaaaaatgtaacaaatctgcttaagttgcaacaaaatttgatgtaatgttatttcttatacaaattataccacttatgtaaactactgattgataaaatcataatttaatgaaactttaaaaaattagtctttaccaaattcatttgttatagaagaaacaccttacacttacaagatgactttataattataatcatcataacattgcaaaacacacaaaattgaatttttcagacatatttttctatgaaaatatgtagaatgtttataaaacatcaaaactctttggtataactaaatttatttagtttaaatttaactatatctaataaaattcaaaaaaaaaacaaaagtcaaattatgtatatacatgtacaacctgttaacttgaaatatttgtatgcaaatttatttgcggaccccaccttttttgttccgaacaactcttatgcgggtcctacggttaattcattttcacactagaattccttttcacactataatttcacctttccccctaaaatttcatttcccccaataaaataaatttttaaaaatcctatattcctatattattaattaaaataagaaaaatttaacaattaagagaatttcaagatcaaatccaaatccgtaccgtcgttattaccggtgtggttttgctgcagatatatcgtttatacatggatcgtttagcatagatatacctaatttgactagtgtctaaaatacctgatttatattcgatgatagctatacctagtttatacattgatatacatgtgatttaacaatttcaaaatgtagcttatgaacgacaatcatgtgtttaagtgggtagatgaggcttttacacatgagattgaacagttggaatttcaactcggtgttctcgaagaagaagtaagagtgatgaagatggaaaggaaccaagagaggatggaaagagatctgatggaaaagaacaaaagggggaaggactttaagatggtaatcgtttttagttgtggctgtttaatcaccatggcaattgttggcatgttctgtttgtcgtagaaaaaaactaagtgttgtaatgtttaattatgaagactaagtgttgtaatatttaattatgaagactaagtattgaatttgatgtgatgaatggatatgaatttaattatgaagactaagtgtcgtgttgaatctagttaattcggttcatattcttttcttatcaattacaaaaacatataattgtacctagtgttacaaaacataagtagatataccaaaataaaacaatagaaacagttataccaagttttgaaattaacataagtagatatacaaaaaaaactaataaacatgttcaacagttgtaccaagttttcaaaagcataaggagaaatacaaaaaaaaacaagtaccaagttcgaacagatgtaccaagttttcaacaaccaacatagttatacctaaaacaaaccaagagttaaaaatgcttaaacattcttcttcgtctttttcctcgcatacctcgtctgtataggactccgatacaccggcttagcatccgtcctcgactttgccaccttctttaccacctttggctttttaacgcacccttcactaggatcatctccatcatcgtgtgactttcctcgcttcttacttggctcagtcaccttacctccatccatctcatcatcttgaggcacctctttgtccttctcactatcagccacctctatgtccttctcactttcaggcaccccaatctcactttcagccacctctttgtccttctcactttcagtcacctctttgtccttctcactttcagccaccccaattgtactttcagccacctctttattcaactccatgtctttgttaccatcaaatatatcactgtcaccttgacccacctctttgtctatctcagtctctttttctccaacctctctctcattatcaccttgagccacctctttgtctatctcagtctctttttctctaacctctctctcattatcaccaccatttgcatcactcccttcttccagctcgttttctctatcatcaatctcctttgaaccataagcatcatcagttccagtgcttgattgaattgatttgattgcagtttccatcagtttgagtcttttatcttgctcttcatacttcttactgaaatttgtcatcctcttgttcatggacttaaatccattctccatcaaattcttcatttcgtttacaacctcagtcaaaccttcatcacttggactagtcagagctgcagcagtctttcccttgccttttttttccactgcggcttttcttggagcttgtaccacagtagacggagcattattagccacaaagctttggtgtgctacatcttcattgaacaacggttcaaaacatatagtcctctcctcatcaactagacgtttcttccagccatcagctattagatcatcgacatcattcactccacactccttatccataattcttttcaaaagtaggttctcatcaggagttggagccaagatactctgaatgtcatgtgcatgataagaaagtccaattaatagaacatacatgatagaacatacatgatacatgatagataactaataaatatgttatcactaaccttagttgtaccgagtttgtcatacacatctgacattggaaaccctttcatagtgcttgatttaaacttcattttacacatccggggacactgaggatctgcggattcaatatcttcgcagaaatttttcctgagaactggaatcgcctcgaatgctaaatactacaaaaaaaaatacaagattattcaaaactaagttgtataactgctaataaaaacaaagttgtacacagtttactttcttaaaacaattaatagatgcataatgaaatgacaaacctacaaaggcataacaaaactaggaaacaacttttgtggaccaactactccattgcactttttcatcaaatagaaaatgtctctcacattttcttcaaatgcattttttccccacggaaatgttttgcacaactctagatcagccacaaccctaaggaagaacttctccaaatttggtgcatgttttcctgtcttaccctttccaacgattacataagaagtatagcacaactactctcagacgagcttcagaaggttttttcatagacaataactttttctccacatcaggatactgaattgttgctccgggtccaaacatctagccaacaaaagtggtacacccaagctgtccaagggtttgggataattgtggcagtataatcctaacatgagtgcaaatttttcgagagaataccggatcggtacgccattgacaataaaccatacttcctttcttatctaaacatgttgtacgaataaataacagccacatacccatcaccttatgatttggatccttatgcatgtggaagaagtgtttgaattgtgggtgctccaaaaaccacttcaactcagactcttcaagatgactctccaataatccgactgccttatgaagataacactttgctgtaatcttgaatggctttgtataatcactcggaccgaaatacattttaagaggttgaagagcttcggtttcctcatcagaatcctgcaatcaagatagagatataccttagaaagcaacatagataaattagaaatcaagatagatatatctagtttatacatagatataccttttagttttgaaaatttctaagttagaatcaaatatagatatacctagtttcaatatagatatacattttagtttcatataatttaaaggtagaaatcagcatagatatacctaatttaaaaatagatataccttttagtctctaaaatatctaagttatattcgaacatagatatacctagtttaaatatagatatactttttagtttcatataatttaaaagtagaaatcagcataaatatacctaatttatacatagatagattgtttagtctctaaaatatttaagttatattcgaacatagatatccctagtttttagtttcaaaaatttctaagttagattcaaaatagatatactaatttatgcattgatatactaatttatacatagatctactttttaaaatttctaagttataatctcaacaaagatatacctaattcatacatagttatacttttttagtttcagaattttgaaagttacaaaatcggcaaagttctactataatctgctaattgtgtaaagtttaaagttcataccgctctatcgtcgttagagattagatttgttgcttcagaatccacttcagcagccgacgctactactacttcgtcattgattgtctgtgaaactacctccgccgccaacggcacacctgcgttctttgttcgagccatttctccaaacctacaaacaaaatcatttggattagtactactcttcaatcaatttcgatcacaaaacccaatctgaaataactcggatccgattttaacttacccaatttcttagttttctacagatataccaagatcgacgaacagatctgtcgttgtcgttgacgagaattgagaattgttttactggatttagatttacagtgaagaaataagaaaaaaaaacagaaaagaaagagaagaaagagatcgtgaatcgattttaccgcagagaatttggaaaacctagtgttttactagggttttattggatatgacccaaatacaatgagcttggataattttggaatccatttatattggttgggtcgtaaataatcaatatttttaaggttttctatgtcatttacttcttttacggataaaagaaaatcatttttttttctttttttataatataagtatataagattactctccactaaaaaggagccctgaaaatttctttccactacattatccacattataaaaccacatatttaataattttttgaaaactgttatttttgcaattcaccctaataaaaataactttctgtgaaaaaaaaaaaaaacttgttaaaaaaaaaaaagtctgactaaacgtttgcttcttcttcttcacacaaaactgtagggaagaaaaggaataatggagtttggattagccacttcgagttttctgggtactcaactaatcccggccactctgtttagcaaacgagctcgagctttgtctctcaccgtcacagcgaccggtggcagcagaaacaataaggtttacacgaggcttgattcttgtctagtgattcctcctcctcctaaattcaagaaaccgcgtgctattgttaaattcttgggaggtgccttcgtcggagctgttcctgaactcacttacaggtactttgattctccgagttcatcaaatttcacataacctaaaagatgttgttcctttgtctctgtgtgatttgtagttaccttaaggagctactggcaaaggaagggtatttgatagtatctgtgccgtacaatgttacatttgatcatgaacaagctgctaagcaagtttatgagaggtttaattcatgcttggacacgattgtctcatctggaattccaaattcaaacttgaagcctggagatttagctgaccttcctcttttctcagttggtcacaggtgttcaacttttctctccttccttaaaccttatgaattctctgtgtcctgaattctgactagtgtcaagttttcaactttctatacagtaatggtgcactgctccaagttttgaccggaagttattttgctgagaagataccaaaggttaggttgattctaatcttctctttgtcttaattctaagcaagtgtgacaaaaatgtaatctctctcttgtgaaaggttaatgccattatttcattcaataacaaatcagcgacagaggcggttccatattttgagcaggtaaatattatcattagtctcttaagctttgcttggtttagagtgtattagtgataagttcttgtcattgttctcttatattgtcctatttaaaaccttcactatatgactccaatagagatcacagggtatgtacttgatgttagcaacctgtagcttatattatcagagtctaggctacaaaaaagtagctcaacgttcttacttgcgatcttagggctggtactattatcttcacaagattgattgatgagattatgatcgcttgtatcttagattgcctatgtttctctgcagcttggtcctctcatccagcagatgctgccaatggtggaagcttctccagtatatgaaatggctcgaaatgcttcaggtgatactacttacgctacaaagtcttattcaaatagtctgtcaaacaatgtagattattagttgagacttttataattcttgagaatcaaaagtagctaattatctttgcaattgtgctcacttacaggtgatgttttgaaactcttacttgacacagctgggacaacgattctaaacaacgatcaagaagctcttaagtcatttactaaattggtggatcaattgccatcagtatttggtgaggtatttcttcagtaagggacttcttgacttcgtatcgaagattgagctttttttatgtaagtcccttgtaattggcctagccttaaaaacaattgaacttttcgttctttgtttcgttgttctatgcaggtaggacaaggagtgtcagaattcagaccgtcaccacttgagaatcgcaattgcttcaagtgctcctacagcgttccacacactctactggtaatgcacacattacaagttcatttatagttatatgaacttgacggttcaaagagtgaacaactgctaagcaaactgttatacatgtctgagatgatttcttggacatagagactgtttgtgtactcattactaatccatattggttgatctaagaagcatagaagtgaacagtatctgtctgattagaaccagcaaataatacaaatatttgatctttgtctgctgcaacatttgtctcaggtacaattcaactccgatgcaatcgacgagactgatttgctcgaagaaactcttaggcctcggatagaatctattggtggtacacttgaaaaggttcggctgaacggaaaccatcttacaccttgcatacaggtaataaccaagcaacactagagactctagtagttctgcagttaacaactttgctctatcatttctacatcctgttaattgaacttgattatgtatcttaaaggatccaaagtggcaaattgggactgtgtacacgccagcagacgctgtggctcaggcgctaaagaccattcctcttagcgaaactcgagttctttccaggacgatcgttgactggtttagacggtttgagaattgagctgtctcatgtaatgttgaaatcaatgttaagatttatatataccgacgaacaagactagcattgatcagcttcaaggccaaaaaacatgtatatacatgggcgacgtcttacaaagatttccattgttaatcacctttaacacagaatatcaaatattggtcattggtttatggtttgaaatcaaagtgtagggaactgggatattgataactaaatttgggttttaccgaaatagcttccaaagtacaaaagaaaaatgtaatttaaatcagaaatattttctcagatgttatagaaaagttgaaatattattagaatatcatacatttttaaaaaattatttcttatgtttttttgcctttgtgtaattacaattaacatagttgcttagtattttttaattattatttttattcatttttaattaagaaatgattaatgaaaattatgataattcacgttattaagagaaaagaaaataaagtcaagtcattaacgtcattaagaagaacctttcggttttcctccatgttattatttttgcggcaaatttacatgttacgactgagttataatgcttcacggctgacgaaagattgcgtaaatctacatattacggctgaattataatgcttcacggctgaattataatgtttcacggctgagttataatgcttcacagaagacgaaaggttgcatatatctatatattacggctcagttgtcatgaatagacatgtttgtgtttctttatccaattaccggaaccaactctacactctatatcgtttgtgttaaatacatatttgtatttctttacccaattatcggaaacaacaattcctggaaccggatcaatcatatcggcagaaggatgaaagaaaactaccaaacaaacatgtaaacgaacatgtaaatcaccctaaataaatcagccatcaaagaaaactataagtcagtcgcaacatgaatactattacagtaattaaaaaacaaaaaacggcaagttaattcagctgtttaatgtcataactcaaccgacaatcttgaactcaaccgtatcgtttaataagtcggccgtaattgcatgctattctagtaaataatctttcgctactaagttagctgtaactaggccgagtcttccgttaatccagctcattacagctgatttatgacactcgaacgtaaatcaggcgtaacgacatcccataactaagccgtctttaataactcagccaaaattttgacaaatcaaccatcgggtaaaaactcagccgtaatttaggctgagttatgctcgaaatctcataacttagacaaattttactaagtcaaccgtaacttaggcagggttatgctcgaaattcccataactcagacaaatttcattaagtcaaccataacttcaagctgagttatgctcataactcagccatttttccttaaatcagctgtaacataccgtaactcagctgtcattgccgctatatcgctttacggctgagttcattaaaacacgtggcaacgcgcttttgctgacgtggcaatgtagttcctcgtaattatgttttttcctgtaacgtttagtagggacacgatgggtatacaaaatatacctaaaatatgatagtaataaaaaagatctgtggttctggtaaatacacctaatttctataacatttgagtaaatctccctttaaatcatcagtttatcatttttttctttaaagcatgaactctgaacctagtgattaaaatcctcaattctatgttcaagaattctcgttgactaagccaattgagtcacaaattctttatttttgactccatcagttgatctagagacaagagattacttcgaattcaaagaagatgaaagaatccaaataagaagagagaaagaatcagaaatcgattttgggagtctagggtttgtgatttggagaatttctaacaatgtgccttaattggtttagtcaacgaaaattcgcgattaaatattgaaacaacccgacccgattttttaaacataattaaataatcctataaataattaattaaaccaaccaatgaagcaacatttaaacagcaagtcaaaaatattatttatgaataaataaataattcaaccaacaaaaccaagaatgactaacaatcctaacacaaccctaaccggattccaataaccaaaacacaaaaataaaccaaacaagttcctagatcatcctctcttccttgtcatgattccacgatcacactttatctttacttgcaccaaaaagaaagagatgcgtaagtattaacacaaatacttaatgaggcgatcctcccatctacgagctatacacacaagcaaataaaagggatataatcacaaatacaaaccagtcattgaacaattcacccaaaacaaatcatacaactcaatcgctcagataagctcatggtcacgcattcaccttaacaaattgatcctaacaacaattaaacccacgagagactctctatgcgtctgaaacagtccagaaacgtcctacaacaagtcacacaaccaaaagcaaccttgaagcaaactggacatgaaaatcagaaacaaacagtctcaaaaaagaaaccctaaaatacaaaccaatcgttcactatcgaatccctccggtgaaacgctagccttagaagtcacgaagcttcccacaaaatctcgtgccgatcggaaaccagatgagaccaagacctcagttacaatctccgctggtcctaattcgcgtatgagaaaacgtgtctcacgaaactgcgaataactcaataatccaaatccatttctgaaaaatggagaatgacgataaaagacttgggaataactctaccaaattttgttacctttgacaacgatttgataagccgaaactgtttcctcccaaaccctaacgattatggtccttctctttctctctctttttctccttttaaaacgaaaagtggctaattaaagccctaatttcgagtttccttcttttctaggcacactctagggtttccattaacccaactgattaaaccggacgatttaaaaataaaccttaaccgattttccggttcacgggcgttacaaatataattgaaagtcaacataaaattgaagatttaaaatcacaattgaaagctcaagagttcatgctttaaaccatcgaaaatagaaactgatgatttaaataacatttttcctaaaagaacaatataaaatatagatcaattgtggacgatactatatttataatgcaaatctgactttttatcggcgcaatcgtggacgaatgtgcatgtgcataccggcgcaatcgtgcataccggcgcaatcgtgaggggaccgaattcatccgaccagtattgcgacaaaagaacagaataatctcatgcagagcctacaagttatatcaatgccgcctttattggactcgtcgctgctctgatcagttcttcccaacaaacctacgtttagatttttttttatatcatatcattgtatcatataaaatttaataaatattttcacgttagactttagtatttcacttctttctatttagtaaagtatatattagaccgtaaatatctaagaaactatagtagctagctaaattaacaaatatagcgaatttaattattacttttgtattttgtacattatcacttaaaagaggcggaggattcatggtggtcgacggtcggctagggtttcctggtggtctaggaagacacaaaaatattacaaacaaataggaaaaaaaacatcaaaacgcaaaagttggggattcaaacccagggcatgggataacatacccaagcgttgccaccagaccatgacgatatgattgtaaaaatgatacatagattccatataactatattaagacgcaaggttgaaatttaacaccgttaactgcttttgtaacgtccgtcaacggatgttaagtaacgtgtcgtaatctacaaataatttaaagatgaggtgttttttaccaactataaataattaaggtatttttgttccaaaaaacatattagaggtattaaacggtcaaatttaaaatagatgaaggttttttcggggttttcccttatttcaaaagaaaaaatgataatattttaaaatataaattcttttgtcaatatactatataataaattataatttttgaatgatattataattgcggtgactgcgttttgcgatgcgggagaagtgcggtgcggttcaaatagtaacgaaaatacatagatacacatgtatatatagacattttgatattgttacagcactgttgcggtgcggttttgggtgcggtctatgtcaccattcaccatacatatgtatattttaatatactctatcaattcactatgtatactaaattatctcaacatatttcatgtatttactatatttagtatgaactttattatatgatatgctattagaaatgttatttttcaactttctttctacaaaacaataaaatgaaatgaaatgaaattattgctgtgaaaattagttttcagtattcgacaacttttccgtaaagattaccatttgaaagaatataatttgacaatataggtttagtataagatgtaaaatagaataacacaatatgtatttaaagtagaaactctataattaataatgttgggatcatgaaatttattaatttatagtgatattaatttatcgtataaaataatatttattaatacataggataaattaagattttttaatttatcgaaatatttacgcaaaatataatactatattctttgtaaaatattttttaatttaaattttcttatactaaatcattttcagtcatttctcttttccactaaaattcctatatcacaatttacgtatctcacaaatgtatcttactgattatttctataattttaaatagtaaagtgactattttacaaattaaaatagtttaagaagtgtggttcaagaattcttatcctaaaaaaaggcaaatagactttcttttttctaaaaacataatttacaaaacaaatgtgtgattggtaacattttgcggttttccaaaaacactcttaaaatacgcaattgtaaaagtctccaatcaaggcctaagtttcaaaagcatatgaaatcttcgactcatcgattttcaaatcggtaagaaagagtcacccgtctctatattgttcagcctctaggttgttgtaggtgttagaattgattttagcgagagctgtcccatctgatacaacaaacgtaacacaaatttcttcgtaatagccatgagattggagatgactgaaaagattgggattagtagactaacgtcaaaaccatgaggaagaatgggagcattctcataattgctaatcacttagattcttcgacaatctttcttcaatttatttattttaatctctaaaacaaaacaaaaaaatacaaatcaaaaatcaatttatgggttattttgattattttctaaagaaaataccacatatattctccatttcgctagattcagatcattttctctttgtgaggatgaatttttcggaggattcgaagcatttaatttagatcattttctctttcttgggccggaggattttttgcagatcaaccgagaccagaaaagatttgacaaaataaaataaaataaggtttagattttctcacaacaaaaaaaaaataaataaataaaagtctttatatattgggccggcacaagcccaaaaacccagaaaaaatattatgtagagatgagtaaatattcgattctcttacaaatgataattaagaataagttctctccaatatgctaacaattaaaataatagaaaaaggagagaaggagaactaaacataagagaatcagcacttcaatctctctttagaggggcggtgagagtcatttgagagctcaccgttaagggtgctctatccacattagacattttaattgggtgttttctcctataataaaatagagaaaattttgaaaaacaatctcaactattttttattagaacgtttaatatccaatagttttcggttggaagaaaaatacatatactaattacactatgcaatttaatacccaaaacataaattttgttattttcataatcacaatctcacaacaaaaataaaatttgaattttacccttaccatctcaattaattattaatttttaaatgatgtggcattaattttataattttactgaaaaattaattttattaactttttttacattgtctcaaaattttaaaatttcgttttttattataaattttttattttaaactcaacataaaaaattaggaaaaagttaaaatatttctttttacaatcttattccatcattgcaatatcaaaaaagacgttttttcttgggatttattcttcgattctagattttctcgaataatcactacgagaatcgccgataaaaaatcttcatcgccctcttttgccaacatcaaattcgataatcgttcacgatctccttttaatactatccaaaatttcaattgccattaaaatcaatttgatttcattcgtcgtaatcgatatgatatcaacaagcattgatatgaactttttcttcgtcgtgagaaactctctattcgaatttatttttgacaaaatctcaatccatacctcattatctttctcaagatttatcaattcataaaaatagttttttttttcttttttttacctttttaaaagatattttctaattttgttttttcttgattttttttgggataatatagaaacgaaatattgataaaaattaaagtttaaactaaataaaattaatgaggacaaaaaaaaaaaagttatataaaattaatgctacatcacccaaaaattaatagttaattaagctagtaagggtaaaatgagatttttatttttgtggttagatcgtaagtatgaaaataattacatttaattgtttgagtattaaattgaacaattttattataaagacggagacgatcccaactcagcgacaaagtgatgatttccttttcgaaaggagagggaactctaggcgacgaaggttgaggaatgaccagaaatcaagggaatcgatgcgacggaagttgaggaatgaccggaaataggttttttggtgaccggaaaagagatttgtggtgtcgagggagagtttgattttcagagaaaaatgatttgcttttgtttaagtgtgatgagagtggcggaaaaactaaagtttttttttgccgtctaaagtgaatgatattaataaaacttagtctcacaatggaatacagaacatgaaaaaaaaatagagcataacagcccaaaacaaagcactaaactccaaaacaaaacagctatgtgaatcaatcatgactaaacacaattatcttcgtttttcttcttcaatccgagtaaagagccatgttggtcctcctctagctaaataagaatgcatccgtcgatctcttgtaacgcttgaagttatctaacgagcaatttgatttgcttttggcgctgagaacatgaaggatatgtccatgaagtccgaaatgagaccatgaattctatggaggtaagaaccatagcgcgaccaatttagaggatcctcgatagctctgatggcagcaccacaatctgaccaaatctcaatgttatccaaatgcaaatctgctaaactgtgtagcgtccaaatgatcacttgtaactctgcagcaatgcgattcaagacaggcataaacacatctctcgcatgatattcaacatcgccatgatgattcttgactatccaagcaccaccacatatattcaagttatttacccacgaagaatgcacattacacttgagaatagttaaagggggtttaaaccaaaactttccaaaccgaccctaagctattccacaattgagaacctgtgatggtgcctccctcaatttcttccacaccattgcttcttcaaaagcatgagctaccaaggcattcaaatcaccttgttgagcagcgtaaaggattttgttcatatctttccagattccccataatatccaaggaataccccttcgcacattaatgtgtataccatcatcactcattactttcaaaactaaagtgaaattgacagaaatagaatctgagaatccttgaacaggtattggtagattagcaatcctccatacatcacggactagccaagaatgaaacaaaacatggctgatcgactccctagcattctgacactggctgcaaataatatccttatttataccatgggcatgtaaacattctgacactgccaaagcaccgaataaagctcgccataagaacattttaatttttggaagagttttaattttccaaatcttctctttaagaaatttgtactcttgttcctatggagaaagcgttacgggtacatgtttctgttgcgctactaaccaactcccactctttactgtataacacccgtcctgattataacccatatgtgactatcttccatggcaatgttaggtggaaacgatagtattctaacaacatccggcgggacaaacagctccgctaacaaagattgattcgaagagccttgaggggtaataagttgaaaccgtaagatctaaatctataagagtctttttgttaaaatgttgtcgcggtattttgtcaaagatccacttatccatccaaacgttcgtcgaccttccatctccaatgttctttaacagcccttgatcaagtaaatctcgaccatgcatgatactccgtcatgcataagaaggcctagagccaatgagagcctccataaagcccttcttcctatagtaacgtgtcttatacactctagccaataaagatgtgggtttagtaaggactcgccatgcttgttttgctaacaacgcttggttaaaacccccgatatcgcgaaaacctaagccaccatcttttcttgctctacacatcttttccaaagaaacccaatgcactttcttatgttcttcctgagaattccaccaaaaactcgtcattgcactagttatctgctgacattggtactttgttagcctaaaacatgacatcgcatacaccggtagcgccatagcaacagatttaagcagaacctccttactacctaatgacagagtcttggcataccaacttgtagtgatgtatgctagcaacacacttttagaaccactaaagcactcgggaaatcctaagtacattccttctcctccttctttagtgatacccaaatatagacctagcacatgcttcataatcggatgaatcttatttccatagataatcgacgatttttgcagattaatttcctgccctggacatcccaatagagcttcaagcattttaaaatttttgtaccttccctgaaagtagctcggctcataaacaggctatcatctgctaaaagcaaatgctgaatcgaaggacatcttcttgtgaggcacaaatcggaaatacgaccttcagattcaacatttctcatgatgtgaacaagagcctccgcaaataggagaaaaaggaatggcgaaagggggtcaccttagcgtagaccccgttctggtttaataaaaccataagaattcccattcagcagcaccgagtatgtaaccaatgtcacacatataattatccaagcaacccatttcctatgaaatccaagacgtgtgaacatcacttccaaaaaattccactccacacggtcatatgctttggatatatcagttttgatcgccataaaatcttcattacacgcaggattagtatttaacgcatgtatcatttcatgtgccaaaagcatattatctgatattaatcttcccgccacaaaggcaccttgcgtatctcacacaatctccggaagtatagcctttagcctgaaacacagaatctttgaaattatcttataagatacggaacataagcttcttggtcgaagggaaagaaccagactcaaaaaaatccttcatctcttcacaaacttgctgccccacaactgaccaatacgactaaaaaaataggtccgtcatgccatcagcgcctgatgtactgtttcttcattcgtgacccgttttgttgaggttgcattcagctcagcagcatgcccgtctctgacccagggcagcatggtcaaatgcctaaggtccaaaataaaaaaggtccaaatttttttttttgttgtaagatttgggaaaaaaaaattagaacaaataggctcattataaaaaaacgtttaagaacaaaaggcccaaaaaaagttaacctacttaattagtaagagaggaaatcaaaacgtcgttggtttttgtgactcactctcagattatgatcaaaatctgaaaccctctcaagtctcacctcacgattcacaaaacaactaatcatcttttcttattcatcaatttatctatttcaagcaaactgcagttttgattttatattttaggtaaacttttcttgattctagtaatcttcttttacttaccaatctactgaacacaatggaaaaaattctcatagccatatctaatattatttttcatttttggatttttatagtggttggatcttggacgcagaacgtcacacagtcgatttttttaaaacgtgcatttctcaattcacaggtgatattgttcttttttatatttaatcatggtgttgtgtgggaatgacaaaaaaaaagagaaaaaaactgaaaaacaatttatagaatctcaaggaggatctatggaaaagtttgttaaaaaaagatctgcagctagtgtgaattctagtgaggctggtcctagtgtagcacctagtttaaatcctcatgatcattcaaatgaaaatttagataataatgtgaatgagtctcatgagaacatgtcaaatccatctaatatggaaaatgtgaatgttgatgatgaacttcctccttttgatcctccttcacctcttcacgaacttgctgacccacaactgaccaatacgactgaaaaaataagcccgtcatgccatcagcgcctggtgcactgctactctttatactgaaggcggcttgtcttatttcttcattcgtgacccgttttgttaaagttgcattcatctcagcaataaccgtgtagttcatcccagctagaaggtctgcagcatcattaggctgggaagaagtaaaaagcttctgaaaataaaccactgctatattacctttggacccatcatcaaattgttcgacgtcattctcatcaaacaaggagaagactttattctgagcccgtctgcctttaacacagccatgaaaatatttagtatttcgttcaccatcatcaagccatttctccgagctcttttgtttccaatatacttcctcttcgcgatatgcatcagctaattctcttttccacttaattagaaggaaaaatctgggaaattgtttactcccttcctccactagctgttcacgtaacttcttaatcttggttttagcattcaattgagaagaagaacgtttccagcgagacaaggatcgacgacatgatgcaagtatatcaaaaagacttgtaggaccatttaaagtattacaagtccaaccttgttttacaatctctttgatttctaatttggatacccatcttcgatcaaacatgaaccgccctctaaattattgtttttcattaacaaaccgagttaacactggacgatgatcagatcctactcgctccaaatattcagaactcactcgtgggaataaacggaaccaatcagcattaccaagagctctatcaagccgaatctgaatccacataccattgcgtttacccgcccatgagaatttattcccagaaaatggaatttcctgcagcctacaatcatgtaccatggtacgaaaaggcaagaaagatgattcttcttgcgctggacctccaagtttctcggagttctcccatatctcgttcagatcccccataacaaaccaaggttcatttcttgtaagtcctatgttggttaagttatcccagacttcttgtcttaagttccaagcaccatctccatagacaaatgacgcataaattccaaggaccaaaacttgatcttcgtgtcgatgattctcttatctgagtgtaacacttctatgtcgtatgacgatttccaaaataaagctagtccaccactcaaaccttcaggatcaacgaggtgggcattatcataacccatccacttcttaacttccaaaactcgattactggagttcttggtctccaggaggaacataatatccgggaaatgatcacgcctcatttcctatagaattggaattgccagtaagctcctcaatccctgacaattctagctcattatactcataactaattgggcggttcctcacgcggaaccacctctaattcagaccgcttagcaatctttggtgatgatactccttcctcaacttctttccttttcaaggacaaaccttcttcccctacttgtttaatttttctctgtaaacctgtgcactttccgaccttcttgagctatcttagcagcttgtgccttccttttatgctaactaggacgacgtcaatatttctttatcacctctcttgccccggatagactagcgacaccgccatatttaaaacccatagagcaagaggcatgatcaatagaatttcaaccggagcactctgagcaaccaccaactgatctgataatgacatcgtgttctcacctttgtttcttgaaacaatatctaacgttcccgaagtagtcatatcagtttctttattaccaaagtcaaaaaccaaccctttacctttattcacttcagttgtgactattgtagcaggctccaaccttaggagagtcttcctacctttaggatccccttctagatcccaaagtaacttacaaaccctatcaatgcggacttatttttcagtagcatctaccactgacaaatagcttctcatctcatcaagcacctctttagatatcttaggtcttcatgtgacaacatcaatgcccacatcgtcgtttgttaaaacaccatagagtggatcatctgggctgatttatgaagttacacttcctgttccaatcgtagccacattcatcctccccatagcattggcatgccggttctaagtattcaaagggcatctcgatctatcatgagtcagcctctagcattggaaacaacgttttctcacacgttcatactccacaccaatagttaccatttctccagtaggcaattccacttctttgaattccacagtgacttattgatatcaaacaaaattttcacccatacaaagcctttgctctgaggctttaatggatcaaaagccaccgttctcacttgcccaatactttccgcaatctcttcaaaggtatccacagtatagaagttgaccggaatgtgacgtagacgaatccaaagggataagattttcaagtaatcttctggtgactctccacccatctctcaaggactccaatcctcgtacttccaagctccaccctgaaggatagcctccagatcatgttcgttatcaaaaatatattgaaaattttcctcagataacgatataccctgagctctgttattaatgtgccaaagtcgtggcatatcatgaatgaaacgcgacatcttctggttttccggacagagtaaccttcccatgaggctacaagcgtttctctcacatgagctaaacttcggtaagttcttcagttttagaggtttgttctctttaatcgacatctcttgcaaagctttgtccaaagcaaacaccatctcttgagccaaaagcgagagcaaacaattttgccaaaacaattcaagggatctcaaagcaattgtgcggcggcgtttcttggaattttttagatctaggttaaaaaccaataaaattggaaactcacgaccgactatgatccagaaaaggaaacatagcaaaacaaatcaggtggaataaggaaattccccagtgaccaccacctctctcatcgagctttgaaagcctctaattgaagaagaggaacctaagcccaaacaagggaaatcctccaaaaaaaaaaatcgaactttgaaagcctctaaagttttggctaagtgttttgcctgtaaagtgattttttctgctatagtaatgatttttgggttgccgcctaatgaaatcatttcccagcactaaattaatgctacaatgtagttgccatccgattttatcacttttagtagcagttagtgaattagtgctacaatcatctgctactaatggccaaattttttgtagtgtaatgtttagcttacttgattaagttcttttgaatctttatgatcatcactctcatttccatttttattttcatcttttattattttataattcttctaaacatattttttattctatttacatttttttcttaccaaattttggatgatattttcttaactgagtttttaataattaaaaaggccacaattataaatttagccataggcctctcaaggatcataagcacggcattgcctagagaatctagctcgacatttgcatatggttgttgataatgtcatcgtctagattaggatccttcttgtagatgcggatgatcctgttgcttgtaggacagatccttgaaaccttcttgtccatacaaaaaccatctttcgaacaagtcgactacttgttttgacgtaaagactatcactaccaccaacataacaccatctcatataagcagcgtgttgaaatctaatggtaatgatctttccccatttctgcaagacgttatatagtcgattgtttgacttttcgatttttagaggtaatatttgtttcaaacataaatacccaatgccatgaagatatatatgtggtacaaaaccaagtgagagaagtcatggttaaaatcatttagcaaaaaacaaagtcatggttaaaatctttatttgtttgagacaaattgtggagaattggttttcaagaatctattaaccattataaaacgtttcaaatttttttatgtaaatgtttttacttttctttttgttaggcaaggcaacaaattatgaaatctaacgtaatgtgtggttggtaacaagtaagttaccgttgagtgttgttgacaaaagagaaaattgaattaatttacattactatattctgagagatcatgttcagttagactaccatattacttatacttttctttgtgtcttaattaatttacggttttatttatgaaattggtgttaatcccaaacatagtattttcacgtgatataccattttgttaccattttattggtaagaaataacaattaaatttcgttatcgttccaactaatatcaaagtaataactaactagaaatttcatatatagaacctaacaactgttgtttgaaagagttatttttagaagtacaacaaaacgaaaccattaaccatgtatatatgtggacatgtctttgaatgtaaaatgcaagccaatctcgaggaaaaaagttacaaaccaaagaagaagatgaagcttcaaattatatggctcgctttggttttaatcgccgttgagacttatgcagttaagcaagggaaaaacgtaacgatccccgcgctaatagtttttggagattcaataatggatacaggaaataacaataatcttcccactcttcttaaatgtaacttccctccatacggtaaagattatcctggaggctttgccactggaagattttctgatggaagagttccttctgatcttattggtaaccatttgagtcatttttttataatttagaaaattatagattatagctatttatatattctgataagtatgtttaaaaataatttagcggaaaaattgggattggttaagacattaccagcatatatgaatccatatttgaagccacatgatcttcttaaaggtgtaacatttgcatctggaggaaccggttatgatccattgacagcaaaaattatggtacaatatatcttatgtttcaccatcacgatcattagttttttttatgggtgattcctttttcgtacatttatgtttatttttgtagtcagtgatatcggtgtgggatcaactcatatatttcaaagaatatatatcaaagatcaagaggcatttcggagaagaaaaagccaaagatatcttggaacatagtttctttctcgtggtgtctagtagcaatgaccttgctcacacttatttagctcaagctcatagatatgatcgtacctcttatgccaatttcttggctgactctgctgttcatttcgtgagagtaagtactttatttgtagttatatatatatcaataatatattgttatacccactaactactttatcttaactataattgataattaggaattacataagcttggagctcgaaaaattggagtgtttagtgcagtccctgttggttgtgttccactccaaagaacagtttttggaggtttctttacaagaggatgtaatcaacctctaaacaatatggcaaaacaatttaacgcaagactttctccagcactagattctttagataaagagttggatggtgttattatttacattaatgtttatgatactctttttgacatgatccaacatcctaaaaaatatggcaggtccatctaacataatttatatatatttaaaatttatcttataattcatttttattatctattttaaactaaattttatttaaattatctcattttgtttcaggttttgaggtggctgatagaggatgttgcggtaaaggactgctcacgatctcctatttatgtaactcattgaacccatttacgtgttctaactcttcagcttatatattttgggatagctatcatccaagtgaaagagcttatcaagttattgtcgacaatttacttgacaaatatttgagcaaagtatattgatgttgaggaatcaaagaaaattgtttctttttgtctcattgtcttcttttttttttggatctcaactcatgtctcactatgtattcattttttaaaatttagatattcaatgtatcattcattttttactcctcagattattaactttaagactcatcaataagaatttgcatcttattaactcacgagatcatgacacgtatcaagtctaacgataagatgtttcaatgtgtcattaaagatttaactttttaactctcttaaaaaaatagagaacctaaaaagtaaacaaatttacatatattaatttttatgtctacatatatataagaaattctttttactaaccaaaaagaaaattaacaaatttgtttttacatgtgttattagtcaattaaataaatctagcatgtattagtttaaaacaaaatcattagtatggataataactaataaaaaagatcactgcagtttaaaataataaactaatttatttaacatatatttaattgggtaaaattgtatttttcaatgtaatataatattttatttgaatactcgatgagaatatttgtatagttatatttattttttagtctaagaattttaatgcatgtagtcatcagtgaaaacaccaaaattagaaaaataagtcttagagggattgattttttttttaatatgatgaaaatgttaatataaaattttaatgttttatttataaattttaagtcatttaatatgagtttgataataggtaaaactaactgatgagattatagaatatagcaaaactatatcttaaacaatgtttcatttctaaaacaagttgtggttttttttttggttcattatgttttgttatttgtaattattttaatatgaagtaattatattgattagatatgatatacatattattttgatataaaatttaagtacttatctatttaaataacgtgtgcataatcaaaattgggattattatgatgaaataaatagttaaattgtatagcaaaatataatctataagattaaaattttggttttaaaaaattactaaacaaaatacagaaaaagtgtgttgactactatttagaatttaaatatcatcaataagatatagttaaagtcattaaggggggtgtattcaatcaaacattttaagtgatttgtgtcaaaataacaaatcctatgttattcaattataaatttttaaaagtctcatgaaatctaatgttatcgaacttgtgattttaaaatctactttaaaatcctctattattgaaaacattttaaagattgaattatttaaattttaggggatttccttagttaaaaataaagaattttaaatctcatggttttaggtggaatttgagaggattttacaataaactagattttaactcgcggtataccgcgggacgatttagttttttaaaagtaatatatattaaaacttgcaaattttatttttataaaatatttatattttacagtttataattgttattaagtaacagtataccacgaatccatgagataattgttaaaaaactgaagttttaacccctattaaaacagcatattaataatatttttaaattttataaatattgattcaaatacatccatcatataactcaattccaaaatagaactcgttctgtaatttttttaccgtcccgtgattttttttaaaaatagtaatttttaaaatttaagaataattttttatatagaaaagttttgcaaattgtatcattctctaatacatttatatctatagtttaattttatatatagtaacattatacataccacataacatttttggttttatataatcttttctaaattaggatgatttgatatgttcaatattagtggtcttaataaataataaattaaagatttaacccgtattgaaacggtggattaattatattttacttttttattaatgttgattcaaaaacccgtccctccaaatccgtcttgccagaaagctatttattttgttaatattaattttattaatgatatgactctgaattagaatctaaacattttagctaataacataggagtgcaccatatttatttaataggagaatgtatcatataacccgaatgcacttttatccaaatccaccaaaaatgtcttgcaaaaatactatagagataagaaacgatagtcgattttgaaaggtataagattagttaaagaatacaaattgaaaaggtatattacactttattcgaatatagtatcaaaacttatataacacagagatttgataattttttaattgatgaatacttttttgtgctaatttttatgtgattaagatttaattgatttcgtatataaaatattaaattgacttatttgtttataatttggtaacaaatagatatttgaatattcaatatattttgcttcagtttaagaaatttttgatgatccgtctttagatccaataagccctataatctagatattaacctgcggtatatattttagttaaactaaaattttttattgtaaagatgatttaaaaatatttgatattattttatttgattttaaatgtatagtaaactgtgaattttatatgttttgttgatattatctatattgtttagtgtttaagattatacacttgtagtttgattgttaatttaagagtttcacctgtagtataccatcttgtattaatatcgatctaaacatagcatatatatactaacaaataaaactacacaattaattgaaaatatatacaataaattataaattacaaaactacaagaaaacaaatatatacaaagtttttaaatatacctaccatacatatatattttgaaatttgaaatattaaatttctatatagatgttttttatatttgagaaattatttttagtttttaatttttatgtattccaaatatagaaaatacaatagaaaagacttatgctaattattttcaattttcagtttttcagtttgtatctattccaaaaatacaattgcaaagacttatgtgaattctagagagatctataatttttcaaatatagaagatgtctttatatatataattaaatatttgaaatttaaaatatattatggtaagtttatttaatatttttaatttttttttttaattttgttgtttttaatttattgcatatatttttaattaatagtatattatatttgttagtatatgtatgcaatgtttgttattattgtaaattattgtcgtagctcagcggtatattgccccatatgagtccaataggtcatatgttcgagccattgtggacgaggattttgcatcattattttctaatgaaacgacgtcgttttggagatctaaaaacgacgtcgtttcgatttaacagaaatttgtaacagaaagttaatgctgttaacggaaatttaacgacgtgcccaaaatggccaagtcaaatgaaactttgtgatgtaaatgacatttcgaaagttcatacttttttcgtcccaaatttgaaagttcgcgcttttttgacatttttcccaattaaattttgtttattatactattactctattaactttgagccaaatcaaagatatgctcgtcatttgatacttatttactttctaattcatgaactgaaactttttcgtttaataaactattcatatttttgcatttgtcaaaaacagatttcaagattgaattaattgatgattgaaatatttttttgtcaaaaatggtaaagagattcctacccaagtccatggtcgcagctttgcctatatatgatagatctaatattgtttccatgttcgtagctttgcctatatatctaatattgtttctatggtaacagtttttcctagtgcaatagtaaaattttggtggaattcgtatagcgaacaaaaagttaatactggctgccgtagaaaaaaatgtgctagaacaaaagggaaattggcttcagaaccattgattaattcaactcagccctataagcaaaacaacttaggacttcccataattactctttgcaaaagtttttaagagatagatacttccaaaaatacaacttcactaatacagtaaaatattgtttctctttctaatgaatggataagcaccatatcgacttgacccctaagtttttaccccatgctactcgtggagttatttgatatattttggtgaaaattatatttgagtgatgatagttattaaatataatcgtataaattataatgtgttgttttctaaattttttaaattaccatttaaaaaaattcatttttcatattcaaattattgccaacacatgtctttgtatactcttcatatttctttttgttatctttattgtcaaattttcatgaccatggtagtcgttactttcaccgtctgcgtcgttgttattctcttcttcttcctcttccccttcccatgtctcgtctttttcctcattttcttcctcattctctccatcttcttcaacgtaaaacattcgttattatgtgcttgaaaagagaataaatttaaatttactaaccttaacgaaacatagctccataagcctataaataaacaacccgaaacaatattgttcatttaaccttttgaactcgaaattcgatgtcttttataccaaaacttagttccacgtctcctactaaatttcagatcattccaagtatgtttggatgttcgtttgatgtgtatacggacttgtcagatttaaaactttagaagaaaaatagtttcgaacaggttgaagaagcttagataaaatacacataaaaacgttggaatgtatatcgcaccactcaacctaaagacattaataccaaaaacctctaaatatatgaaccaaatgttgctttcaaaggtcatgtcataactattttctccattttcttttccttatctaataatataatcttgtcttataatgtcacaatatgatctcttcttcctcacggcaatgaattactgtctatatctatctcgcttctcgcaaatctatccacatttatctctttctccttcattttaacatggaaagcaagttgttacctaaattatgatattaattgttcataatacaagagaactctcatcaattaatttttttacctttttctcgttcttgattgaaattggtactccaaaaaaaataatgtattccacagtttcaacacaagtctccatatattttgccctgttagatatcatacaactaaagtatagtcaaccaaagtttttgaaaagaaccacacaataaattacgtcactaaccatagctgcatatacacttacagtttcatgtaaacaattttcactatatgagcctaaacaaatttcccatcagaacttcctttcacggtcttacatgtatgtagttacatgtcctactgttcaacaatgatttttataacgtaataaagaaaagtcgaagctataagctattaaaggactctaagtccatgttttgctccttttagacacttaatatcaaccttagtctaagacacaacatatgtcttatagcttcaggtctgcttatggtgaatgtgtaattcagttcaattcccctaaaacacaaacatgtcgttgcagctatagggggtgtcaatccagtccactgtattgctagcaatcaagatgtgtacagaaacaactaagtcaagccagattataatgatggtgggtttctagtaacaatcctaggtcaggattcaaacaagtgaaagaaagagaacttaagagccctactcgatcattgggtcgagtagaaccaacagacaacaaaattaaataacctaaatgcaatcaacaggggatacaaataggggatacaaataacaggtaaataaaagtgcaatcaacatgagatacaaataaatctaatagaagttctaaggatggattcattgataagggcaactctagggttcatcagatggctaataggcgaaaggtagatacccatgacgatagattcaaaaatcgggtcaatccactctcgtgacagagacccccataactctaccacttcctaatctcaactctcgttgatgaaacatggaagaacggggtttaagaaacaatcaaccaaagtcaataggcagacaagccaatcccttggtcgagtctacaaatctctggaattcgtaggtcagacatccatttgaacgtcttttggacgctggacgtctatgatcgaatctccacattagcaagcgataatcgcataggggccaagcgaatccagaagggtataaacctaaacactaaccacctaattaacctagagattaccctaatctaatccatcctcaagattcctaatcactactcaagcaacattctcaataacacaaacccagaagttactaaaatcataccaaaatgtagatctaaacaagctaagcaactttacttaaacaatcaaatgcaaaaacgaaatagattaagagtaattaaggtttcaagattcataaacacaaagaaaaactgaaagataaagcatagatcctttggacaaatcccaaagtgatctatttatactaaaatgttggaaatcctagattcactagaagacaagagacttgaggcggtttgggcgaatactcgatcttggggatcgcgtaaagagggtgctgcaaagtttgcgcctttgtgtctatgctccgagtgatcaattggtcgagtagatgcttcatcctctcctatccgtatgctcagatgtctggttgagtggggaatgaggagaatccgaagacgctttggtagctcaataagtcttgtagagatggtcacccttggtcgagtaaatggatcgagtaggaggggcgaatagatcaatttgctgtttcatctgaggttgccttgatcgagtaagaggttcgagtaaactgcagcctcctttgtagcatcctggatcgaggaaagaggtcgagtagagtgatgcctcttctgtagctgcctggatcgagtgaatggatcgagtagagtcctttttagctccttctgcacctgacaacacaccaaaacatgcaatgcatatgcaagatgatcctagatgcctaagtgtgcaaaacaagctaaatggtacaaaatgatatgatacaatgagcaaatgcaaagctaaatgatgataaacatacacctaaaatgagtaaaatacagtgttatcaactcccccaaacttatctcttgcctgccctcaagcaaacaaaaaaatcttaagttgaaggagaggtttgaaggtggggattcaaaaaccgaagcatgcatataaaacgggtaagctcaatgtccatgtagctaactctaggttgtaagatgatagacccttacttaaaaacgttagccatactcgtcacaatgaaacctaacaacttgccttaatctattcaagcattcacaccaaccaattccctttaacattcattaagcacgaacagtggatcaagcaatgcaatggttatgaactcacttggtttcgggcttaggccaagagacaaaaatcgtccctctaatggtttggtcgagtaacagggcacgctcagagaaaagattgagcttcagtagaatgctaaaggtaaaacccaatggacacatacaagaacagactcccatctacccaatgatatagtatgatagctcagaaaatgatcccagtcccatagatgtcctaactctaccctttttctcattctttctctctatttggttcatgttctaaggggttgtctttgaaacgatttaagagtctagcgggtttggttttttaagctttgacaaactaaaggcttttcttctaattttagcacatagggcgttttacccttttctttgaatcacaatgcctaacttctttgaattccaaatcctttactagacttaacacttttgtatcccccttagaactctaaactcttactctctttttttttcttttcttttcattctcattctcactctcgttcccattcattccatacacattcccaatcccaaatacaagtctccacctagtcctagctaatctcaaaagcgtgggctaggtctacatgaaatactgctcttgtcggctcatacctaacacgttataccaagttcaatcgaaaaagacttcacaatcacacacaaatgatctttggcttgaaataaggttaggctaagggtatgggaaactgctctaaaaatgagagacagctatttggattaacatagggtgatgaaatgaataagatgatccaagtatgtatatggtagccatgagttcacaaacaatgcatagacatgataattgcaaattcagttcaggttctaatagatagggaatggcatcagataagcgagtttcgatcaaagttgtgtagtcaagttacaaattcaaagcagagtgcggtcttacttcagagatacaatcggttgtgcaacagagaactaacaacctgggcattgaactgacttcattgaatcaaaacatgcttatcggtttgaaatcatcattatcccctatgcaaatgagcaatcctaaatgcaaacactctatatacaatcctaaaatgatatgcaatctacatgacactctttttttgtgaaataattttctgaatttttttcaaatttttatggtttttctatgccttaaatgatgcaaaatttgaaataagaaaagagaacacaatgttaaacatgtctagaaccctcccccaaacttaaattacacagtcccttgtgtaataaaaatctgaaagagaattcaacaccaaagcacaaaacacacaagaaaaataaaaagacgctaatggtatgtacaatgagtgaggtggtgttacctcagttgtcagaggtgggttcctgctcgttgatgccatggtaagcatcccaattcattctcgagtactgcccatcttgatcccactgattttgctctacgttctgctcgttctgaacccacggattctactcgacactttgctcgatatcacgtcgagtatcttggtcgagtgatcttctgctggacataaggaggtccttgcttcttggacgaacaattcttgtttttctccttctcttctgctcgcggtgctcatgagatgaatgtcttgcaggagcttgtgggcgacttacctctcgttgctcataggcagattgccttgatggtgaaattatgtgccttcttgaaaccacttcttcagggcggttttctctcaccatggtggcgcctgaggacgaacagctcaatacagcctgaattgcggctatggccttgccacatttttccaacatcttttcttgaaacttattccaagcactaatcgaaccaatattcttgtgcgcaacagtcagactcttactcactcttggtggtggcttgtgttccttgaaatggaacctactcgcattgtagttctcccaattcatctcctctgcttcttcattctcatctccttcttcattctcagctccttcttcactctcaaccctttcttcattgtctggagcctctctcgtcgggggtgctcgttccatgaagaagagttcttcattaggcgggttgaaatcgatgttacctctcactgtgatggttgtgagctcttggttgggtaggagaagcctggcatccatttccgttctatgctgaaacttgagaatatgcatcccctcatgactctgatgctcaataaacaaagcccatctcaggtgaggaatgtcgatccatctaggggcaaagggagtcgactgaagtggcactccacaagccattagtatacgtgttatcacccctcctatagaaatggttctcttctgcttattcgctagtgcctatttcgtgaaaccacaaagatgattcaataaacgcattgatggtgaagcatagttggtgtcacccttcataggcactttgttcttggtgtagactaggatatcttttagggcaatatccagcagctctatctcgccattgttaatcggtccggtcttctcccttgcgtagaggacgttagccattgccttctggaagtaccgaatgcaggggtttcggattgcgttgctcttggcccttgaggacgagaattgtgcgtcatcacctattgttacccaaagatccgaaagctcctctttcttgaacttaggtttaacattagtccctctagggaatccgaacatatcctcaagagttttgatagccaaaacatagtctttttcatagactgcgaatgtgatatacccaagcccttcttctcttgcttcatggctagatagcccctgaaacaactctacttccagagaagaagaaactgaagcgcttcaagttttgtaggccgagtgagggttggacatgagacccaaaagaccactcttttctaagaggtactcgacatcctctgttatgccaagctcattcatggtttcggagtgggggtatcgagtgccatggaattcgtgagctgccaaaagctcatagtatccatccggtgatagcttagtcttcttcatcaaggacttagtggctcttggagtcatttcagggacatagtcttcatccccaccaaggtcttcatcgacaagacttctctcttcggccatagctctcttacctcttgcaatttccgctcttcttctatcacgagctaggaccttggtggcgtattgactgaaccgcctatactcttccatctccctctcaggcctagtagaccaagattcagcctcatccacgttgaattcggcgtccatggaggattcgttgttgtttgaactcatggtgaagctaaactttcataaatcaaaactaaagctt

SEQ ID NO: 1346 - DNA, 100231 bp, Arabidopsis thaliana
gaattccaccaaaaactcgtcattgcactagttatctgctgacattggtactttgttagcctaaaacatgacatcgcatacaccggtagcgccatagcaacagatttaagcagaacctccttactacctaatgacagagtcttggcataccaacttgtagtgatgtatgctagcaacacacttttagaaccactaaagcactcgggaaatcctaagtacattccttctcctccttctttagtgatacccaaatatagacctagcacatgcttcataatcggatgaatcttatttccatagataatcgacgatttttgcagattaatttcctgccctggacatcccaatagagcttcaagcattttaaaatttttgtaccttccctgaaagtagctcggctcataaacaggctatcatctgctaaaagcaaatgctgaatcgaaggacatcttcttgtgaggcacaaatcggaaatacgaccttcagattcaacatttctcatgatgtgaacaagagcctccgcaaataggagaaaaaggaatggcgaaagggggtcaccttagcgtagaccccgttctggtttaataaaaccataagaattcccattcagcagcaccgagtatgtaaccaatgtcacacatataattatccaagcaacccatttcctatgaaatccaagacgtgtgaacatcacttccaaaaaattccactccacacggtcatatgctttggatatatcagttttgatcgccataaaatcttcattacacgcaggattagtatttaacgcatgtatcatttcatgtgccaaaagcatattatctgatattaatcttcccgccacaaaggcaccttgcgtatctcacacaatctccggaagtatagcctttagcctgaaacacagaatctttgaaattatcttataagatacggaacataagcttcttggtcgaagggaaagaaccagactcaaaaaaatccttcatctcttcacaaacttgctgccccacaactgaccaatacgactaaaaaaataggtccgtcatgccatcagcgcctgatgtactgtttcttcattcgtgacccgttttgttgaggttgcattcagctcagcagcatgcccgtctctgacccagggcagcatggtcaaatgcctaaggtccaaaataaaaaaggtccaaatttttttttttgttgtaagatttgggaaaaaaaaattagaacaaataggctcattataaaaaaacgtttaagaacaaaaggcccaaaaaaagttaacctacttaattagtaagagaggaaatcaaaacgtcgttggtttttgtgactcactctcagattatgatcaaaatctgaaaccctctcaagtctcacctcacgattcacaaaacaactaatcatcttttcttattcatcaatttatctatttcaagcaaactgcagttttgattttatattttaggtaaacttttcttgattctagtaatcttcttttacttaccaatctactgaacacaatggaaaaaattctcatagccatatctaatattatttttcatttttggatttttatagtggttggatcttggacgcagaacgtcacacagtcgatttttttaaaacgtgcatttctcaattcacaggtgatattgttcttttttatatttaatcatggtgttgtgtgggaatgacaaaaaaaaagagaaaaaaactgaaaaacaatttatagaatctcaaggaggatctatggaaaagtttgttaaaaaaagatctgcagctagtgtgaattctagtgaggctggtcctagtgtagcacctagtttaaatcctcatgatcattcaaatgaaaatttagataataatgtgaatgagtctcatgagaacatgtcaaatccatctaatatggaaaatgtgaatgttgatgatgaacttcctccttttgatcctccttcacctcttcacgaacttgctgacccacaactgaccaatacgactgaaaaaataagcccgtcatgccatcagcgcctggtgcactgctactctttatactgaaggcggcttgtcttatttcttcattcgtgacccgttttgttaaagttgcattcatctcagcaataaccgtgtagttcatcccagctagaaggtctgcagcatcattaggctgggaagaagtaaaaagcttctgaaaataaaccactgctatattacctttggacccatcatcaaattgttcgacgtcattctcatcaaacaaggagaagactttattctgagcccgtctgcctttaacacagccatgaaaatatttagtatttcgttcaccatcatcaagccatttctccgagctcttttgtttccaatatacttcctcttcgcgatatgcatcagctaattctcttttccacttaattagaaggaaaaatctgggaaattgtttactcccttcctccactagctgttcacgtaacttcttaatcttggttttagcattcaattgagaagaagaacgtttccagcgagacaaggatcgacgacatgatgcaagtatatcaaaaagacttgtaggaccatttaaagtattacaagtccaaccttgttttacaatctctttgatttctaatttggatacccatcttcgatcaaacatgaaccgccctctaaattattgtttttcattaacaaaccgagttaacactggacgatgatcagatcctactcgctccaaatattcagaactcactcgtgggaataaacggaaccaatcagcattaccaagagctctatcaagccgaatctgaatccacataccattgcgtttacccgcccatgagaatttattcccagaaaatggaatttcctgcagcctacaatcatgtaccatggtacgaaaaggcaagaaagatgattcttcttgcgctggacctccaagtttctcggagttctcccatatctcgttcagatcccccataacaaaccaaggttcatttcttgtaagtcctatgttggttaagttatcccagacttcttgtcttaagttccaagcaccatctccatagacaaatgacgcataaattccaaggaccaaaacttgatcttcgtgtcgatgattctcttatctgagtgtaacacttctatgtcgtatgacgatttccaaaataaagctagtccaccactcaaaccttcaggatcaacgaggtgggcattatcataacccatccacttcttaacttccaaaactcgattactggagttcttggtctccaggaggaacataatatccgggaaatgatcacgcctcatttcctatagaattggaattgccagtaagctcctcaatccctgacaattctagctcattatactcataactaattgggcggttcctcacgcggaaccacctctaattcagaccgcttagcaatctttggtgatgatactccttcctcaacttctttccttttcaaggacaaaccttcttcccctacttgtttaatttttctctgtaaacctgtgcactttccgaccttcttgagctatcttagcagcttgtgccttccttttatgctaactaggacgacgtcaatatttctttatcacctctcttgccccggatagactagcgacaccgccatatttaaaacccatagagcaagaggcatgatcaatagaatttcaaccggagcactctgagcaaccaccaactgatctgataatgacatcgtgttctcacctttgtttcttgaaacaatatctaacgttcccgaagtagtcatatcagtttctttattaccaaagtcaaaaaccaaccctttacctttattcacttcagttgtgactattgtagcaggctccaaccttaggagagtcttcctacctttaggatccccttctagatcccaaagtaacttacaaaccctatcaatgcggacttatttttcagtagcatctaccactgacaaatagcttctcatctcatcaagcacctctttagatatcttaggtcttcatgtgacaacatcaatgcccacatcgtcgtttgttaaaacaccatagagtggatcatctgggctgatttatgaagttacacttcctgttccaatcgtagccacattcatcctccccatagcattggcatgccggttctaagtattcaaagggcatctcgatctatcatgagtcagcctctagcattggaaacaacgttttctcacacgttcatactccacaccaatagttaccatttctccagtaggcaattccacttctttgaattccacagtgacttattgatatcaaacaaaattttcacccatacaaagcctttgctctgaggctttaatggatcaaaagccaccgttctcacttgcccaatactttccgcaatctcttcaaaggtatccacagtatagaagttgaccggaatgtgacgtagacgaatccaaagggataagattttcaagtaatcttctggtgactctccacccatctctcaaggactccaatcctcgtacttccaagctccaccctgaaggatagcctccagatcatgttcgttatcaaaaatatattgaaaattttcctcagataacgatataccctgagctctgttattaatgtgccaaagtcgtggcatatcatgaatgaaacgcgacatcttctggttttccggacagagtaaccttcccatgaggctacaagcgtttctctcacatgagctaaacttcggtaagttcttcagttttagaggtttgttctctttaatcgacatctcttgcaaagctttgtccaaagcaaacaccatctcttgagccaaaagcgagagcaaacaattttgccaaaacaattcaagggatctcaaagcaattgtgcggcggcgtttcttggaattttttagatctaggttaaaaaccaataaaattggaaactcacgaccgactatgatccagaaaaggaaacatagcaaaacaaatcaggtggaataaggaaattccccagtgaccaccacctctctcatcgagctttgaaagcctctaattgaagaagaggaacctaagcccaaacaagggaaatcctccaaaaaaaaaaatcgaactttgaaagcctctaaagttttggctaagtgttttgcctgtaaagtgattttttctgctatagtaatgatttttgggttgccgcctaatgaaatcatttcccagcactaaattaatgctacaatgtagttgccatccgattttatcacttttagtagcagttagtgaattagtgctacaatcatctgctactaatggccaaattttttgtagtgtaatgtttagcttacttgattaagttcttttgaatctttatgatcatcactctcatttccatttttattttcatcttttattattttataattcttctaaacatattttttattctatttacatttttttcttaccaaattttggatgatattttcttaactgagtttttaataattaaaaaggccacaattataaatttagccataggcctctcaaggatcataagcacggcattgcctagagaatctagctcgacatttgcatatggttgttgataatgtcatcgtctagattaggatccttcttgtagatgcggatgatcctgttgcttgtaggacagatccttgaaaccttcttgtccatacaaaaaccatctttcgaacaagtcgactacttgttttgacgtaaagactatcactaccaccaacataacaccatctcatataagcagcgtgttgaaatctaatggtaatgatctttccccatttctgcaagacgttatatagtcgattgtttgacttttcgatttttagaggtaatatttgtttcaaacataaatacccaatgccatgaagatatatatgtggtacaaaaccaagtgagagaagtcatggttaaaatcatttagcaaaaaacaaagtcatggttaaaatctttatttgtttgagacaaattgtggagaattggttttcaagaatctattaaccattataaaacgtttcaaatttttttatgtaaatgtttttacttttctttttgttaggcaaggcaacaaattatgaaatctaacgtaatgtgtggttggtaacaagtaagttaccgttgagtgttgttgacaaaagagaaaattgaattaatttacattactatattctgagagatcatgttcagttagactaccatattacttatacttttctttgtgtcttaattaatttacggttttatttatgaaattggtgttaatcccaaacatagtattttcacgtgatataccattttgttaccattttattggtaagaaataacaattaaatttcgttatcgttccaactaatatcaaagtaataactaactagaaatttcatatatagaacctaacaactgttgtttgaaagagttatttttagaagtacaacaaaacgaaaccattaaccatgtatatatgtggacatgtctttgaatgtaaaatgcaagccaatctcgaggaaaaaagttacaaaccaaagaagaagatgaagcttcaaattatatggctcgctttggttttaatcgccgttgagacttatgcagttaagcaagggaaaaacgtaacgatccccgcgctaatagtttttggagattcaataatggatacaggaaataacaataatcttcccactcttcttaaatgtaacttccctccatacggtaaagattatcctggaggctttgccactggaagattttctgatggaagagttccttctgatcttattggtaaccatttgagtcatttttttataatttagaaaattatagattatagctatttatatattctgataagtatgtttaaaaataatttagcggaaaaattgggattggttaagacattaccagcatatatgaatccatatttgaagccacatgatcttcttaaaggtgtaacatttgcatctggaggaaccggttatgatccattgacagcaaaaattatggtacaatatatcttatgtttcaccatcacgatcattagttttttttatgggtgattcctttttcgtacatttatgtttatttttgtagtcagtgatatcggtgtgggatcaactcatatatttcaaagaatatatatcaaagatcaagaggcatttcggagaagaaaaagccaaagatatcttggaacatagtttctttctcgtggtgtctagtagcaatgaccttgctcacacttatttagctcaagctcatagatatgatcgtacctcttatgccaatttcttggctgactctgctgttcatttcgtgagagtaagtactttatttgtagttatatatatatcaataatatattgttatacccactaactactttatcttaactataattgataattaggaattacataagcttggagctcgaaaaattggagtgtttagtgcagtccctgttggttgtgttccactccaaagaacagtttttggaggtttctttacaagaggatgtaatcaacctctaaacaatatggcaaaacaatttaacgcaagactttctccagcactagattctttagataaagagttggatggtgttattatttacattaatgtttatgatactctttttgacatgatccaacatcctaaaaaatatggcaggtccatctaacataatttatatatatttaaaatttatcttataattcatttttattatctattttaaactaaattttatttaaattatctcattttgtttcaggttttgaggtggctgatagaggatgttgcggtaaaggactgctcacgatctcctatttatgtaactcattgaacccatttacgtgttctaactcttcagcttatatattttgggatagctatcatccaagtgaaagagcttatcaagttattgtcgacaatttacttgacaaatatttgagcaaagtatattgatgttgaggaatcaaagaaaattgtttctttttgtctcattgtcttcttttttttttggatctcaactcatgtctcactatgtattcattttttaaaatttagatattcaatgtatcattcattttttactcctcagattattaactttaagactcatcaataagaatttgcatcttattaactcacgagatcatgacacgtatcaagtctaacgataagatgtttcaatgtgtcattaaagatttaactttttaactctcttaaaaaaatagagaacctaaaaagtaaacaaatttacatatattaatttttatgtctacatatatataagaaattctttttactaaccaaaaagaaaattaacaaatttgtttttacatgtgttattagtcaattaaataaatctagcatgtattagtttaaaacaaaatcattagtatggataataactaataaaaaagatcactgcagtttaaaataataaactaatttatttaacatatatttaattgggtaaaattgtatttttcaatgtaatataatattttatttgaatactcgatgagaatatttgtatagttatatttattttttagtctaagaattttaatgcatgtagtcatcagtgaaaacaccaaaattagaaaaataagtcttagagggattgattttttttttaatatgatgaaaatgttaatataaaattttaatgttttatttataaattttaagtcatttaatatgagtttgataataggtaaaactaactgatgagattatagaatatagcaaaactatatcttaaacaatgtttcatttctaaaacaagttgtggttttttttttggttcattatgttttgttatttgtaattattttaatatgaagtaattatattgattagatatgatatacatattattttgatataaaatttaagtacttatctatttaaataacgtgtgcataatcaaaattgggattattatgatgaaataaatagttaaattgtatagcaaaatataatctataagattaaaattttggttttaaaaaattactaaacaaaatacagaaaaagtgtgttgactactatttagaatttaaatatcatcaataagatatagttaaagtcattaaggggggtgtattcaatcaaacattttaagtgatttgtgtcaaaataacaaatcctatgttattcaattataaatttttaaaagtctcatgaaatctaatgttatcgaacttgtgattttaaaatctactttaaaatcctctattattgaaaacattttaaagattgaattatttaaattttaggggatttccttagttaaaaataaagaattttaaatctcatggttttaggtggaatttgagaggattttacaataaactagattttaactcgcggtataccgcgggacgatttagttttttaaaagtaatatatattaaaacttgcaaattttatttttataaaatatttatattttacagtttataattgttattaagtaacagtataccacgaatccatgagataattgttaaaaaactgaagttttaacccctattaaaacagcatattaataatatttttaaattttataaatattgattcaaatacatccatcatataactcaattccaaaatagaactcgttctgtaatttttttaccgtcccgtgattttttttaaaaatagtaatttttaaaatttaagaataattttttatatagaaaagttttgcaaattgtatcattctctaatacatttatatctatagtttaattttatatatagtaacattatacataccacataacatttttggttttatataatcttttctaaattaggatgatttgatatgttcaatattagtggtcttaataaataataaattaaagatttaacccgtattgaaacggtggattaattatattttacttttttattaatgttgattcaaaaacccgtccctccaaatccgtcttgccagaaagctatttattttgttaatattaattttattaatgatatgactctgaattagaatctaaacattttagctaataacataggagtgcaccatatttatttaataggagaatgtatcatataacccgaatgcacttttatccaaatccaccaaaaatgtcttgcaaaaatactatagagataagaaacgatagtcgattttgaaaggtataagattagttaaagaatacaaattgaaaaggtatattacactttattcgaatatagtatcaaaacttatataacacagagatttgataattttttaattgatgaatacttttttgtgctaatttttatgtgattaagatttaattgatttcgtatataaaatattaaattgacttatttgtttataatttggtaacaaatagatatttgaatattcaatatattttgcttcagtttaagaaatttttgatgatccgtctttagatccaataagccctataatctagatattaacctgcggtatatattttagttaaactaaaattttttattgtaaagatgatttaaaaatatttgatattattttatttgattttaaatgtatagtaaactgtgaattttatatgttttgttgatattatctatattgtttagtgtttaagattatacacttgtagtttgattgttaatttaagagtttcacctgtagtataccatcttgtattaatatcgatctaaacatagcatatatatactaacaaataaaactacacaattaattgaaaatatatacaataaattataaattacaaaactacaagaaaacaaatatatacaaagtttttaaatatacctaccatacatatatattttgaaatttgaaatattaaatttctatatagatgttttttatatttgagaaattatttttagtttttaatttttatgtattccaaatatagaaaatacaatagaaaagacttatgctaattattttcaattttcagtttttcagtttgtatctattccaaaaatacaattgcaaagacttatgtgaattctagagagatctataatttttcaaatatagaagatgtctttatatatataattaaatatttgaaatttaaaatatattatggtaagtttatttaatatttttaatttttttttttaattttgttgtttttaatttattgcatatatttttaattaatagtatattatatttgttagtatatgtatgcaatgtttgttattattgtaaattattgtcgtagctcagcggtatattgccccatatgagtccaataggtcatatgttcgagccattgtggacgaggattttgcatcattattttctaatgaaacgacgtcgttttggagatctaaaaacgacgtcgtttcgatttaacagaaatttgtaacagaaagttaatgctgttaacggaaatttaacgacgtgcccaaaatggccaagtcaaatgaaactttgtgatgtaaatgacatttcgaaagttcatgcttttttcgtcccaaatttgaaagttcgcgcttttttgacatttttcccaattaaattttgtttattatactattactctattaactttgagccaaatcaaagatatgctcgtcatttgatacttatttactttctaattcatgaactgaaactttttcgtttaataaactattcatatttttgcatttgtcaaaaacagatttcaagattgaattaattgatgattgaaatatttttttgtcaaaaatggtaaagagattcctacccaagtccatggtcgcagctttgcctatatatgatagatctaatattgtttccatgttcgtagctttgcctatatatctaatattgtttctatggtaacagtttttcctagtgcaatagtaaaattttggtggaattcgtatagcgaacaaaaagttaatactggctgccgtagaaaaaaatgtgctagaacaaaagggaaattggcttcagaaccattgattaattcaactcagccctataagcaaaacaacttaggacttcccataattactctttgcaaaagtttttaagagatagatacttccaaaaatacaacttcactaatacagtaaaatattgtttctctttctaatgaatggataagcaccatatcgacttgacccctaagtttttaccccatgctactcgtggagttatttgatatattttggtgaaaattatatttgagtgatgatagttattaaatataatcgtataaattataatgtgttgttttctaaattttttaaattaccatttaaaaaaattcatttttcatattcaaattattgccaacacatgtctttgtatactcttcatatttctttttgttatctttattgtcaaattttcatgaccatggtagtcgttactttcaccgtctgcgtcgttgttattctcttcttcttcctcttccccttcccatgtctcgtctttttcctcattttcttcctcattctctccatcttcttcaacgtaaaacattcgttattatgtgcttgaaaagagaataaatttaaatttactaaccttaacgaaacatagctccataagcctataaataaacaacccgaaacaatattgttcatttaaccttttgaactcgaaattcgatgtcttttataccaaaacttagttccacgtctcctactaaatttcagatcattccaagtatgtttggatgttcgtttgatgtgtatacggacttgtcagatttaaaactttagaagaaaaatagtttcgaacaggttgaagaagcttagataaaatacacataaaaacgttggaatgtatatcgcaccactcaacctaaagacattaataccaaaaacctctaaatatatgaaccaaatgttgctttcaaaggtcatgtcataactattttctccattttcttttccttatctaataatataatcttgtcttataatgtcacaatatgatctcttcttcctcacggcaatgaattactgtctatatctatctcgcttctcgcaaatctatccacatttatctctttctccttcattttaacatggaaagcaagttgttacctaaattatgatattaattgttcataatacaagagaactctcatcaattaatttttttacctttttctcgttcttgattgaaattggtactccaaaaaaaataatgtattccacagtttcaacacaagtctccatatattttgccctgttagatatcatacaactaaagtatagtcaaccaaagtttttgaaaagaaccacacaataaattacgtcactaaccatagctgcatatacacttacagtttcatgtaaacaattttcactatatgagcctaaacaaatttcccatcagaacttcctttcacggtcttacatgtatgtagttacatgtcctactgttcaacaatgatttttataacgtaataaagaaaagtcgaagctataagctattaaaggactctaagtccatgttttgctccttttagacacttaatatcaaccttagtctaagacacaacatatgtcttatagcttcaggtctgcttatggtgaatgtgtaattcagttcaattcccctaaaacacaaacatgtcgttgcagctatagggggtgtcaatccagtccactgtattgctagcaatcaagatgtgtacagaaacaactaagtcaagccagattataatgatggtgggtttctagtaacaatcctaggtcaggattcaaacaagtgaaagaaagagaacttaagagccctactcgatcattgggtcgagtagaaccaacagacaacaaaattaaataacctaaatgcaatcaacaggggatacaaataggggatacaaataacaggtaaataaaagtgcaatcaacatgagatacaaataaatctaatagaagttctaaggatggattcattgataagggcaactctagggttcatcagatggctaataggcgaaaggtagatacccatgacgatagattcaaaaatcgggtcaatccactctcgtgacagagacccccataactctaccacttcctaatctcaactctcgttgatgaaacatggaagaacggggtttaagaaacaatcaaccaaagtcaataggcagacaagccaatcccttggtcgagtctacaaatctctggaattcgtaggtcagacatccatttgaacgtcttttggacgctggacgtctatgatcgaatctccacattagcaagcgataatcgcataggggccaagcgaatccagaagggtataaacctaaacactaaccacctaattaacctagagattaccctaatctaatccatcctcaagattcctaatcactactcaagcaacattctcaataacacaaacccagaagttactaaaatcataccaaaatgtagatctaaacaagctaagcaactttacttaaacaatcaaatgcaaaaacgaaatagattaagagtaattaaggtttcaagattcataaacacaaagaaaaactgaaagataaagcatagatcctttggacaaatcccaaagtgatctatttatactaaaatgttggaaatcctagattcactagaagacaagagacttgaggcggtttgggcgaatactcgatcttggggatcgcgtaaagagggtgctgcaaagtttgcgcctttgtgtctatgctccgagtgatcaattggtcgagtagatgcttcatcctctcctatccgtatgctcagatgtctggttgagtggggaatgaggagaatccgaagacgctttggtagctcaataagtcttgtagagatggtcacccttggtcgagtaaatggatcgagtaggaggggcgaatagatcaatttgctgtttcatctgaggttgccttgatcgagtaagaggttcgagtaaactgcagcctcctttgtagcatcctggatcgaggaaagaggtcgagtagagtgatgcctcttctgtagctgcctggatcgagtgaatggatcgagtagagtcctttttagctccttctgcacctgacaacacaccaaaacatgcaatgcatatgcaagatgatcctagatgcctaagtgtgcaaaacaagctaaatggtacaaaatgatatgatacaatgagcaaatgcaaagctaaatgatgataaacatacacctaaaatgagtaaaatacagtgttatcaactcccccaaacttatctcttgcctgccctcaagcaaacaaaaaaatcttaagttgaaggagaggtttgaaggtggggattcaaaaaccgaagcatgcatataaaacgggtaagctcaatgtccatgtagctaactctaggttgtaagatgatagacccttacttaaaaacgttagccatactcgtcacaatgaaacctaacaacttgccttaatctattcaagcattcacaccaaccaattccctttaacattcattaagcacgaacagtggatcaagcaatgcaatggttatgaactcacttggtttcgggcttaggccaagagacaaaaatcgtccctctaatggtttggtcgagtaacagggcacgctcagagaaaagattgagcttcagtagaatgctaaaggtaaaacccaatggacacatacaagaacagactcccatctacccaatgatatagtatgatagctcagaaaatgatcccagtcccatagatgtcctaactctaccctttttctcattctttctctctatttggttcatgttctaaggggttgtctttgaaacgatttaagagtctagcgggtttggttttttaagctttgacaaactaaaggcttttcttctaattttagcacatagggcgttttacccttttctttgaatcacaatgcctaacttctttgaattccaaatcctttactagacttaacacttttgtatcccccttagaactctaaactcttactctctttttttttcttttcttttcattctcattctcactctcgttcccattcattccatacacattcccaatcccaaatacaagtctccacctagtcctagctaatctcaaaagcgtgggctaggtctacatgaaatactgctcttgtcggctcatacctaacacgttataccaagttcaatcgaaaaagacttcacaatcacacacaaatgatctttggcttgaaataaggttaggctaagggtatgggaaactgctctaaaaatgagagacagctatttggattaacatagggtgatgaaatgaataagatgatccaagtatgtatatggtagccatgagttcacaaacaatgcatagacatgataattgcaaattcagttcaggttctaatagatagggaatggcatcagataagcgagtttcgatcaaagttgtgtagtcaagttacaaattcaaagcagagtgcggtcttacttcagagatacaatcggttgtgcaacagagaactaacaacctgggcattgaactgacttcattgaatcaaaacatgcttatcggtttgaaatcatcattatcccctatgcaaatgagcaatcctaaatgcaaacactctatatacaatcctaaaatgatatgcaatctacatgacactctttttttgtgaaataattttctgaatttttttcaaatttttatggtttttctatgccttaaatgatgcaaaatttgaaataagaaaagagaacacaatgttaaacatgtctagaaccctcccccaaacttaaattacacagtcccttgtgtaataaaaatctgaaagagaattcaacaccaaagcacaaaacacacaagaaaaataaaaagacgctaatggtatgtacaatgagtgaggtggtgttacctcagttgtcagaggtgggttcctgctcgttgatgccatggtaagcatcccaattcattctcgagtactgcccatcttgatcccactgattttgctctacgttctgctcgttctgaacccacggattctactcgacactttgctcgatatcacgtcgagtatcttggtcgagtgatcttctgctggacataaggaggtccttgcttcttggacgaacaattcttgtttttctccttctcttctgctcgcggtgctcatgagatgaatgtcttgcaggagcttgtgggcgacttacctctcgttgctcataggcagattgccttgatggtgaaattatgtgccttcttgaaaccacttcttcagggcggttttctctcaccatggtggcgcctgaggacgaacagctcaatacagcctgaattgcggctatggccttgccacatttttccaacatcttttcttgaaacttattccaagcactaatcgaaccaatattcttgtgcgcaacagtcagactcttactcactcttggtggtggcttgtgttccttgaaatggaacctactcgcattgtagttctcccaattcatctcctctgcttcttcattctcatctccttcttcattctcagctccttcttcactctcaaccctttcttcattgtctggagcctctctcgtcgggggtgctcgttccatgaagaagagttcttcattaggcgggttgaaatcgatgttacctctcactgtgatggttgtgagctcttggttgggtaggagaagcctggcatccatttccgttctatgctgaaacttgagaatatgcatcccctcatgactctgatgctcaataaacaaagcccatctcaggtgaggaatgtcgatccatctaggggcaaagggagtcgactgaagtggcactccacaagccattagtatacgtgttatcacccctcctatagaaatggttctcttctgcttattcgctagtgcctatttcgtgaaaccacaaagatgattcaataaacgcattgatggtgaagcatagttggtgtcacccttcataggcactttgttcttggtgtagactaggatatcttttagggcaatatccagcagctctatctcgccattgttaatcggtccggtcttctcccttgcgtagaggacgttagccattgccttctggaagtaccgaatgcaggggtttcggattgcgttgctcttggcccttgaggacgagaattgtgcgtcatcacctattgttacccaaagatccgaaagctcctctttcttgaacttaggtttaacattagtccctctagggaatccgaacatatcctcaagagttttgatagccaaaacatagtctttttcatagactgcgaatgtgatatacccaagcccttcttctcttgcttcatggctagatagcccctgaaacaactctacttccagagaagaagaaactgaagcgcttcaagttttgtaggccgagtgagggttggacatgagacccaaaagaccactcttttctaagaggtactcgacatcctctgttatgccaagctcattcatggtttcggagtgggggtatcgagtgccatggaattcgtgagctgccaaaagctcatagtatccatccggtgatagcttagtcttcttcatcaaggacttagtggctcttggagtcatttcagggacatagtcttcatccccaccaaggtcttcatcgacaagacttctctcttcggccatagctctcttacctcttgcaatttccgctcttcttctatcacgagctaggaccttggtggcgtattgactgaaccgcctatactcttccatctccctctcaggcctagtagaccaagattcagcctcatccacgttgaattcggcgtccatggaggattcgttgttgtttgaactcatggtgaagctaaactttcataaatcaaaactaaagcttagtaggtaagtctcaaacaaagaaaacacttgcagtatggatcgagtgaaacagggggggggggcaagtgatttttattttttggaggaagccgaaagctgaaatttttgagattgtgtgaagcagaaaacaaatgacagagatggtgttgaagtgtgcacaaagaagaaggtgagaagagtgatatcttatcttttggttttgatttgaatgagtggaggaggatggtctcctatgctttttttgttgggataagggtgttgaccaaatagtgattgagcatgatgggtaaaggctttgtccaccgagtaatagaatgacggggagacaagtgggccactcgatcaccaagcttggtcgtttagttgctttactcgaccaattgatagagtaaaatggtgatgcaactttactcgatcaattgatagagtagaaatgcttatgttgtagatatttcttgatcacagagttcacagctctacaaatcctgatttattcctgaattccaaaaacactaaaaagcatatcaaaatatcaaaattaaatatgtacagagatagacatgggatttcctcccaagtgagctagtttaaagtcttaagttagacttcttactattttaggcattgatgggttcctggaggtcaactgtagttccttcaggaatagggcaatctgcactataacgtttgaccctctgcctattcacagtaaattcagaacttccctccttagtaagagtaattgccccatatggcagtacctcttgatggtgaaaggcccagaccacctggattttagctttcctggaaacaacttgagtattgagttgaaaagcagaacttggtctccaatgttaaaatgttttggtgagatctttttgtcatgaaaagcttttgttctttctttgtagatttttgaactatcatatgcttccagcctaatctcttccagttcatgcaggtcgactgctcttttctcttgagctcccttgatttccaaattcaaaagtttggttgcccaaatggctttatattctacttcaactggtagatgacaagatttcccatatagaatctggaatggggttcacccaataggcgttttgtatgcggttctataggcccataaagtctcatcaagtttagctgaccaatcccttcttgagacaccaacaacttttgtgagtatagccttgatctgtctgtttgatacttccacttggccactggtctgagggtgatagggggtggcaaccttatgcttaaccccatgttttctcaatagaccttcaaagactttttttatgaaatgtgagcctccatcacttttcactaccttcggaattccatacatagggaaaataatggatttaaacattttcaggactactttgtggtcgttggttggtgctgctattgcttccacccacttggagacgtaatccactactaccagaatataagcatttccatatgagggagggttgaacggacccatgaagtctattccccacacatcaaaaacttctacctcaagaattggattctgtggcatctcattccttctggatatgttctcaactctttggcatggatcgcatttcgctataaattcctgagtatccttaaacattgtgggccaccacatacctgcttgcaaaattttctgagcagtcatgaaggttgcgaaatgccctccataggtggatccatggcaatgtcctagtataccttgaatttccccctttagagacacacctcctgaatagcccatcactcccctttttatacaagtacggctcatcccaatagtaatggtggatgtctctaaagaacttcttttttttatatgcatccaaactctggggatcataccactaaccaaataattgactaaatctgcataccagggcaacttttcttcttcaactacatatgcttctttcagcatgtcctttgtgttgaagcttttgttaacaaggtcgtagaacataagctgttcttcaggcatagtgtcatctatcgggaccgaatcttcaattctcatcctagagagatggtctgcaactccattctcaacatctttcttggcaatgatttccatgtcaaactcttgaagcaatagtatccaccttagaagtcttggcttggtttccttcttggcacagatgtgccttagtgctgcatggtctgtgtagaccttcactttggagccaaccaaatagcttctaaatttctcaaaggcgaaaaccacagctaatagctccttttctgtggttgcatattttgtttaagcttcgtccatcgttctacttgcgtagtagatgacgtgaagtttgccatcaatcttttggcctaggacagctccaactgcttaatcggatgcgtcacacatgatctcaaatgggtggtcccagttaggtgcttgaacgataggggcagacaccaatgcttcctttatcaaatggaaagctttgagacaatcttcatcaaagttgaactcagtttccttgcacagcaatctagtgaggggtcgagcagtctttgaaaaatcttttatgaacctcctgtaaaatcctgcatggcctaggaagctcctgatatccttaactgtcttagggggttgcagcctttataaacatggttagctagccttctaacatttgatcaatgaatggcaagggaaaatggtcctttctagttgcagcatttagtttcctgtaatcaatgcacattctatgtcctgttatagtcctagtgggaatgagctcatctaaatcatttttaactacagtcattcctcccttcttgggtacacagtgcacatgagagacccatgtactgtcagaaattgggtagattatatcagcatcaagcaatttaagaatttcctttttaaccacatctttcaaattttgatttaatctcctatgtggttcaatactagtatataattcattttcaagatgaatcctatgagtacataaactaggtgaaattcctttaatatcagctaaagaatacccaattgccctcctatactttctaagctcattcaacaactggttcacttgttcatcacgtagtccatcattaataatgacgggataagtgtcatttggaccgagaaacgcgtacctcagaccttttggaagaggcttaaggtcaacctttggagctttgagttctgaccagtcatctgaacttatattctctcctccatggtcgagcatctcaatagagtttgttttttcagcgattaggctcatggtgcatcctgatactgcttcttctgagggaacaatcaattcctcaaacactcttctggtccgtccaatggtatgtgggcgtcaagatactctttgtacccttgggtttctaagtgtaggtacccttcttctccatcgttggttaaggcacttgctaggtgatctccttctataagttcttccagtaattcgttagtcaatctatccatttcttcgatccaaaagacttggccattgattgtcggttttttcatagctttgttaatgtcgaaggtcattttcatctccttccctaggtttaggtcgatttttcccttcttgacgtcgataatagctcatacagtagctaggaatggttttcctaggatcaatgggtcttttggctcctcatccatctccagtattacaaaatcagtagggttgtctattgatccgactttaacaggcaggtcttcgagaactccatgacgtattctgactgatctgtcggctaatatcagttggataccgcatggcttgtatttactaaaacccaatcttctggctacagataggggtatgaggctaattgaggcacccagatcacataggcatttactgaaagataatggtcctactgaacaaggtagggtgaaggatccaggatctctcaactttcttggtattatatttttctggatgatggtgctgcattcatggcctattaacaccattccctgcacctccttggttctttccataatcagatctttgaggtacttgtgggagtgtggaatgagcgtgaaagcatccattaacggcattcttagctcaatctcctttaattgcttatcaaaaagggttttgtatttttctatcaattccttcttgaatcttcatgggaaaggcaaagtcggtttgaagggtggcggagcaaattctttatttttttctgaagctgcgacttttctttcctcaaaagtaggctttgctcgatcgagtagagggtcgagtgagtctgaaggttgatcaagtttaattggttcattagtttgaacttcgttttgatgctggtcctccccttcttgaacttcattgtcctcagtgatcttttctgttggctggttgttgatcaatttcctttcactacggagtgtgactgcgtgtgcatattccttggaattttgaatggcctttcctagatgttgtcctgtatacgttgaggaggtattgaaaacagcttgtcattccatgtatgtcattttagatgtgagatcctcatatttgcttcttaacgcattgtaggaacagtcaactttactattaatctcagccaattgtttttccagaactagagctctagtagtttgaccctggatgatttgttgaagcattcgttttgtgtcaggatcttgagctactggtgcttgttgtggttgttaagtgaatcctggtggtggattctgctgttggtagcctccattaaactgttgtgtagggacatagccttggttgtattgaacaaatggcttagactgattctattgtggtggatacacttgatcttgagggttagctacattagtgcttctgtaggagaggtttgggttgggcttgtagttgttgtaccccttgttgaaccctccttggttctggatgtagcacagctcttcagtttggtcattccccccttcttgcatttggaagtgctcctcatcagtgatgtagtgtatctgcttctgctgagccagcagcagcttgtctagcttttcattcagagccttgatatccttgctctttttatcctcacttcctccagttcctctcattgagcgatcatagtcttcattgtagcacccatcagattgtgctacattttcgaccaactcccatccttctgctacatccttgttcaggaagttttcattggaggcagtgtcaagtagcattctgatctttggtaaagctcctctgtagagtgtgcttagtaatgaagccttcttaaaaccgtgatgggggcactgagtagtgtagctcttaaacttctcccaagcttcacaaaaagtttcattgttttcctggttgaaacctgagatctcgttcctcaatctagcggtgcgagcgttagagaagaacttggcgagaaaagctttcttacaatcgtcccatgaggtgagtctgggggtagagtcttctcccagtggtgtgccttgtctcccaaagagaaggggaatagtctgagcttaaacatatcttcagtgacaccattgatcttggtaaggccacagagcctatcaaagctgtcaagatggtctgggggtcttccataggtagaccaagaaacttgtttccttggatcattgagatgagaccactcttgatctcaaagttgttgttctgaactggtggaggcactatcccttgtctttggtgatgattccttggggcatcaccagcaccaatgtttcttggttgatcaacattaggtgggtcttgaacatcaactggtctgttatgttgatcaatagcaggtggtctgttctgatcacaagctgcctttgctttggtttcttgtaactcacgagctattttgtcaattctgtctctgaatggtagtaggtgtgcagaacctttggatcgagtttgcatgcacaaagattagtacctataccacaaaaacaagcagacgaaaatatgagttcgtaacttgataaatgtaaaagaacttgatcttaaaagtttctgatatcttgaatgtaacaatgcaactatgaattggcaacggcgccaaattgataaacaggtttttcaggcctgcttatgttgaatgtgtgattcagttcaattcccctacaacacaaacatgtcgatgcagctatagggggtgtcaatccagtccactgtattgctagcaatcaagatgtgtaaagaaacaattaagtcaagccagattataaagatggtgggtttctagtaacaatcctaggtcaggattcaaacaagtgaaagaaagagaacttaagagccctactcgatcattgggtcgagtagaaccaacagacaacaaaattaaataacctaaatgcaatcaacaggggatacaaataacaggtaaataaaattgcaatcaacatgggatacaaataaatctaatagaagttctaaggatggattcattgataagggcaactctagggttcatcaaatggctaataggcgaaaggtagatacccatgacgatagattcaaaaatcgggtcaatccactctcgtgacagagacccccataactctaccacttcctaatctcaactctcgttgatgaaacatggaagagcggggtttaagaaacaatctaccaaagtcaataggcagacaagccaatcccttggtcgagtctacaaatctctggaattcgtaggtcagacatccatttgaacgtcttttggacgctggacgtctatgatcgaatctccacattagcaagcgataatcgcataggggccaagcgaatccagaagggtataaacctaaacactaaccacctaactaacctagagattaccataatctaatccatcctcaagatccctaatcactactcaagcaacattctcaataacacaaacccagaaattactaaaatcataccaaaatgtagatctaaacaagctaagcaactttacttcaacaatcaaatgcaaaaaagaaatagattaagagtaattaaggtttcaagattcataaacacaaagaaaaactgaaagataaagcatagatcctttggacaaatcccaaagtgatctatttatactaaaatgttggaaatcctagattcactagacgacaagagacttgaggcggtttgagcgaatactcgatcttggggatcgcgtaaagagggtgctccaaagtttgcgtaaagacatagcatatatatactaacaaataaaactacacaattaattgaaaatatatacaataaattataaattacaaaactacaagaaaacaaatatatacaaagtttttaaatatacctaccatacatatatattttgaaatttgaaatattaaatttctatatagatgttttttatatttgagaaattatttttagtttttaatttttatgtattccaaatatagaaaatacaatagaaaagacttatgctaattattttcaattttcagtttttcagtttgtatctattccaaaaatacaattgcaaagacttatgtgaattctagagagatctataatttttcaaatatagaagatgtctttatatatataattaaatatttgaaatttaaaatatattatggtaagtttatttaatatttttaatttttttttttaattttgttgtttttaatttattgcatatatttttaattaatagtatattatatttgttagtatatgtatgcaatgtttgttattattgtaaattattgtcgtagctcagcggtatattgccccatatgagtccaataggtcatatgttcgagccattgtggacgaggattttgcatcattattttctaatgaaacgacgtcgttttggagatctaaaaacgacgtcgtttcgatttaacagaaatttgtaacagaaagttaatgctgttaacggaaatttaacgacgtgcccaaaatggccaagtcaaatgaaactttgtgatgtaaatgacatttcgaaagttcatgcttttttcgtcccaaatttgaaagttcgcgcttttttgacatttttcccaattaaattttgtttattatactattactctattaactttgagccaaatcaaagatatgctcgtcatttgatacttatttactttctaattcatgaactgaaactttttcgtttaataaactattcatatttttgcatttgtcaaaaacagatttcaagattgaattaattgatgattgaaatatttttttgtcaaaaatggtaaagagattcctacccaagtccatggtcgcagctttgcctatatatgatagatctaatattgtttccatgttcgtagctttgcctatatatctaatattgtttctatggtaacagtttttcctagtgcaatagtaaaattttggtggaattcgtatagcgaacaaaaagttaatactggctgccgtagaaaaaaatgtgctagaacaaaagggaaattggcttcagaaccattgattaattcaactcagccctataagcaaaacaacttaggacttcccataattactctttgcaaaagtttttaagagatagatacttccaaaaatacaacttcactaatacagtaaaatattgtttctctttctaatgaatggataagcaccatatcgacttgacccctaagtttttaccccatgctactcgtggagttatttgatatattttggtgaaaattatatttgagtgatgatagttattaaatataatcgtataaattataatgtgttgttttctaaattttttaaattaccatttaaaaaaattcatttttcatattcaaattattgccaacacatgtctttgtatactcttcatatttctttttgttatctttattgtcaaattttcatgaccatggtagtcgttactttcaccgtctgcgtcgttgttattctcttcttcttcctcttccccttcccatgtctcgtctttttcctcattttcttcctcattctctccatcttcttcaacgtaaaacattcgttattatgtgcttgaaaagagaataaatttaaatttactaaccttaacgaaacatagctccataagcctataaataaacaacccgaaacaatattgttcatttaaccttttgaactcgaaattcgatgtcttttataccaaaacttagttccacgtctcctactaaatttcagatcattccaagtatgtttggatgttcgtttgatgtgtatacggacttgtcagatttaaaactttagaagaaaaatagtttcgaacaggttgaagaagcttagataaaatacacataaaaacgttggaatgtatatcgcaccactcaacctaaagacattaataccaaaaacctctaaatatatgaaccaaatgttgctttcaaaggtcatgtcataactattttctccattttcttttccttatctaataatataatcttgtcttataatgtcacaatatgatctcttcttcctcacggcaatgaattactgtctatatctatctcgcttctcgcaaatctatccacatttatctctttctccttcattttaacatggaaagcaagttgttacctagattatgatattaattgttcataatacaagagaactctcatcaattaatttttttacctttttctcgttcttgattgaaattggtactccaaaaaaaataatgtattccacagtttcaacacaagtctccatatattttgccctgttagatatcatacaactaaagtatagtcaaccaaagtttttaaaagaaccacacaataaattacgtcactaaccatagctgcatatacacttacagtttcatgtaaacaattttcactatatgagcctaaacaaatttcccatcagaacttcctttcacggtcttacatgtatgtagttacatgtcctactgttcaacaatgatttttataacgtaataaagaaaagtcgaagctataagctattaaaggactctaagtccatgttttgctccttttagacacttaatatcaaccttagtctaagacacaacatatgtcttatagcttcaggtctgcttatggtgaatgtgtaattcagttcaattcccctaaaacacaaacatgtcgttgcagctatagggggtgtcaatccagtccactgtattgctagcaatcaagatgtgtacagaaacaactaagtcaagccagattataatgatggtgggtttctagtaacaatcctaggtcaggattcaaacaagtgaaagaaagagaacttaagagccctactcgatcattgggtcgagtagaaccaacagacaacaaaattaaataacctaaatgcaatcaacaggggatacaaataggggatacaaataacaggtaaataaaagtgcaatcaacatgagatacaaataaatctaatagaagttctaaggatggattcattgataagggcaactctagggttcatcagatggctaataggcgaaaggtagatacccatgacgatagattcaaaaatcgggtcaatccactctcgtgacagagacccccataactctaccacttcctaatctcaactctcgttgatgaaacatgaaagaacggggtttaagaaacaatcaaccaaagtcaataggcagacaagccaatcccttggtcgagtctacaaatctctggaattcgtaggtcagacatccatttgaacgtcttttggacgctggacgtctatgatcgaatctccacattagcaagcgataatcgcataggggccaagcgaatccagaagggtataaacctaaacactaaccacctaattaacctagagattaccctaatctaatccatcctcaagattcctaatcactactcaagcaacattctcaataacacaaacccagaagttactaaaatcataccaaaatgtagatctaaacaagctaagcaactttacttaaacaattaaatgcaaaaacgaaatagattaagagtaattaaggtttcaagattcataaacacaaagaaaaactgaaagataaagcatagatcctttggacaaatcccaaagtgatctatttatactaaaatgttggaaaccctagattcactagaagacaagagacttgaggcggtttgggcgaatactcgatcttggggatcgagtaaagagggtgctgcaaagtttgcgcctttgtgtctatgctccaagtgatcaattggtcgagtagatgcttcatcctctcctatccgtatgctcaaatgtctggttgagtggggaatgaggaggatccaaagacgctttgatagttcaacaagtcttgtaaagatggtcacccttggtcgagtaaatggatcgagtagtggatcgagtaggaggggcgagtagatcaatctgctgcttcatcttaggttgccttgatcgagtaagagggtcgagtaaactacagcctcctttgtagcatcctagatcgagtaaagaggtcgagtagagtgatgcctcttctgtacctgcctggatcgagtgaatggatcgagtagagtcctttttagctccttctgcacctgaaaacacaccaaaacatgcaatgcatatgcaagatgatcttagatgcctaagtatgcaaaataagttaaaatggtgcaaaatgatatgatacaatgagcaaatgcaaaggtaaatgatgataaacatatacctaagagtaaaatacagtgttatcacctagttgggccaagggacggatctaggaagggaggtgttggggagctgccccagcggctttcctaaatttttattttttgacattaaatttggaaaattgaagacttcaaatggtaatttccttttatagcactttgtaaatgtttattcaagaatcatttagcaaaaaacaaagtcatggttaaaatctttaattgtttgagacaaattgtggagaattagttttcaagaatctattaaccattataaaacgtttcaatttttttttatgtaaatgtttttacttttctttttgttaggcaaggcaacaaatcatgaaatcgaacgtaatgtgtggttggcagcaactaagttaccattgagtgctgttgacaaaagagaaaattgaaataatatatattaccatattctgagagattgtgttcaattatactaccatattacttacacttttctttgtgtcttaattaattaactgttttatttatgaaattggtgtaaatcccaaacatagtatattcacgtgatagaccattttgttaccattttcttttggtaagaaataactattaaattttgttgtcgttccaactaattagagatttcatatatagaacctaacaactgttgtttgaaagagttatttttagaagtacaaccaaacgaaacgaagtcatagtttaaccatgtatatatgtagacatgtctttgaatgtaaaatacaagccaatctcgagcagaaaagttgcaaaccaaagaagaagatgaagattcaaattatatggctcactttggttttaatcgtcgttgaagctaatgcagtcaaacaagggaaaaacgcaacgatcccggccctaatagtttttggagattcaataatggatacaggaaataacaataatcttcccactcttcttaaatgtaacttccctccatacggtaaagattatcctggaggctttgccactggaagattttctgatggaagagttccttctgatcttattggtaaccatttgagtcattttttttatattttagaaaattatagattataactatttatatgttctgataagtatgtttaaaaataatttagcggaaaaaataggattggctaagacattaccagcatatatgaatccatatttgaagccagaggatcttcttaaaggtgtaacatttgcatcaggaggaactggttatgatccattgacagcaaaaattatggtacaatatatcttatgtttttctatcacgatcattagttcttttcatgggtgattctttattcttacatttatgtttatttttgtagtcagtgatatcagtgtgggatcaactcatatatttcaaagaatatatatcaaagatcaagaggcatttcggagaagaaaaagcaaaagatatcttggaacatagtttctttcttgtggtgtctagtagcaatgaccttgctcacacttatttagctcaagctcatagatatgatcgtacctcttatgccaatttcttggctgactctgctgttcatttcgtgagagtaagtactttatttgtagttaaatatatatatatatatatatatatcaatagtatattgttatatctactaactactttatcttatctataattaataattaggaattacacaagcttggagctcaaaaaattggagtgtttagtgcagtccctgttggttgtgttccactccaaagaacagtttttggaggtttttttacaagaggatgtaatcaacctctaaacaacatggcaaaacaattcaacgcaagactttctccagcactagattctttagataaagagttggatggtgttatcctttacattaatgtttatgatactcttttcgacatgatccaacaccctaaaaaatacggtaggtccatctaacatatttatcttataattcatttttattatctattttaaactaaatttattcacattatctcattttgtttcaggttttgaagtggctgatagaggatgttgcggtaaaggactgctcacgatctcctatttatgtaactcattgaaccaatttacgtgttctaactcttcagcttatatattttgggatagctatcatccaagtaaaagagcttatcaagttattgtcgacaatttacttgacaaatatttgagcaaagtatattgatgttgaggaatcaaagaaaattgtatctttttagtctcattgtctttttttgttccatctcaattcatgtctcactatgtattaaaatttagattttcaatgtatcattcaatttttactcctcagattattaactttaaggctcatcaataaaatttgcatactatatataacttagtaatattataattaaattccatatttaaaagttacccatttaaaattttaaatcaacaaaaaaaagagaaatagttaaagtcaacatctcttaagtaattacatgtaaaatcttacgaaccgttgactaaatagaaaacaaattacgaactagtctaattgaattttgtttgttatactattactctattagctttgagccaaatcaaagacatgcttgtcatttgatacttatttactttgtaattcatgaactggaaaacttcgtttaataaactattgatatttttgcatttgtcaaaaacagattacaagattgaattaatagatggtcgacaattgttttcttaaaaaatagtaaagagattcctacaaagtccatggtagcagctttgcctatatacatctaatattgtttccatgttagtaattttgcctatatatataatattgtttctatggtagcagctttcctagtgcattagtaagattttggtggaattcgaacaacaaacaaaaagtaaatactagctggagtagaaaaacatgtgctagaacaaagggaaattggcttcagaaccatcgattaatttaactcagccctataagcaaaacaactttggacttcccataattactctttgcaaaagtttttaagagatagatatttccaaaaatacaactttattaatccaataaaatattgtttctccttctaatgaatgggaaacaccatatcgacttgactcctaaatttttagcccacattactcgtggtgttaattacttgatatatgttggtaaaaattatatttaaatgatgatagttatcaaatataatcttatataattataatgtgttggtctctaaatattttaaattaccattcaaaaataattcatttttcatattcaaattgttgccaacacatgtctttatatactcttcatattcatttttgttatctttattgtcaaatttttatgattatggtcgtcgttactatcaccgttctacctttattatactcttcttcttcttccccttcctctgtcttgtcattttcttcttcattctctccatctttttcaatgtaaaacatttgttattatgtggttgaaaagagaataaatttaaacttactaactttaaccaaacataactccataaacctatggataagtttgactccattattctgaatttaaataagttaatgtcaacgtgattaacgtttgagtttaaatgagaagaaacatgttaataatgactctataaattaaagtattagttttatgtataaatagctatttataatttagaacggaacacagaaagagcaaacgtcatattcttaaaaaacaagaaagatagagcttaccttcaacatcctccccttccatcaaaatactttcatacttggttttaatcgagattaaagtaatgataaacatcaaatgtaacgcccgtgaaccagaaaatcggttagggtttgtttttaaattatccggtttaattgtttgggttaattggaaaccgtagagtgtgcctatgaaagaaggaaactcgaaattagggctttagttagctacttttcgttttataaaggagaaaaggagaaggagcagaatcgttagggtttgggagaaatcagtttcgtcaaatcaaatcgtggtaaaaggtaaccaaatttggtagagttatttccaagtcctttatcgttattctccagtttatagaattggatttagattaaaattggttgagttattcgcagtttcgtaagacacgttttctcagacgcgaattaggaccagcggagattgaaactgagatcgtggtctcgtctgttttccgattggcacgagattttgtgggcagctttgtgacgtctgcagctaggagttcaccggagcgattgaatagttaacggttagcttgtattttagggtttcgtctttgagactgcttgtttctggtttttcctgtccagtttgcttcaaggttgcttttggttgtggacttgttgtaggacgtttctggacttttttggacgcaaggagagtctctcctgggtttaattgctattggaatcaatttgttgaggtgagtgcgtgaccatgagattatctgagcgattgggttgtgtgatttgttttgtgtgatgatatgtaggtgtggtgaatgtgttttgggtgaattgttcaatgactggtttgtttgtattgtattcgtgattatacctttgtatttgcttgtgtgtatagctcgtagatgggaggatcgcctcactaagtatttatgataatacttacgcatctcattttgttgttgatgcaggtaaagataaagtgtgatcgtggaatcatggcaaggaagagaggatgatgtaggaactcgtttgttttatttttggtgtttttggttattggaacccggttaggattgtcagttattcttggttttgttggtcgaattatttatttattcataaaaatagtatttttgacttgcggtttaattattatgttattggttggtttaattagatatttatgggaatatttaattatatttaaaaaaaaaaaatgggtcgggttgtttcatctaacaacggatgggttaatatgtatagatttcaaatcgacatgttatattaaagggaaccatatcagagtggtttcaaggagaaataatcggattcagaactttctcaactgtcagtatagcaacaaatactagattctccagcaacttcccaactcttatgtccatgaagttgaccgattcatacggcaccgcttcgctttcgaacgagaaattggtgttggaatcactcggtgattgccctgagatagtgcggtacaagaaaacctgccttttgggactctttgttgtgacattattttcggtcgcaaactaaaccgacgtttttgtgacccctttgcgactgactaacgactgcagttaaaatgaatgcaaagccgtcgcttattaacgaaacaataaactggtcgcaaaacaatctcaaatcagcgactttttgccaacgacttagcgagaaaaaaacatagtcgcaaaaacattgcacttttgctacagttaagctacgtattacggacgctcgagtcttacatttcaaaatttgtattgtgaggtgtgtttgcaagttttcttatacgttaatagtttgatttgatcgatattagttataagaatataatcaatctcttcaattccaatgtttacaaactaaacattcaaaaatccctaatctatatcaaatgttacgtgtttaataatcgatcgatcccgagctggcaggtgagtttcttcgttagatgactcgctcgcggatgatttgtcttcgacaataagtggtggatcgatcgatcccctcctcggatcgatcgatccggagttgcggaccccgatttgtcgattcttgccatcgtttctggtccaaatgagcccaataagtcccgtaagcatcttatcccgcttaaacacctaaaacctgcaaatgactcaagacacaaccgaaaagacgcaaaaaacggactatgacacgacaaacgactcaaaactaagggacttaagacaccaaaaacgcaacatatcaataagttatgaaagcaaaatatttacaaacctaacatttatatatgtactatatagtactaaattattgagaatcaatgatttatggatcagactcatatggaatacaaacatttgtcttgtgacgtattatatttggtcacaaaatagtcactcttgacctatatccgacttattttgtgactaattactttcttttttgtgattaaagtccgactaatctttcaattaagttgtgactgtttcttaagttcaatcaatttcaccaattttttgcctaagtatttaggcgctcaatattccctccaaacaatttactttgcaacactttttcgactaaattgagactccacttttttaataaataaattataaagtctcgattttttctttgtattgattcttcttctcctctttcaatctttctttttttttgtcaataagctttggtttcattcaatcactcaaacttagtacaaagcttaggagaatatcattctcagagtttagtacaacaaagataaaagcaataaagatagaagtacaatagtccgatgataaaaccatgctagctcggagacaagagttgtagaacacaatgccacatgcgagaagaaggtaaatcggagacacaacctcggtcgatccgggaagtggaagattggtcattgtcacaagacataatgatgttgagaaggagtaagggtctgtagtcaaactcaaaaaaatcgctgaagcaataaccagggttcgcaagagatatatgtgaaactgcaacaaaacaggtggattctctctcgcataatgtccttgactatggagattaagaatgtcacacaaagttagtctttggtttaacacaagtagaagattaccagacctgagcttcaaggttttcatgagcataaggagtttatcactgaaattgatagatttcacaagagagaactcggtgattggaaggtgagaaagttgcggtaatcaccgcaccttggtgacgggaccataatgccgcactttctcaacctttgcaaatggcttcgataaagggatctagaaacaagagtagaatccctaggtgactttggtaaccaggttctcaaagaaggtatgtaccagcaaagcaacgatgattgattatggattaattgacatctaacaattattttgagcaatcgacacaaacgttggcagataaagaacaagggaaagtttagccaaaacctgggcctaatggataaaggaggtgggccgtcacttatgacaatgggccaagagagaaatgggctgaaatgggggaggcccaataacaggaaccctagtgtctctctggctgcgatgaagagttggtgactgtggcggcaggacttcggcaaattgaagatcagagtggaatgaagcttcaccggaggttgtggcacaaaagtggtccagagactcaagatcaacgagtgacggtaccatttgggttgaggaactgcagattcggaagtgagagatctcgttagcactagggcggggtaataatcgtcgacagtggccactggagtagatcgacggagtgaagcaacgttgaagggtatggttaagtgatctccgagaatcgaagatggatttaatggaaggttgatgtggtgttcgggaagatggagagaaaagcttaaaagggttacaaaagtgatgcaaagataatagagattgaagcgacttgggatctcccgacgccggtgagcaagagctccaccggcgtcggaaagtttgattgggaagctgtcctcgaaaatggtgcccgagaaagtagcgtcgatgttagaatcacaatgaaagtaatttagggtttatgcttaaacgctctcacctctctcctcttctcattttatcagaacaccctcaatcttcaattcaatctagggtttctagatttatggttgttggtaagggaaaatcaaatagaggtcaaggtcgcgaatcgtcctccggtgtccgtgtcttccatggtaaaaatccagatataggttcgagtggattatcaagagctgttggtttcgttactagcccttccaggtcgagaacagcttccacttctgtttgaaaaccatatccatgggatcgagactctctggaaatttctatctttttctccttttatagatttcattttgcattggtgattgagctcagaaaccagttgtgtttgtgtttgaccatttgttttgagagtgtttttagttaagttgctaattctttgttggttgcatatactaaaagtctttgtagtttgtatacttacgagttatttttgcattgtctattgtgatatcaacttaatagtttgtcttttgttacaggtttaaccggcacaagggtaagctgtctagagtgattgctggaacatttcggaggaagtttgataggccttacttcagttagaaggttacaccaatacacattcaagagagatacttcaggaaatttgcggtaatatcatatatacctttcattctgttattgtatatataaagtatctttgctaacttacctacttgttttgtagcagaagtataattgggatggtgggattactgagctcgttaaagaaggattcttggttatagccaagaagcggatgaaagggattgtcaatcaaggaaagaagagtggtatacaaccaccatggattcgagataaactttgggctcggatgtgggagcattggaacactgaagatgctattgacaagagtgagaatgcttcacaatttagaaactctactcgtggaggtcttggagtgcacaaacatgtagctggtcggaaatcgtttatgcaagttcattaagagatggtaaaacttctcttatcatccaaacgattcacttaatagattatctaatatttcttccatgattttaatctcttttattttcattgtaggagtaacgtttgaagcgatttgtctcacttggggaagtttttattgaaacacatactagggctgatgaatcttttgtggatcaaaaatctcaacaagttggtgagggatatgcggagagccttgaagagaggatgtctgaaatagaggaggatggtcctcaaacttctgataattcctctcagtgttcaagtcatcgtacactcagccttgaagaaaagaatgagatctttctaaaggtaactcatttctgtttttattatacttagaatgctcgtctttgtttgcttggaaattatgattgtcttactctttgtttgatgagcgatagatgcttagagtaatgatgattttctttttgtgatactcatgatttaattcattttatatgtgcctttgtctttttgttttagtgtactcatacagatggcaaaggcaacccttatggccttggatcgcttgtggagacactgaccaaaagaaaaagaaaggagtgttatgcgagctcttctacatcaaccattgtggatcttcaagatcagatgcggaagaagatatcaaaacatgaagctcaaaatgcaaaacgtgatgaggagcaccaacaatatcaatctcggatggagaagcttctcctcttcatgaaggaaaaaaaccctaagttggctgcttttttgtctacaggacaagaatcacccctccgaccaaccaccacaggcaccgagccagacatcccaactccatgcacatttccaaccaccacagacaccccagaagacaccagattagggaccactccattagcctccacttcagctaatttgtctaactcttcttcttaccattgaacttgattttctaatggtttcgttgaaaaacttatcttttgttgaaaacttatttaggataataatatattgtatgagtggatgattttatgaatgttaacttgttccatgtttttaaccctctttgtttagtactaatagcttctcaattcaaaatctaatcatgtttaggttcggtaacaaagacagtagaacaaagagtcttactttagtcacaaccgcaaaagactcattgcgactaaattgtaactaaatagtacagatattgcgactaaagtgggactacattttgtttttcacccacgaaatagtagtctttaactggtcgcgtaactccgactgttgtttagtcccaaatcagttgccacttgagaccgacaatttttgtctcaaaactgtctctaagtgagccgcgttgcgttttagtcagaattctgcaacttcctcgaataatcaaatatcagtcgcttatggagccgattggtaacgactgttaatttttgctgtagagacttttcttctaagaactttcattgtagagaatttggctgtagagactttaactatagaaactttggttgttaaagtatgattagtaagaaatagacagtaaaaactatatcttttatttttattatataattttttagaaatagaaattatgctaaaaaagagtttgtttggtatatatatggacaaaataaatttataaataataaagttgtacaaaaaatattaaattaataaataaataaatgataaatattctcaacaaataataataagaaaatccatataaagatctggtgtgatttttggatcaaagaatcatcactctcacgcaattgataatgacttttgatagttgttcatgcaaaaaaaaaaaaaaaaatggatcttacaagaacagaaataaaaagtttattgttattaatcaaaatatttttgagataaattactcatagattaaaaattgatgttttatttatcatggggaagaagaaaaaggaaaatatagatttcatttaattatttattttatacactttaaaaggtctcatatttgtggctttgaaaaattgaaagtgaaatgaaaaaagtaagcagttagatgttaaaaacttttaaaataaataaagccttaaaagtgtgattggttgatttttggcttttaagacttgaaattaaatcaaaagtttttaaagtcccttccaatcaccccttatgtgcgaatgcaaatcgcggtatgataatggtcgtaaataagcgaccatgttgcgaccaatttaattagcgaccggttacaaagtcagaaaacccttgtttgcgactgatttgggaccaaattgagggttgcaaaagacaggttgttgttaaagattttgtgtagaagtgttttgttaaagattctaaggaaatatgaacgactgaaatgattttaaacaatttgtttgtagccgttgattttgatcaagatgatcaccgagaagactttgttgtgaaggttaaggaagatgaaaaagtattcatgtccaaagtgtccttttgagtttcatgattgggaatcttatacatcggattcacacacgtcattggattctccggtagagagatttgggagtttagttagtggttcgagccttgattggtctgtaggcgggaattggatcacagtccggtaaagggagtgatataaaaacatagttgaaggcagaggctttttttaatgcttgattataattttcaatggcataatgtaatggatgaagctaaacaatgagctacattatttccatctataattgttcaaattcttcataacaatcattaaaagttttggaaacatttttacatattttagtaaaaatgagtgaacagattaatctttaacataaaaaataaatttaatatttattaagaataaagagcgttaggtgcagtaagcgtaagggaaaaataacctttttcgtattcataactataaatagtgtgttgactaagaatttctttttggaagatgaattcactttagtatgtttgtaaattaaacactgttgagacgatattaaacttgacatgaaacaaatttataaacaacacaaatgatccaaagaataaaaataaaagaaaacttatgttaaaaaaaatcaaaaataaaagattatagtacttttgcattactatatatcaactagattttaacccgccgtataccgcgggacgatttattttttaaaggtaatatatattaaaacttgcaaattttatttttataaaatatttatattttacagtttataattgttattaagtaacgctataccacgaatttatgagacaattgttaaaaaactgaagttttaactcttactaaaatagcatattaataatattttaaaattttataaatattgattcaaatacattccaaaataaaacccgttctgtaatttctttacccgtcccgtgattttttttaaaagtagtaatttttaaaattcaagaattatttattatatataaaaattttgcaaattgtatcattctctaatatatttaaattttatagttaaattttatatatagtaacattatacataccacataacatttttggttttatataaccttttctaaattaggatgatttgatatgtttaatattaatggtcttaaaaataataaattaaagatttaacccgtattgaaacggtggattaattatattttacttttttattaatgttgaatcaaaaacccgtccctccaaatccgtcttgccaaaaagccatttattttattgatattaattttatttatgatatgactctgaattataatctaaaaattttagctaataacataggagtgcaccatatatatttaatagcggaatgtaccatatgacccgaatgcacttttacctaaatccaccaaaaaacaaatatattagttagcttaaattagttaaagaatacaaattgaaaaggtatattacactttattcgaatatagtatcaaaacttatataacacagagatttgataattttttaattgttgaatactttttttcttgtgctaatttttatgtgattaagatttaattgatttcgtatataaaatattaaattgttttacgaacttatttgtttataatttggtaacagataaatatttgaatattcggtatattttgcttcagtttaggaaatctttgatgacccgtctttagatccaataagccctataattaagaaatgaatattttcgttaaatgattttggtaaccttaatgatgttattaaaggattttatttttgattaaatttttctaatgacattgtcatgtaattagttacaaaaattaaggttacattttaaaatgtactttccaaataatatagtaggatatataattatttaaatgattactaaacccaaacttatattaaaataattgatacaaacaaactcctacgtagcagggattaatgacctagttttaaataataatcctttattatgcaattatttcgaatcgtttcaagccatagcactataataaaaaacaaaaaagctcatcttctattggtcattaccaaagtcgctcttgtacaattttcactttcaaaagttttaaatattaaatgttactcacatatgttttttttttttaaatgaaaaaatactgccactacatttaaaacagtgcattaatgttaaactatcatctgcactattaaacatttatctagttaagagtaaatattcaatcaatatgtggaatttatctagataactacatgtgaatatatgattatgatgatccttttggatttcttacattaaacatttgttgcatcaagtgtttttattggttttagcatcatttttaagaagaaaggtctcactaataatacatggaaataatatctgatgttggtaatgtataccaaaaatttatatttagagaaattataagtataaaacttccactaagttatgaagtccccattctccaagctaaggtgttacaagtcgaatctgatattgtataatctagataactagttattttgcaattgtattggcaagaaaatacgtaaaattatttaattatttgaaagaaagaggttgtataatttatctaattaatatttatctagttaaatatacttgcaaataaatttttgttgtttgaaatccaaaatatttaaattttggcggcattgcattcttctctggtcttgaaaggggcaaacatttgagcagactgagctattacggttggtatatctaacatttatacatctaacgaaacatatcaatccaaactaagatatactatgtagaaatccaacaaatgtttagttaaaccttcaaaaacatgtgagagattttgattcttttaaggtatcaagagcaaaaggaggaagagagatattggttgtggtgtcataaataagtttatttgaaataatgtttatctatttatgacttagtataatatcataaataagtttccataacctttgcaatatataatgtttatttgaaatttctgaatttgattttaatattatttttaagttaattacttgtaatatcatattaaagctactatatgtgacacaacaaagattacaaaaataaattttccaaagtattgtcaaataaaatacccacacttcattgcatcccttcattttgaagttttgtattttcaataatttatctatttccaaagaataaaaatgcataaaagttcgatgggaagcttctccctgttctaggtttgcctaatttcgatcaaatttcagtccaatctggtctaaaatcttctgtttcttgatctctatcactttctctcacgcatctaaccactaatttcatctatcctgatgaaatatgaggaggaactttggagatcttttcaacaattgaagattggtgctgaccaaaaagcttgggtggttcatcaagaggcgcagcaacaatttgagaaggaccatagactctgtttggtggttaaagggctcaatcacaaacaccaaaacctagacgctatgaagaacactcttccaaaggcgtggcatcttgagggtaaaattgaaggacaggtgaacgatgatggaactgttaatttctacttcgatactgaacatcatctactcactgtcttagagaatggtccttatacctttaaggggtggatggtagtcatcgatcgtgggcagcgaatggaatccccaacttatcttcgcaaaattccgttttggatcaaaatctttcagcttccgaacgtttatcgacgacatcaaattgttaagagtattggttcgaacttggggcaagtagaagaagttcagattctgcagccaactgctactcgtcctgcacatgtgtggatcaaggtgttgtttgatgtggataattgtatcactctagctcgtaaagtccaaattatgagagttggtgatccaattgagttagaatttcgataccaaggtttggaaaaatttctgcctaaattgtggaagccttaagcatggctcggaggattgtacgcattcgcaaattcaagatagtcatctatcacacataatgcaactttgtgaagatctaggctatagctctgtaccttcggctgggcctagtctcctgcaatctcattcatctacctctaccacagaaattggagaatcatctcgtacgcaacgcacttcgccatcccgtcagctaggccctatgatcacagctcctagccagccaaggatcttacatgacactcctcctcaccaacaagtttctatgaatactgatctgtgtcaactaggagttactcaagatatccctatgattgttgctgaaagaagttctaagaggaaaatctcagacacagattttctagatcagcccactccatcaaaacagaaaaccactcaagctactgctgtggaaggattggtaactacccggcggaaagcacaagaccctgtttctacattggctaaaggggaggtggcaaccccgaagccacccccaccaaaatgaagatactacattggaattgtcaagggcttacgaggaaccccttgacaattccatatatcaaagacatcaggaagtcttctaaacctgatgttatgttcctcactaaaactaaaaaacggttatacatatgttaatagtctgtgtaatgacctcggctttcctcacaattttgggcttccatcagacggtcttagtggaggactggctaatttttggaacaacactgtaaatattgactttgtgcatacaccctccttaaactacacggacatgtacatatccaagcctggtagtccatccttttttctcacctacatctatggagacccaaatcaacgtcatcgcaacgctatgtgggagaaaatgatcttttaggctgatatgggaatgtacagaagcaaaccaaggttagtactcggtgactttaatgatgttaagagtaatgatgaaaagatgggaggtcctaagaggagtgaagcttcgttcaatctgtttagaaggatgctctctgtttctggactacataatattaaaacgatggggggtaaatatacatgggctgggcaacgatattcacatgctatccaaactaggattgatcgtgttgtggcttcagcggactgattagatatataccccaaagcttatgtacagcttttagagtggattggatcagatcatcggcccctcttagtgcacacaggagaccgcaaatggaagggctactctacattcagatatgacaatcgatggagatttaatgatgagctcaaaaaggatatgcagaacacctggctctttgaatgtcagaatttacctggaaataagttccatttagccttgtaaaaatgcagatcttgttgttctaaatggaaaaccagaaatttacaaacacggagagaaagattcatagtctgaagcatcaaatcgagaaagcgtatgaagccaaacctcttgattttgctaagatacaatctttaaaatctgagcttgcttttcattacaggatggaagaggagtattggaaaaccaaaagtagaattctgtggctccgtgctggtgataagaacacaagactcttccatgccaaaaccaagcaaagacggagttataaccgaatcaatgcaatcatggacaattctgggcaaataagaagtaatgaagaagagatacataaggtgattgtcgattactttgagcatctgtataaatctgattcgacagaggctatagatatagtggtcaacaacatcaggccacgagttacttaggaaatgaatgcagctttaatttgtccttttacggaagaggagttatatcaagcgacattcaatatggcaagagacaaagctccaggaccagacggtcttaatcccggcttttatcaagaccattggtctactatccgctcaggtgtgcttaaatttgctcaatctttttttgagacaggcaagattgattctgaaatgaaccatacttacatatgcttgatccagaaaatagatcatcctatggatgtgaaagattatagaccaatcagtttagccaatgtggcttataaaattttatcaaaagctttatctgaaaggcttaagccatggttgaactctattatctctgataatcaatccgcattcattcccgggcggtttattacggacaacattctcattgcccatgagctgattcattcacttcagactaaaaaaaagtgttactccttttgtagctgcaaagttggatattacaaaagcttttgataagctcgagtggcatttctttgaggcagtaatggcgaaaatgggattctcggacacttggcgtaaatggatgatggaatgcatcacaacagtcaaatattctgtactcattaatggtcatcatgttggcaatatttctcctcagagaggcatccgtcaaggtgaccctatatcgtcatacttatatttgatatgtactaaaggtctatctgctttaatccaagcctctattagaaaaaacagttacatggatttaaagctagcaggaatgggccagcaatctcacacttgctttttgcagatgactctttggtgttatgcaaggcaaatgaagaggaatgccactcattgatcaatatccttcagcaatatgagcaagcttcaggtgttctttatagcttcaggtgctgtaaattttcagaaatcagctgttctttttagccaaggaatagattctcaagtgcgcaaacaactcactacaatactgggaatttataaaacggaaggttttggcagatacttaggcttgccagagtttgtaggccgaaataagaccaatgctttctcttttattgctcatagaatggaacaaaagttggataattggtacaataagcttcttccacctgcaagaaaggaagtgcttctcaagtcaatcattactgtcattccaacttacagtatgtcatgcttcctccttcccatgcggcttatttatcagattacaagcgctatacggcggttctggtggtcaagcactaaagataagcataaaattccatggatagcctggacaaaactcaatgagcctaagaagcttggcggtttagcaatcagggatcttaaggacttcaatatagccttgttagcgaaacagggttggaggatcttgcaaaacccgcattcgcttattgcaagaatttttaaagcaaagtacttccctaaacaaagtctcttggaaactgaagccacaaaccactcaagctatgcgtggaagagtatccttcaaggtgctaagcttctttctcatggattaaaatatttagtagggaatggtcacaatattaaagtcttgaaagacaattggttaccattaaatccctctcgcccagctaacggtccaggagcctctgtttatcctaatctgaaagttagtgacttgattacagatggcaattggaatgaagaacgtcttgcccaattaatcaaccctgaagatgttccttatattcgaactatcaggccttcaatcactggagttgaagatgcaatgtcctggctgttcaccaagaatggtaactattctgtcaagttaggttattatctaatccgtcaattatctccacctcaacatgacatatcacctttgaatttagcttctgcaacaaatttgtttaccaatatatggaagcaaaatgcaccaccaaagatcaagaatttttggtggagggcagttcataatgcattacctactgcagataatctgaagaaacgtaaggtgactatagatgatacatgtcagagctgtggagaagcaccagaggatgttaatcatctcctattccagtgtagagttagcagggaagtatggcagcacacacctcttcaatctccttaaggtaacattctaatgctcaactcacttatacaaaatgtggaattactccggaatttgaaccatgatccaagaaaggatgcaagtttgttctcttttattggatggagaatttggaacactacaagaaaattgactttttgtagcgtccgaataacgctatctaactatattatagcgttttaacaagcgctctatcatagcccgtgataataggtcgaagacttaatatagcggattttctttatgctatcgtatttttagttattatagctcatttttgctgcaatattagattttacaacagcacttcaattttgttattaatgatgttattcaaaaccatttgaatttcaattttaaaattttcattatgaatttaaatttttaaatttcgcattttggattttaaaaattaattcatagttaaacagaaaaaataaatcattttattgatataataatttaacataaaaattcaagtggaaaacaaaatacaaagcaagcaagatcgaacttttgcttaggcttttactacattgagataataaaaaaaatcatggttgctacggccacacttcttcttctttgcagttcacagccctccgatgaaagacgagcattacctaacagaatatgttaagttacattaaaacacaaaacattgtaattccattaactttgcaaataaaattaagattctatgttttcaagctaagtcactcctaacaaagcaaattatgattaatagtgacagtaccatgaagtcaaggaggcaatggttaatctagagaagcgaagaagcaaccggaatagaagattttaagaaactgcttatggaaaagtctaaaaccacttgttaaaacactaagaacacacaagtgaagtggcgagatggaatctaacctgagcaaagctgttctatgagatgagatagaatctaaaacctgcacacacaaagttctcattaacacttcgcaaaggggaatcataagtattaaggagaatatgtgacaagtaaggagaatcctaaacacaatgtattattaacttaacacatacatatagttcactaaaatctaagctaggttcacatgaacgaaaggattacgctaccgtaagacacatcatagccatgagtccaagctgttgtcacagttgacatttcccatcttaaaatcaatgaagtacagctacaaatttccacattcctaaagggaaggcatataactatagagagttaggaaattacgctggctttggcttcaacaaaagcaccactctcaaggagtagttttgtaactcgttacttggctatatttcaattggaaataaaagaatctgcacctcaaaaagtcaatctattaaactcattatatgatttaacaataacaataattaaactccaaagtagacaacatgaacatcagaataaaaaactaaacatatatctcaacgaggttcatatattagaagcctaaaacatatatcacagattcaatcactatagctaaatatcggacgatagaattcattgaatgaaggatctaaaacttaacattattaagtaaatctaacatgttcatctctatctcttttttgtgatttccatgagaactaacagagatttccagtaagaaaatacaaactttgaagcaattatcatcagagttcaatctgaaattgaggaaaagaagaagaattaccgagatttgtgccttgagtctgtgatgtgatgagaattgttaaatgtaccattttttttttttttttttttggacaaaatttttccttcaattaaaattacaaaccggccggtacaattgttctaagaacaaactttgcaatctcatcagttgtggcttcaagaaatgaaagaaaagctagagaattgaaatttagaagatagaatcaggatatcatggagaatcccgtggagttccagtggtggatcctccgtgttgatagcttcgatcacttgttttgaatctgaagcgactgaaatctgagaaaaacccaaagttgatgcctggcggagagcttcgtggatggcgagagcttctgctagtaaaggtgaccgtacatgtctcattgttgcagatccaaacctactcatctcgatgttagtgggattgaaaatccatcctagtctggccagtttaagatccttattccacgcagcatcggtgtggcagatcacagtgttaggcgatggtggtcaagcagtatccagaaccttaagcgcgggcttgagttgggggatgtcttgagccgtaagccattcgcgggctagagcgagggctcgggttagggtttctgctgctgaggtatgacgatccttgaagattaggtgattcctagagagccagatcgaccaaatcagccaaggtagcaaaggtcccaatctgatacccgttggtgggagacacacaaattgtttagctttctcgaacaggtctttgagggatgagaagagactagaattgatgttctgtttaaaaggtgctgcgagccagacttccgttgcaaatcgacaggtgaagaagagatgaaaggttgtttcctcctctccgccgaaaggacaactggcttcttcgaggatctgtcgagctcgcaagttttcacccactggtaaggcacctctcattgctttccacatgaagaacttagtctttggtgaggtattgactttccaaatctttgttgtccatttgaaatcaacaacgggcagattagtgatggaaagtgccgctacgtttgctatgctttcatagtagccggagctggctgagtaggaaccatttttcgcagggagccacgcaaaggtgtccttagctccaagtctactaagacggatctccagaatttcattctcaaactctgggagggtttgctgtatttttgttctgtcccaatcaccggtcgatgttgagatgaggtttgacacagtccagttgtgggatatctccgtgggtggtcccattggggtactaggagactctagagagagccatggttcatgccacaacaaagtctgtttgccactgccaataactttacccagtttcttcttaagcagctcttttccaatacaaatacctctccacccgtgagacgacgacgccggtggtgtactttctaaaaaagttgaggtatggcagtacttgcccagtagaagtctagctagaaggcaggttggtttggtgaggattctccaactcagtttcgccaacagcgcctcattgaattgttgtaagtccctgaatcctaatccaccttctcctttagatttagtcaggttttgccaagaaacccaacacatgtttttcttatccatgctagagtcccaccaaaacctcgtcaaggtagattggatgcgcttgtatagtgagcatggcagtttaaaacaagacatagtgtaggcaggcattgctgctaacactgatttcaacatgatcatctttccagctgtggacagaaatttagaagaccagctgcaggctctctgacggattctatccacaataatggtaaataaatccctctttttcctaccaaaaagttcaggcaatcccaggtatttgcccagtcctccctctttttcaattcccaataaaagctttactctatcttttgtttctaggccagtccttgcagaaaaggtaaccgctgacttctgaggattgataaactgacctgaagcttgttcatactgttgtaagatgatcatcaaagtttcacagtcttgagggtctgatttgcaaaagaacatagtatcgtctgcaaataacaggtggttgattctagggcttttctttcccaatttgattcccgtaaaatctcctctaatttgagccttgttgcagagtccggataaaacctcgctacagaggataaaaatgaatggtgatagggggtcaccttggcggagccctctttgaggtgtgactagaccttgagccgttccattaaggaggtaagagtatgataccgttgttatgcattgcataatccatcttatccatattttgtgaaaaccaagtctctccataactagttctatgaagtcccattccactctgtcataagccttgctcatatccgttttaacagccatgaaacaagtttcttttgcctttgagttgtgcagataatgcagggcttcgtgtgtaatcagcacattgtcagctatagcacattgaggaacaaaagcagactggttctctgagattaaaaagtggagaaatggatgtagtcttttggtgagaagcttcgcaatgatcttatagtaaactgagcacaaagcaataggtctgtaatccttcatagattttggacttgaaacttttgggattaatctaacatgagttgcattgatgttccttggtaggttcccagacgagaaaaactcttgtatttccaggatgatttggttacctactgtaatccagtttgtttgaaagaagctagcagagaatccatcgggtcctggtgctttgtccgcatggatggagaaacacgctgcctttatctcttttgcatttggcaatctagtaagttttctgtttgtttcctcagagatgcacggttgtagagcagcttctatgactgattttctttctcatggttttgtagtaaaaatctactgatagtactctgagatgaccttaagtatctgatgttcttcataaaaagtaagacctgcatcatcttcaattacagaaaatttattaaccgccttgcgtcctttagtgctagcatggaaaaaccctgtgtttttatcacccaaagttagccacagttgtctactcctttgtttccaatgttcttcctcagccaagtaagcttttttcagatcttcattgatgttgttaatcaggctttggtcagaggttaggcaggtcatgccattctcaagctttaaccgatattcctcaatctttttctggctatttaagtgcttctcacggctccaggcaataatagcctgtcggcaacggttaattttaagctcaacttcttcaatcaggtctctctgccaattctcttctactagttgggtaacttcttcattatccctgagcctcctatcatatctaaagagccctttccttttcttcttttgcaggtcgaaaaaagtaacaattggtctgtgatctgagccttcaaaaggtaagtacttgcttctacctgaagggtagttgacatcccactcactgtttgacatcgctctatcaagcctgcggaagaccacatgatcatttcttttacctctccaagataagaagttcccagtgtaacggaggtcaaagaggtcacaagtggacatgaaggttcttaggtccacaaaggaaccctcaggacgagcagggcctcctgacttttcagatgagtcaatgatctcattaaaatctcctgtaaggaaccaggattctgatctgttctgtccaagagttgttagttgttcccatatctcctttctcttggatttctcaggttctccatagataaaagtggcaaagaaagaccgaccttccgcttcaatgaaggtatcaatgaagttatggttttctgataaattttgaattgatatctctttgttccagagaagggctaatccaccaccaccatgactatggggtgcgactagcttagattcagtgtagtttaaacattgaagtgcagtgagaacaacctcattttggttttttgtctccgagaggaaaattatatctggggagatggtcctgtgcatctcctttagtcgttgaactatcatgggattccctagaccacaacagttccagctgattatctttaaggaagaggagggggtggatttggaaaatccacctttttcttgactattgcaggtacaattgtgttgagaggaggagctacacttgtagaaggagcttagataatggctcttgcagctggttgctgtcttgcttgtttagctttgatgatttctctagcatcagctgtagatgatcctgcaacgtcagtgccaaggcgtcctttaggtgaggtatgcagacccatcagatgtcttttactagatttcactcctgttatccttagagggcttttattgcctggtctgttggctgccttattcaattggggtcttcctctctttttctttgaggttgggcctgaagcagctgggatctctgctgggtgaactggcagatcctgagatggactcatggaagggggccggtgagctacagaaagatctgggtcagcctgttgacatgccaagctaactgcagagaggatttggtctgcagtttctgtcataaggcctctagcttccccttgtaagactctctgttttctagccatactttcagtggggtctgcacaactagtgtactgcactgtaacttcccgtaattctcccattattgttttctttgtaggcaaagatactggtaaaggtgttgagacttcagtggtcatctctctttcaagtggggggcgtcttgttctagaggtttcagaagactcttgccatgtaagttctcttggtaacggtttctctctccactgtaaatttggattatcgctaatatgattattcctgctgaaagttctgggaggttctcttctgaaagaaggagtgtgtcgagggggagagtgtcgagagattggagatttgaagccatgggatcttgagtcagcttcgtggtttgttctcccatacatgtcctctgtctttctcttataggggttcagcgcctctttgtttctcgaaaaatctgaaaggtgagacgacccattttcctgagataacctgaggccttgattgttagatctgtggccttcctttggtttttgagctgttctctcagggggaacttgatttgtccttttatttgtctcgtcagcttttttaaggccagggcaatcaacttctacatgagataagcggagacaatggtggcaatggcttttcaaatttttgtagtccagactaactacaacttcactaccatcttggaactccactgttgtttcttttgtaagaggttgtaaaccgttgattaagactcttattttagctgcagatggggagatatcatggtccaccactttgcccaccttctctccaatcgcgtagagcatttcttttatccagtagtgcattggtagtccctggagctcaacccagaagggaatttctgaaggaaaggtgggtgaaatgatcggttcccatctctgaagaatgaccatccattggtcaaaatggtaaggtctattgtctaaaaccttttcatactcctcatactcaaatctgaactggaaacatcctcttcctaggtcagatcccgtagctttgcccttgagattccatctgtttaagaggaagggaatgagagaccaaagccgctgactagcagggttagtgagtcttcccatcaaagccagggagttctctctcatcagcgctgagttatccaaggttggagctctgattctcttctttggtggaggtgagaaacttctctcagaaccatgatgcctctcatgatatgatgtttctcgtctcccagactcttttgagagctctttgttgttactgttggagtaagatttctgattgtaggctatgccttttccttttgcagcgtaaggtattcttttatccataactatgttgaggttggtagcacagttaagtgggcaacaaacccagagcttgtttgtgccgaagaagtatacaccaagtcttgaaaaagtagtcaaaaaagttcttcacacaaggtgagagggtttgtcatctttggtggatgagaaaaagagcatgacctaaagtttgaaaaggttcttcacatatagtgagaaagttcgggagattgtacaacaaggttagccattaatgaagacataaatgcacaattccatttgtaccttagggttcatgaaggcatgtggttgagcattaactctggtgtacacttcaggagatgggagagcttgctgaggtcctcaagggcgtctaaatttctcttaagcagcactcctaggtagaaagccgtctaaggttctccccacgtcattgtttggtcaaactccggtcagaaaagcaggggataagcctgagaagagccggagaagtagagccgatgaacaaaactttcatgttttagtaacagaaagtagctgagatctcctttttttgaaaacctgaacttcttttaggacctaggtaaacgtgcctgagagagaaaatttcttgtaaaacttattaaatgatattctattcaattaaatgtaccctagcaagtctgataagtgataagcaagattaactcaaaacaaaattggatctaaaaccgtgtgagccgacggaacgagattgagcatgattgagaagaaccgaagccgccattgacgagttcagaagagaaaacgggaactgagtagtcgcttcaagttgtcagacgattgagagggctttgtagatcgattttgtaactgacgatcgagatctagaggaattgcgactgagcgggattgcgactgagagggattgagacttagaaggctcgagagtgaaagatgagacatacaaattgggatcgtttgtgagagggtttctaatcgagtagagagaagatataacctaaaagtttcagatctaatatccaacccaatctaatttcttttcttttaatctctatttctttattttcttttcttacttagtaaaaaatttggagccaacaaaatttttactttcccggttatctctattataacgttttgaatgtcatatatgctatcataaagccaaaaactaagcgccactacgaaatatttttgcggttaatctaccatagcgtttgttttttcgaaaacgctatataatttttttcaaaacacaattataccagaatcattgaaaacgctatattgtattactattaataccttcatttcctgtagtggaaaatgcggaatgatatcattttcaataataaacgatggtctattcgggacattataaacaaagctctcattgacaagcaacaatggaatgagagtctacggtggagtgacgctaacaaatagcgagattcaattcaaagagaccctaataccacaacacctattacaaccaaaagaggacgtaatgactattattcatcaagcaaaaacttattgttgttttgtggatgcttcatgggtctcttctactgccactgtaggcataggctggatcatgtacactccaaatgcgcaatttgtactttggggaatgtctgcaatacgaccaacgagttcgccgcttgaagcagaagtcgaggccttaaaattagctatgattcatctttgaaggctcggatatgatgaagttctatttccggagatgcagcagagctttatgaacccctccactcagcaatccacgggctgcaacattcacctatattgacatacctccaagaagtacgaaacttggcatcaggatacaagtcttttgacttccttaagatctcacgtaatatcaatcatgtagcggatagaattactaaggatgctagagctaaaaacttaagccttgtaatatcctgaaatgatgtatcttgattccaagttaatgcaaaaggttgacgacaaaaaaaaaaaaaaaaaatttatttccaaaaaataattaaaaacaaaaattaaagaattttttttaatcatatttcttgtttaaaaagcaaaaaaaaaaaaaaattaaaataaatataaaagaaaaatatactagagaatattctttattaaatggaggaagaaattattattaactgatgtagcaacatctacgtcattattattaggcttttaattatgttattctttaaacttgtgttgggctttatttgggttttattacgtcggtttgtgtttgctttggcaacaagctttgactaggatttcttttatgtttcgaccataaccagtctgcttcttaggttcgttagacttggttgttttttttgattaataaagagaaagcttttctcaacttgaagtcattaatacacaaagctaagaactcctagctacaaatagatctttgagaatccattgatatccaaagactctttttgtacttaccgctgcactattaactcacttaaccatggtatgccacatatcatgttattaagaacatgaaaaagtgtatgtgtagatagatttaccttccaaaacccatcactccatcacaagataattttggatttatctatgcattaaattagaaaattataattaaaaaaacaaaagttaactaaaataatatttgcattaaatttatcatccatatttagagagaaaaatagagtgactaaactaaaactcttttttctctcgggtactaacatcgagacgcagtccctaaccacctattcggcaccggtgaagcttatgcttgtcggcatcgggagatctcctcctcttgtccctggtgtgatctaattctgcttttggccgtttttttcaatctacatgtatcttcaaccgcttgcctttgttccacggtgcctcaacccttcgagacagagacaggaagagctctttcttgatcctcttgttgtctgctccgctctcaacctatctgtcaaagtggacaaaagaagcttcttcaaatccgagtgaagcttctacccacccgtcttcgtgcatgacaagagctccacctccccatgcgcatcatttggatcccccatggctcagtcccaagctattggtttgtttctggtggctggaaatccttgaaccgtcagctacgacgattgacaaaaccctaatctcgctggaggctccttctactgggcttggcccacattaccaacaaaagcaccagggcccaatgttgatttattcgttgaccatctttaagaattacggcccaacattaagaatcataaaagcccatctaccaggtttttattaaagcccagattgtatttatgcacaatccaaatggcagcccaaatcccctgactgctcaatccaggcccatctgtatcatttttttggccaggaaattaataaggcatcgtccattcccatctctgcctaggtttgagctgaactctctttcgttcattcttagcaactgtttgtgtcgtgttatatgtataattgattgtggacgtcagttggaacataattcacttatgttgatagtctgatacaaagtttttttgggaaccatgcccttaaaaccgcttaggcacattatccatgaagttaatagattgaagaagaacgacattatcatcccatttctaaggagcggtgattaccgaagcttcttcaatctgtccttaacctttactccgaatcgaatccagctcccacatcaagaatactatctaagattgtcgaggatgcacgacgttgcctccttttgcgcagaactcatatttggccttaagggtctttggcgcaatagctgcttcaccttggagggaatttcagctctgccatcctccttatcgagaattgcttcaagtctttccgttttctccaagtggttcacgccggaaaccattgaaactaaagaacatttttcaaagtcacgaattcttttgatagtgactattgttaagctccccgaattttttgccaaagtgtctttgacacaccatgatttcgcttgtgatatgttgcgcagctcctgtctccgagttcttatggatttatctcctatgtttaatgctctctcaaccttcctagctacccttgatgtaatcttatgcttaatctgctttatgtacccaaccattcagttgatgatctgtactctatatccttctttggtttaatgaatggataagtggttcgacaagcaaaaaacaattagagaaaaaaaagaatataaagatattgtggttttaactataatcatctatactattaattgagaatcattgaaaataaacaaccttatgaagggtaaaagattacatagaattccattgattgttaatttttaaataaattcattaaagataaaatagtaatcacaaaattaatagatttaaattaatattttattagttttccaaaattaaaatcattttctctttcctattaattatggacgaaaaattaaaatttatttcttaaaatttgttaaccaataagatttgaaaaactaggatttgatatccaattatactatatttgttttttctatattattaaactaacattttggaagttaatttttattttaaaagattttaaaatcataaaacttctttgataccattaataaaaaatcataatttgcaatagataaataaatacaattttagaattttgggttaagtattttaaaaaataaaacaaaaattttaaggttgaaatatcacaatttctaaaaaacgagattagatattacaaagatttatagttattatgaattaaactaaaaataactaatttaaattaattatcattatgccgttcatttagaaatatctaaacaataaattgtacataataatttcgaaatattttgggttttcttttttgagtttttctttttttcaaccggatctttctttaaataaatccataatatattattgcacaaactttttgaaataatgtaaactaattatacatttttcattccatatccagcagtaataaattgcttttatacaaaattttaattatattccaaaaatccaattaattatgattaaacaagggaaagaagaatattggaaatgtagctaaggaaataaacattattacatttgttaaaatatttttttttacaaaattatttgttaaaatattttttttacaaaattatttgttaaaatgctattcatatttttgtaaactttaacatcatatatgttaatccgcaaaactcattcatatataacatggtatttaaaggtaagcaaataagaattttgaaacatatttttaatggaatgaaatgaaaatacaaattatgagacacgaacgacatgaaaagagacgaaagcactatataaaataaattgaaaccaaactgaacatcaaattaaatatccaactgagtagtttgggttgtgagctctatataaaataaatttatttacacacataaccatatatgtatatattttgtgacacaaattctatttgtgatggatacgggttggtagtatttttatttcacaaatacagacgggttatgggacgaagaatttatgatagttagatcacattatggatttttgcgttccaagatagttacgcctagcaatgaaataacccaaactaaaaccaaatccatatcctattttacaccggtaatcaaactgttgtaatgttttgattagtttagaaaataaaaacttacaatcactaactttacagttaagttatatcttaatgttatcttactaatataatttctccgtgtgagttcggatcttaaaatgtaactatacacgaacgcaattgaatttcgatcattactgttaactttataatatctatactattacaaagtttactcataacaaaatataatatatttttaaaatctattaaacaatttttatattttgcaagtatatgcgaattcatatctaatacattatattataatatatatcacaaaataacaaaataatctacattaaattaaaaatatgaaatctcgcacgtatgtgcgggtcaagatctagtatattattatttggaaagtattgtaaacaaatgacattagaatgccattaaaaaaatctaatcatagaccaaatttatccacatcattaaagttatgatccacttcttaatctcgcgggtcaagtcatcaaacgggttttcatacattacataaactttaatatcaactaattagataagtgattattgagaaagatttcgtaaacaataatatcaactaattagataagtgattattgagatagttttcataatcaataagattaaatattcagttaaatcttctaactatggaacatatacaaacacaatatttgataactgaatagaaacaaaatctttggcatcaataaccttctatcatcacaaatcttcaagaacaatttaaaatttttctatcaaaattaatatactcagaaaataacatatttaaaacatattattctacaattgtttgttgaattttctaaaaacatatactcaaaaaaacctaatcttagaccatattactctgtaaaacattctaaagagcgtcatttaattcatataatcccctccaaactcataaaagtttataaacaatgataaattaattcatctcattaaagataaacaagtcaaatactaatttatgcaatttaattaattgtaacggtgtcaaaagaatataaactgttcattctataaagaaaaaattgtaacgggtcaacactttaggctttagtaatatatttcttttaaacaaaaattttgactgagtaacgggtcataatttgaatatttatattcaatttcatgctttttttttgaaatgtaaaattttatatacttcaataaactttttcaatatttagtttggaatattttaagatagttttacttgatatttttaaagaatatcatcaacacttaataaatcaaaatttaaaaatttttaaaaactctaatttgcttctttttaaaaaacttatatatttaaaatatttataatagatggcgggttaaatataatgttttatgatgaaatgagttatgatctttataagtatttgaatatttatatttttttattttctacaattctttttttgaaattcataattttatatattataataaactttttaaatactatagtttgaaacattttaaaatagtttgatttaatatttcgaaagaatatcaaaaaatttaagagtgaattaggtgaataaccatatttgcaaaagttattaaataactagcactataacatacataattcagtaactaacacatgtgggatatgtaattacaacctactccttatggcaacggaagtgactccggcgacggtggtggctccggcagcgtggttgctccggcgacggtggttgctccggtgacaatggaagctccggtgacaatggaaaccctgacaatggggtggtggctccggtgacgatggttgctccggcgacgttggtttctccggcgacggtggtggctccggcgacggtggtggctccggtgacggtggtttctccggcggacgatgattgctccggtgacaatggaaaccccgacaatggggtggtggctccggtgatggcatttgttccggtaagggtggtagctccggcgacggtggtggtggtgatgatggcggcgacggcggtggtagtggtgatgacgacagcggcggtggttgtggtggagatggttgtgatggtaagaaacaagggtataatgacaaatattgtagaaaatatatcgaatatcatccactttttttcttttggttagttagtgaattattaaatttttgtaggttattgatgcaaatttcccaaaatttaatagatcaaaaagctaaaattatagttactctaatttgatatttttacatctatatttaaaatatttatagcatatggtgggttatatgtaatatctttttaataaacggcatgttaagattatatgaggagataggttgaataaggtttgacgcctctaaatatttaaaaataacaaatgatggattgtgtaaacaataatttttagaaaaatgtttgatccctctaaatattttaaaatttgattctgcaagcaattttaaaaataacgaatgatggattgtgcaagcaactttttaattgcgattataaaaatgaaaatataaacttcagtcacatatagaactttttttttttgtcaacggattttatttagagttcaaaagagccaattgtgagggaaattgtttacaaaagtgacatgaagcggttcagtacgaattttttgtgccaatttgtccgcctttacatttgcagttcgagaaattaaagataaagaaaattttgtgaattcctctttatcggtttttaattcctccaaataagttgaaaacgctggtcattcggttggagaagacaccatcttcaccatgtctgaacagtctgtaaaaaatgctacttcttggttgtcggcaccaatcatacacttcatcgcccaaagtagagcttcgacttctgtatggagtggagaaagacttctacgaagattagcagctcccatggctggcgagtctccatttgatgatgtgcaaaaccaccataatcaagaaaacttatagcttccttttcaagatccgtccacaaaacaacgcaaaccagaataaatattatcgtgtgatatattctggacccaaatttgtttttccgatcccatggaaccgttattttcggaactgagctcaaattgagctaactaccatgattgtgcctctttttctgctaaacataatacgtctaacggatctttatccacattttcaaatattttttcgttccttgctttccaaatataccagattatccatagaaatgaagatgaatcaaattctgaaggtattcttgaaaataagtgatccaaattcgtaaaaataaaatccgtaggaaaaattcctggaactgtagaaatctttgagagagctcatatctgtctagccggatgacattggaacagagaatggtttattgtttccgtaatagcgccacatctgacacatcctgtatcacaatttatacctcttctccgtaaattctccgtgacagggacacaacctgacaatgtttgccacaaaaaatgtcgtaacttaggtggacattgcactttcaagcatgtgcttttagaacgtttatttcaggaccaatgaaagatgaattatcctccaatttttctaaccttgctgtatgataaccagatttaactgtatattttccggattttgtgaaatgccaacctagagtatcctcttttgttgacgtacccaagtgcaatgcacttattagctggacatcttccggatcaaagagctcattcaaaagatcaatattccaaaaatttgaccggctatctattaaatgttggacttttaaagatgggtcaataattgaaccattacttattgctggtctcaggaattgagccggaatccacggatcctcccaaactgagatagatgcccctgaaccaactcttttaataagtcctttattaaccagagatctagctgaacaaagacttctccatccataagacggagagtataattttatattttccaaagaattggattttcgataatatctccctttgaaaacctttgcaaaaagagaatctgtaaccgttatcaaacgccataactgtttcgatagtatagctgaattaaaatcatctatactccgaaaacctaaaccaccttccaatttgctaatacacaatttattccaagccatctagtgcatacctctaaattcaccattcgaattccacgaaagtcacatatagaatttgatattattatataccaaaaatatgttcataatacatgctaataattgctaaactatgtaattagctccaaaaaatctctatttcaaactaactacctaagtagtacggttcatgatctggttagttgtagttaattaagcacttatttctatttatgtttatatcaaccgtaattaagcacttatagttacagttgtagttaatttttaaaaaacataataacttatcgaggggtaaaattgtaaaacgaccaaaaaacaaaccctaccctaatcttcttcttcctgcgccgtatcccaaaaaaaacacagaagaaagaaaaaaaattcgaacttttctgaaccaaatcattccaagcctttgccgcttaatcctcgcaatccgatttctagggtttagaaattagattttgggtttggatctcttaatcatgccgaggcagaataaagatgaaaaatttgtttttgatgacggagaagacgaagacagagaagatccagtagccattacagaagtcgacaacggcgaagaagaagatgatgatgaagctaatgaagatctaagcttgaagattttagagaaagcattatcgaggcgtgatgttgggaacaagcttgattctgatctctcctccgattctggtgtagttagtactgtgatggttaatggagtaaagtctaaggttaaaaagtctgagagtagtaagaagatgaagagaaataagcttgaagctgaccatgaaattgtaagtatgaacgattctcttctatatcttcttctcattacagtttcaattattgtcgtattaattgctttatagatttgagaatcagtagtctttgatttgcaataggaaagattgatttgagaatcagtagtgtttaatgcttatcggtttttgtataacagcctattgtttggaatgaccaagatgaagagaaagtggtggaggagatagtaaaaggtgaaggagaggatgatgaggttgagagatctgatgaaccaaaaactgaagaaacagctagcaatttggttctgaaaaagcttcttgtgagttgattgaattgttgctcttatctcaaaattgtgtaacttgtttgtgatgatgaccattgttggggtcttgttgttgttgttgttagcgtggagcaagatactttgaccctcctgatgctggttgggtgagttgttatagttgtggggagcaaggtcatacaagtttcaattgtccaactcctactaagcgtagaaagccttgctttatatgtgggagtttggaacatggtgcaaagcagtgttcaaaggtgcggttttaagtttgatggtagacccatggaaggtttaggactagtcttattttactgcatatggttgctgagtaaagttttcgttgttttgacagggacatgattgttatatatgcaaaaaaactggacatcgagctaaagattgtccggataagtacaaaaacgggtctaaaggagctgtatgtttaagatgtggagactttggacatgacatgattttgtgcaagtatgagtactctaaggaagatttgaaggtaactttgctgatgatttctttcatataccttactgttttgtttttaaaaatttagtcaaaacaaactctgtttaaacgaaaaggaactgatcatgaccatgtttggatttatcattttttttcctgagtttccttaacttgaggagatatatcttctacacacagctggtttcacctttcttgagtttctggttgctttgctataagatagatcatatggtaatgctattttgctgtattttctttgaccaggatgtacaatgctatatctgtaaaagctttggccatctatgctgtgttgaacctggtaattcactgtcatgggctgtatcttgctacagatgtggtcaactgggtcatagtggactggtaagttattgagattctgattttgaattatccacactgtggattgagttttcctctctaaacagaatgtcattttagttaaaataaatatgcctaaaatgattctgccactccagactcaagtaattttctctctaggcatgtggtagacactatgaagaaagcaacgaaaatgattctgccactccagaaaggctttttaacagtagggaagccagtgaatgctataggtgtggggaagaagggcatttcgcacgtgaatgtccgaattcgtcgagcataagcacttcacatggcagagagtcacaaactttatgctacagatgtaatggatcaggacatttcgctcgtgaatgccccaattcctcccaggtaggctctatctctctctacatttggtgctttgaggtcttcacttctttcctttctctcacatgttatgactcacagcgtttccgtttttcttcatataggtttctaagagagaccgtgaaacatctacaacatcacataaatctcgcaagaaaaacaaagagaactcagaacacgattctactccccatgagtccaatggaaagacaaagaagaagaagaagaagaaaacacataaagaagaacagccccagacttcaccaaggaaacgaaaacacagaggcggttggatcacagaggaaccggaagaagaatctttccaaagaggaaagatgagaaggccaaagtctcccattacaccatcgggttataacaggtcaccctctacacatattggtcataactatagatcgccaaaattcaattctggtgggcattacccgggttctcagtctagtaggcatcactcgggtccttcaccttcaaggtggcagccttctcatcagcatcatcatcatcatcagcatcttcatcatcatcatcagaatcacagttatgaacctgcaccaccaaggcatggaagagctaaccgctatagtgagtttgcagggaactatgaacggtggtagtatcaattatatgatgatcaatgatcaaggtcaaagctggagactatctagcatgaaatctattatgcttgatggtgtgtttcctgggatcaaaggtagcttccctagacctcttgtatttgatttgggctttggtgcagcttcttgttgttttgttctcttctcttacacaagtagtttgttcagtcctcatttacccaagtcacttagattttccttcgttatgtttgtttaacttattatgaagagaattttgtatttgttatcaaggatcattactattatcatttatataaactgattctttattcatctgaaagtggctgattttttcttactcgaaatttatctactttataaattggcaaaatcccaagtcatatcatcaacaccagaaacagagtgttttcaaagaaataaacagagcaaaagagaagatactcctgcacagcgattaatctccaagtttaagaaaacagtaggaaacaaattaccttctttcatgtattgtttgttgtttactcataggtttgagttgtcgtgtaacttccactccaaatagctttcaatgatatctagaccgcatagctccttcacaaccggcattgtagctggaactggcaactgaaacgctgaaccggaggaaccattctcacctttccacatacatagctgtttgcgtgcttctttaacagcctgtctggtagcgcagtgcaccgaagctgccagtagcaacggaggctctcccgaggctgcacttacacaaacaatatgatcaaaaatgttgattgcatatgttttgcgtaggaatgagtgactgacctttagaagagagtacgcgtttttcatgacatccaccatttagtatctcgacattgaactgtttaggaatggtgtcaactgttggaatcttgtatgtccatgtgctatccgtcagaaggagtccttctggatcttctatgtactcttcaagcatgaaaaacccaagtccttgaacaaaagatccttcaatctgaagcagaaacacacaaaacacattacaaaaaagattcatttgctttctgaggtctctcttcatatatattacctgtcctaaatcgacagcgggattgagactttttccacagtcatataagatatctgtctgtagaactgtggtttgtcccgtcacaaggtctacttcaacctattaacaccatgaaaacaccaaagttacttcatttctccactccaatttcagatttttgagaaaggaaaaaagagcttgcctcgctgaccgcagtaccatagttcaggtactgcatgggagtgtcttttggagtatacaagtcactagctgataagttcacggattgtgcataagcctgagtttggacattaaaatcttgaatcagaatgaagaagctcaatctttaattcgttgacaccaacaataagcagcaaatcaaggaagaatacctgagaaatcaactcattccaggtgattggaccatctgatctttccattaaaggtttcaatctttcgactaaggtttcgcagcagagacgaacagctgcgcagcttccctcggatgttgtgctacctcctgtgaaatttccttggaccatgctcaatgaatctgattgtataactcttatcttctccaagagttcttccgttccatcgcattgtagcataccaagagcataactagtcatctgcttcacctttgtccataacccttgtcctagctcgattccaccaatctcaacaacaatcgtcccatcgctcaaaacacttactctccctggagtagcaaacaataaaacctcatagataataggtactcgagatatccctcgttttctccacatgttagactcgttgaactctctgacaacagaaaccctctcctcaaacttggaagatacgccaaccttatcccacatcgaagataaagtatactcatgtggttcaccagcaccatccttgtagaacagggctaagctctcatgtgtatggagattaatctttcttattgtatcaacctccaaagagaggctagaggctatattttcgatgatggcttcagcaatatacgtaccctgcacgtcccccggggatctcatgattgctctgcttagaagatttgttttacaaagtttgatatcaaaagataaggcgccccaattgtacttctttagcgaccctatgagatttgatggaataaacatactaaaaccataacttgccccagcatcaattagtatttctagctccaaagctgtgatcttccctgtagatttgaaccccacactatacgttatcttcatcggatgcctcccaccagtcattatcatatcggtcttgcggttgacataagttctcacaggacgctgcagtttcttagcagcaagagcgcacgctgttgcaacctgagacagtagaaagctttcaggtttcggtccatttcttgcagaaagtgaggggaaaaagaggacaatttttgaaaacttactggcattgacttgacagatttccctccaaaacctccaccaacacgtctggttatgacacggatgttattttcagggatgcctaggcaagcagcgaccgatgactgtacgtactgaggggtctgtgttgaactatagactacaatgcagttgtcttcatctcccactgcaagagctgtttgtgtctccatgtagaagacgtattgcgatccgagtcttatctgtttcacatcaaaagttacaacggttgaacatatatatctaatttttacagtaaaaaaggactatattacatacttccgagctgagaatttggtgatcagcttcagccattccttttgatgtatcaccaacttgttgtggataaaggaaagggataatgtcaaacagactagatttcttgaccgcgtcttctacagataagattggtggttccaaatcctctgtctcgtattcaacaactgcaaggtttactgcagcatccgcatgtctctgcgtatcagcaacctgcaaaaacaaagtgttgctaaaaatgctgctgatggaactgattctcatggacaaatatgattgaacttaccacgaaggcgatgcattcgcctacactagtggtgaaatcctctgcgaacaattggtcggagcctaatccaatcttcataccaatattctttccgcctttaggaacatccttgcgagaaatgactgcaacaactccagtaggtaccaaatcgtccttgaagtgaataccttttatcctagcgaatggctttttgctatagataaatgctccatagagacagtttgtgggagatggaatatcgtccacataaacagcctcaccagaagcctgaagggaagctccaactttagtaacaggctgaccaactggattatattcattgtttataggaacattttgtgaagaagacaacattggcaacggttttggtggatccaagtggtaaccatttgaaggtttatctgtagtaggatgggtcattaaggtgtgaaggaacttgaaaaggaagccaggcgccaagcttgacctgtaagcaggattgcttgtaccgtcttcaggcaccacaacattgccaagtaaggtaatagcctcatacagaactttgtcagtgattactttaccagacaggaactcttcgatttccttacacctaatggcgtgtttggtcccgtaagccccgaaagccaatctacagttaactaccattgtatccttcacttcagccaagaaagcagcattcaggtaagccagagcgcttccatgtggacgaggtgcagctctataggtttcaaagaacaattcagagtttgtttcagaatgccaaaaaggaatttcaatactcagaaccagatcatgagcctcaagaggagaacgttcaaggaactcttcaagtgttagcttttcgagtcctcttgatgagctcattatgttaacaaatgcaccagctgcaagaagtattgtagccatatcagaaggaaactgtttcctctgagccatcacaaggtttccaccaatgctaccaaagttcctgataaatctcgccgctatcatttccatatgagtagcaagttttccaaatatcttctccactcccggtgagaccctaatctccttcagagcagcaataactttagagattgttaccactgatcctatctcaaccccattctggttttctctgatctctttaaggtgcgggattcgagttatatctatgtatttgtcgtaattctgctctctttcatctttatagtatcccatacttgtgttaccagcaaccaatttcatagaaactgtattactattagccttgcaagcttccaataagctcgagagttcctcaacactcgctgggctgcaccatcggtacattccagaatccacagacttaatctcatccttgagaaactctggaaatgtacaaatacgcttctcactatcaaaccgagttaaactactagaatctttatcccctttcctacaaaaagagtttaatccaagatcctcaatgtcaacatccgaagcaaagctcttacaagcatcaacaatcggacggtaaccagtacaccgacataagtttcctgagacagccttctctgcttccacaaccgtaaggtcggaatattgagacttgtcagcatctaaaagagcagagaagagagaaacagacattccaggtgtacagaaaccacattgagaggcatggaaaccggataaccgcttgtgaatcgggtggaaaccgtctctgctgttcccaagtccttctgatgtcgtaatattgcagtggttgacgctgcagaggagtgtaagacaagagctcacagtgaaatcttcgactttttgtaagacaggatcgaacttggagagaagaacaacacaagcaccacatcctcctgaaccaaaacaaacacaataatatcagacaaagaaccataaagagtaagaagaaaggataaaaaacaaagcaatcaccttcaccgcagctgagcttgacactcttgaaagaagtctgataacgaagaaactccaacaaagttgttgaagggtcaacagaggagagctcaagctcgaacctttgtccattaatggcgaaaaccaagctcattatctctctttttctctttctctctatctgtgtctgtaagagtgtaacgtatccgaaatattccttgtccacatagaaagacctcgatgagatcttgaagccagagtgaatatcgctttcaccactaaatcgggacttttgacttgttaactaatacattttgtgtacacttctctgcctctaaatggtaaaaaagatctgcccacaaaaatataatataataacatgtctagttgcaaaaagaagactattttaataagagagtgatagaggaaaaggatcaataaagacagctcaattatttgtgtgaaaactgtaccgcaataatatatggaagtgaaacatataacacaaaaatatacaacacacacataagagtatatcatataatgacttctaaggaataagagagaagatgttagagtcatgaaggatatctgaataataaaggttgaagttgaggtagtcccagaagcgagagagcccatatttcccatgttttggtgatctcaggtgacacttatgcagctcctttaactctttgtcaaaattctgcttcaccatcatcacctgttttatgtgattataaaacttagctctcgcaacaaactgaaaacacccacgtaaaaaggatttggtatatacctgagatgtgtttatgcctaatgtttttgtccatgaatcgtttgggactcgatctgtactctgaatacctctgggaagacaagaccggaagtccagtgcgcattgcaagatgttctctatgatgttagatatgatttgggtttcgtcagataggaagcatctgctagtgtttgataaaggacggttagattatatcatgtctttcattatatcattagatcaggtcactcaaattacagtgacacaaaagggtcagaagaaattttttgctttgcaactgaattatgacttacatgcgcaaagcctcacttagataagccatatgcacagattcaagatccatcatatccttgacctgaaaagccaggggaaacaatttaaagaagaaactaggcactttggttttagagtagccaagcaatgacgttcaaccagtaccaacaataagctagagcaacagaagttcgcttgagatgctcatactcaaaaattatacaaagattcccacttttcggtaaaataacatttcagcagaccatcatagaggcatgttttattttgaccaaataaactgtaagtgcaaggtgtgcccagaccttatttttcagggaatgaaggaacttggaccatgatacgtgagacaattctgaatgtacatattgctgtagtgctgttacaaaatggttgacctgatgcctggcacacagaagaaagacgtcaaagatagccaggggaacacagagactccaaaatctgaaaactacattgtgtatcagacaagtacagtgatgaaaaaaacaatacaaatgttctaaagacatataacattttcacagatagtgcatggattggattgatatcaataattttttgttactctcataaatggtcatgccagaagaaatatgatcactgtacctaatcatgcagtcacaatgcctaatagatacttagctcaacgagtcaccaggaaattatgaaagtgttaaacctttgtttttaaatttaccttagtttcatcaatatgtttaaccaccggagttcttgcttcaatatcttctctttcttctcatgcatcatatgtcttacatcctaaaagaacagtgcagtcattgtgccattaacccagaagataaatagtgccacgagaaatatcaggtagaccatcaaaaacaattttcaaataacattttccacaacgaattcagaaaattgcagataaatttaatgttagaggggctttgccacaaggagtgaatcaacaaagttgaacctttaccttcagtgaacaccagacatcagttaatacgtaggctgctagtttcacttgaaccaggaaactaaatacatcagcatacgctgtcagggcatcgcatgttaaaattatactgattggccaatccactcgataacccaaccttaggaaatcaaaggaacgcactcctacaaatttccacacatcagtataagatttaacattcaccacgcacagtagtaattaatttgctaagtgcaagaccataccaatggttgatggtgggatatgcattgtgccttgtcttttgtacaaaaatatcctgtccttacaaatgtctcgttcacatgatgatctctgaattgatgattctagaaacccttgaatttctgcaattctcttatctgcctctgtaacaagccatttctgagaatccaaatgagagaaaatatatataagcatcatctaaagatgttaaatagagtcatcacgatataatagattgatagcaaacttacatgatgccaaagtgacactacaaatacatctgcccagtctgctagttccatgaaatgatatctacgtagagctagcagatgttcttgcaagccaaatccttcttcgagcaacttgatagctagcttactgacaaagttatatctattgtctgttaaggaaaaagtgatattgatatgttatcacgagaaaaacattctagacagaaaatgacagccaactgacaaattattaacctaaatatgtatatttctagcaaatggaagtatcgagaaggatactgaagatgtatttcctgcagtagacacttgtctataacaaaatcaagtggcaattcaaatgtgccagaggagtcctgtctgcgatcactaaaggcactagtttcagggttatttgatctacgaagcatactctcccatctacctccaccaaatgcatttgattttttttcttctgcgcaaccttttataccagaagataactgactggaagaaactttaggatcttcaacatcaaacctttcttggttggcatggcgatgactctttctatcagtctgaggactgtgagattctttctgaaaatcaatagggactcgtacaggtatcctggtaatacatgtttttgaagggtcatccaccgcggaaaaatcaaaccaaggcaatgatttcccctggttcctcttgtttgtgttaccatgcttgcgcaagaaatcacatctcactaagggattcatactgaggacatcattagggtagtttacctttgtgtctttcatcaaatctaatttcgatgaaagacagttttccagcacatcatgtcttctctcgtgctttgaacagctgccactggtggaaatgttgtttaaaaatagttttctttcatcagtattcattaagtgcctctgttccatcctagctcctgaataatttcttggatcttcgctgtcatcgtctgcagacttcttatcaacacaaaatggatttctaggtaatccgccaaggggccatgacttaatcaaaagagggcccctaaatttatcatcttcacatactccagttgactcttctggcttagtatccacccactgatgattaatatctgccttctcaccttgcctcacaagattattgtctatataacctgaatcactatgctgaaccagattctgattacaattcccattagaggcaacagagaaacgtagagctgataaataatttggtggaggtcccactaatgtactttgtgaatcaaggagtccaacctcggatgcttccaaagaatccctagtcgatgaacattcagatgagcatgatgcatctatctctgaaaaccatctgtcttctgtattctgatcatcagaatcagagccactctggtccctgaaatctcaagaaaatgtcgtcaattcacgttcatcaggctaggggtaatcgataaatagaatcaggaagaacacctggtcaagtctattgccattgttgaaggaattagtaaactctcatccagtgtgaaataaatggaatttttgtctccgtcgccataggagattggtaaagatattgctccaggaacctaagaattaaaatgtcaacataagacagaactgaaaagaaataacttcctgttagctccaagtacaaccaaaaaaagaatcacttttaaggtccctatatttttcacttgcaccatcagctcacagttaagaaaaccagagaatgagacgcttctacaatgctgaatggtctgatatgaatgagacgcttctacaatgctgaatggtctgatatgaatgagtccttaatttacctaagacaaacttgatttcacaacagagtaaaaccacctatggcctataagacgagtaaagtaaggactagcatagcaacgagagagtacatgcagacacgtataccaaaaagactccagcttcagcaaaaaaataataagcacaatacctgcccagggaacacttcaaacttttctgaaaagtcaccaagtttttcttgcatcattctgtagtaatcgtctcttttctttatcatcacttctatatgtaatttgctgaaagttattggagatgggtaccctggactagtggtagaaaaataggtccaacacggaagaagatctgtgtaatttttgtgtccagacgcaggaagattacacagttccagaagttttgtaattacttgaagctgttgaccagcccttactataggttccaagaagccgtttaagaaacacggaacaagccctcctcgctcctaggggcagaatatgaagcaatttgatacccatggtttaaagataccaaagtcaaagatgcagtaaacgcaaataaaatattacccttacgctcttcaatggggagatgccaggcttattccaagaaaaagatgttgactcactgcgacattccacaatgaactccttgtgaggatcgttaagttcggctttaaacatccaagatcttataaactcacaatatggctcacatgttttgaggaacaaaaacttcagcatagcactgtgagtaggatcagcaacctacaacagaatatgtcgggaaaatagtcagaccaaatcaagtgtatattacttactttaagcataactcctggttcagaaaagtagcttaagcgagtgtgaatttcagactcgccaggttatgtatattacttacgttaagcataacttgcaactataatcaccatataaagtggtccacattagaaagtgcatagaacaatttaaatgccatgaccgatattctttcaaatctctataaaatatgtaaatccagcagttactgatatacagaattcagagagtagagagtacagagatgcaaaatttaatgaagtaaaaccgaagaatgggaaacaactaaaaccgaaggtgcctctaggctacattaaacgataactatgcgcctcatgaaagagaaaaaggacgaatactaaatgaggaacataacttaacctgacctgtagttgtgaatataagtaagtaagaaggtcacttcctctgtagaacccatgaaatcgcgtggttgcttcagtaatgagacattcccaaggagaggcacagtaagaaagggctatatcatacaaatcacatatgtttgccagagcttcaatctgtgttcttaactctctagtatgcagaaaaacttccaataatgttatctttggatgaacgacgtttgtaaggctgcctaaccgagaagaaccatggtcagacccatcaacaatgtttgatgaacgcctcagttctatcgatgcacataatgtatcaagcccagatatatagccttctaggaccctcctcacagcaatagcaaaagcctgattaacaagagtatagcagcttttgttattgacttcttcattttcaccaattttacagctcccctgtccctcaacagctgattccacatccaaattcaatcttgtgaaatggtcaacgaacttatggagaagaaataccaaagaaccgaagcagcctatatctctaagaatctgtcccaacgcatcagtgcttgacaaccgatgccacaagctcggaattttgtggaaggtcctgtcagctggctcagaacaaaatgcagaagagagctgttctatactaataagagaagactcaactccttgcagagcattcagcgccaacctgaccaagctcgattcctatcacaaacaacaagatgtaagaaatgagaagtaggttcaattacaaaacatttttctctaaataacgcagaactagactatgaaaggactatctacatatctcatctaagcactaaagacagtacatcattctcaacaaaccctagattgagccctaatcaaactcaatcaataaaataactcactgcaattgaagtttcccaaatccccaattagggtatccgatctaagccacacagaaacagatacattcacacaaaagcaaaatgcaagttcgaaacttacagagacaaaggaagaagatgaagaagaagaagcagaagaacgagttggaggaagaaatcggccgctttgagacggtaaagattcccaatttcgcggaggaaggtatggctcctccactttaagcgaaacgagactcgtcgccagcaccggcattattactactgccttgactggaatggttttagcggaaaagggtttcgtcgagttgcttctcggatcccagaaaggagagatctttcgtcattcccacaagccaaaaagctgagaatggtgatgatgagctttactcacacagagagatcactggaggaggaaaaaaaaaaggtaaggatgtttgaaaagagagtgtaattcatgaagatatggtccaatgggcctaactaatcattagagataagccattaaggcccactatgttcatataatatttttcataatcttttgacagaaagagtaatttttggttttttgagaaacggtttaaaaacagtcatttctaccctaattattttcatcgtgattattatggaaccatgtgttacaaagtgtatataaatcttctaataaattattttcatgattgcttatatttttggtttggttgagttcaactaatatcacaattccaattttttttttggtgcaaagaataaatcaaaacaagtattaagaaaaagtgattcaaagatcataaagttaataacagaattaaaataggcattctccaaaaccaaaacatgatagataaagtaagacgacatataagctatgagagctttaaaacacaagctaagaagctttattgcatatgcgagatcacggttagtcacacaattttccacgagtgaatcgatggataaaaaaatatggtcattgtcaagagacgaggtgatgtatcggaaaggagatgagtagtgacgggtcgagaatcggatggggttgggatagaaagctgagaaagcttcggtaaccctcgctccatggagacggttcataatgccgtttttcctcgagctttcaaaatcatgactaacaatcttaatgttgttgaatcgcaatgaattgatttcagtaatcggagaaaaggataaggagagattgaagagacttcggtaaccaccgctccttcgagacgagatcataatgtcattcttcttcaatcttttactagcgcgagatgactatttagagatattatcaaaaagttagaaaacttctttgaaatcctgagaaatatgatataggaaatgagcatcaaaagagagggctacttggaggacaaagattggtcgaagctggtgagacgcgtggcagaataacattggttgaagctggagaaagttgttatgaagattcttttaaacgcagtctctgctgctattcatcattatgctaaaatttgagtttgttatcttcttcttcttcaattctctctataaactctttagggtttgatatttcattgttgatagagctgtttctacttctaagctctaccacatgagatttggattctcgttttatgaacgatgattcaattgctgtaacttgtacgattgaatttgagtgagatatagttttacagtatcaaatgtatcagagccatctctttcctcagaatcgatgggcgtggaaacacgtgcaccggtaactacggcggacgatacagtcagaacttgtaatccatcactgagtatggctcctcatgatcggtcatcatcaatggtgttaggatcaccagaatcacaatcggggtgttcagatccaaaccatgatgtcagatctgactctcaataccattacaggcgtttaagaaggttgggtaaggttgattttccacggtttaatggtgatggcattaaggattggttgtttcagattgaacaatttttcttaattgatcatactccagaggaattaaaagttgatatagcttcaattcattttgatgacattgatgcgacttggcaccaatcaattgtacaatcaattatgtggagacatgttaggcatgattggtggaattataaactcttgttgcaagtgagatataataagcatgtggatgattcgattgcaaaactgaagctgttgcaggagactgaaggaattgaggtgtatcatgctcgtttcgaatcgatttgcactagagtgaagttagatgaagatttcttggttagtctgtatttgacaggacttaaaactgatactcaagtgaatattaggatgtttcaacctcagacgattcaacaatgtttcaacctcagacgattcaacaatgtttcttgattgggaaattgtatgagcgagcacatccacttaagagagatagtgagttgaaggcagaggaggataaaaaagtggtagaaattgtgattaaaactgaggttgacacaacatcagaatgagcgtgatcaacagacacgagaatgatgatgatcaaacatcggaagttgggaaaactgattcgtcgaatcatgtagaatctatccagcaactggagtggagagaatgtgcagagaagatggagacagagaagatggattcagttcttgaatcgcattgtgttcaacatacgagcttgatttcacaacatcaggttccaatctcatccttgtaacatggccttaatttttgtaaaccaactttggatgttattgaggattatgggattgggaggagatatcaagctcagtcacattctaattttggaggcgtcaatgcaaatgcctgcctagtgttcgatacaattttactgagaagacaagggttatcaaagggacataagaatatatttcccaagacttggagattcaaattcaaagggaggcaaagtttattaaaggttccacatgttggtgttgaaaatgtcaatcatgcaaaggacgcacatcaaatatttgataatatgccttgcaatggtgtcagaataaagaacaagcaatggtgtccacgttttcagaaggtggcgagtgtaaaggcagattggctagaagacacatggttcattagtaataacctaaaggatattcaaggcgtaaattttgttgcgggtacgctacacttcaatagaagtctctttcgaagcacccgaatccagcgaaggaagaaaatggggttgtctcttaaatcatggatgtataaatataaaagggagcactaaaaactactcaaacctactttttcaagagctgtgagaatggttgaagttggagagtggtttaaaaatgggaacatgtatatgagattgtttgtacagatcagacatgcatcacaagctcttttaagaagatacgacttgtaaaggaagatgtaaacactgatgtgtcccaaatcctggaaatttaagtttaagaacagggacttgagaacttctaaagggtctcttctcctcttaaacaaaaccggagctagatcccatacctttttagcaaaagggcagagaagaagcaaatgtagggaggtctctggacgaccacaccttttacagttcaaatctgcaataatatttctccttgctagagcctcgcccaaaggcaaagcgcttttcattgctttccacaggaaatgtttcacttttggcgaagtatggagcctccaaatgtttgtctgccagttaaagtccaagcgtgagtccggaagtgagtttagcttggctagcgcataacttgtcttggtggtattgtcctgacttcacaggtaaccagaccatataatccttcaaaggcaagacgttgatggtaattttccgaatttgatcctcatattgaggtaaatgttttcttatagctgttatatcccacatcttcaaatcatgacaaataaggtcagaaaccaaaagggccttattgtccaacgttggtggtccgatgggcaaaaatgggattagaggtgagagccaagcgtcagaccagacattgatattatccccttgaccagcagaccatcctaacccttttcttaacaattccttgcctgctaaaatgcccctccaaccatgagaagcagaggaaggagttaaaaaggatgaagagttacagtttttcccaagtagaacccgagagagaaatgagtttggttccttgagaattctccaactgagcttagctaaaagtgcatcattaaactcttcaatttctctgaaaacgagaccccctgcatttttagggagtgtaagtttgtcccaagacacccacgccatcttcttctcatcttgttttgtatcccaccaaaacctcgtgagaaccgattgaatctgcttacacaacgatgcagataatttaaaacatgtcatagcatcagatggcatggcagatagcacaactttaagcagaaactgtttcccagcacttgatagaaatttggagctccaactatgtgagcgttgtcgaattctatcaactatcgacgagaagatgtttctcttccttctacttaaatgttccggcagtcccaagtatttccctatgcctccttcattatcaataagtagagtgagctttactctgcgcttaatatcctggggcgttttagaggagaaggtgatggctgacttggccaaattaatgctctgacccgaagccaattcatacttcttgagaatgttactgagagcaccacaacatgtgggatttgttttacaaaaaaacattgtatcatccgcaaatagaagatgatttacttggggacttccacgggcaacccggattcctaccataacccctttttcttgagctttgcgacacaaccccgagagaacctacgtacacagaatgaaaagatacggagagaggggatcaccttgacgcaaaccccgcaaaggtattacacagccgtgaggcgagccattgataaagaataaatatgagactgtataaacgcactgcatcacccatcctatccatttatcatgaaaaccaagccgcttaagcacctcttgaagaaaattctactctatgcgatcatacgctttactcatatccgtcttgattgccattgaacaatgtttctttgcacccgagattcttagaaattgcagtatttcatgcgtaatcaacatgttatctacaatagccctccccggaacaaacgctgattgatgagacgagatcaaatcagcaagccaaggttgtagccgcctagtaagtattttagcaacaatcttgtattgaacattacaaagtgcaataggtttatagtccgctactttcctaggtgctgaaatcttggggatgagagtaacatgggtttcattaactcgggtcgataaaccattatcctcaaaaaaagaccggatgtcccgggaaatgtcttcaccaataatatccccgtaagcctgatagaatgcagccaaaaaaccatcaggtctgggtgccttgtctgcgctaatagagaaaagagcctcttttatctcttgcagcgaaggtagcttgatcaaatcctcattacaatgagtggagataaccgggagcaagacctcattaaccacttgtagatcagtgttgttacttgaggtaaaaatattttggaaatagttcgatatagtggctgcaatctgttcttcctcatgaaactcctgaccctctccatcttcaatgacagagagtttgttcatcattcttctacttttggtaatagcgtggaagtacacagtgtatttagccattgaacccaacttctctgcttccagaataattcttcaagtttataagattcctctaactctttagtaatagacgcaatgagagaattatctggaatatgtgctgataaagcagactctaaagcctgttgagctgtttttatcgtctttgcactattggagttttgctccttagtcaattgaataatactttgacgacaccgactgatcttgtgaagaacagagtcttggcgagaaagatcccatgcttcttttacaagtaattgaatctcctctttttcttttaaacgcgtatcaaatcgaaatggtttttttttcttctatggtggtgcaccaaagtatgttactaatggccggtgatcagagccctctaatcttagatactcacatctactttgagggaacaattccgaccaggaacaatgacctaaggccctatccaatcgggatttgatgaagtgagaatatcttgtgcctctccaagaaaaagggttccatgaatgtttaatatcccacagaccattctgtgatacaaagctcctgaaaacaaggaaagagccctcccaacgtaaaggtcccccttgcttctctgagttatcaagaatgtcgttaaaatcccctgtaagaagccaagcagaagttctctgagctcccagcgatgaaattttctcccaaaacacagaacggttctccacttgcggagcaccataaacagggttctcatggttattcaaccataataacacaggtacctcatggtcgagttgatgtcctcgatcgagtggtatcgatgaatgtctttgtaattggctaaagatggacaaagaaaagttgagatcagacctgggctttggcaaaaaaaaaatttggatcaccttttaaaacattgggccttcgacactttaatgggccaacaccaaaaaagtccaccagttgtaaccctagggtccctttgggtgaaagcggagggtcatgaaggcgggggtattgtacggcgattacaagagattttgcggtggagcattcatctctggtgaaaataggatcgacggttggaggttttgttcgggacataaggcagaggaagagaaccataggaacttggttgttccggtaactgaaatcgtgtaccaatgaaatagctcgttgtgtctcgtagcttggggagagatttctaatcgggtagacgagatcttagaatgatactttgatggttccaacagagatgacttccacaaaggtgttgcatattgagggtaaaagatagagatcatcggacaccattcttttcctaaattgatacttgaagttttcactagaagttagcggattaaaaggacttgagacaatttcaaaagggaaaaaaaataactaacaaagaaagagaagcacaactacaaaggagacaaagagaaaaatgagcaaaggaaatggagggcttccgacgccaatgagcaaaagctccactgatgtcggaaacatgatagaaaagaagtcctcgatattagttttgggattattttttatcctgcttttataattccacgttttagtaaaatgactactttttgaattatgtttgaaaaagtaactattttcaacttattagtttaaattaaatgacgagattctaaccaattctataagaacaacttatatgataaaatatgtgtatatgtttatatatatgaaatagtctaaccaatttttaatacaaagtaaatatataaattagtaattattactatatgtttagagcacgtaagcgaatacgtatgcatgcatatatatgaagaatcattgcacgtagatgtgaatgtgtgagtttaacaagtgatgataatgatattggtgtggaaatcaaactacgctcgtccctctttctattatttatttcttagtgctttttcaatttagcaatccatttttttattaaaattaaataatcttttacttttttcttttacgaaaacagattcaaatctgacatctatctaaatagaaccgaaccaaatatttataaaagttgaactggtaataaattaacttttttacctaaattatctgaatcaaaaaattcgaaccaaatctaatccgaaatcaaatacccatgcctaatccctcctattatacggaacttataaatagtaaattaaaatacatcataaatcgtcatactaaattatcaaaatcgtatcggttactgtggtattatattattctatttattttttatttttcttaaaacattttaatttattagaaattatgtctataaaatagaaaacttaaaaatgaaatagtggataatcatataaaattattttattttattttttttgtctacaacgatactattttttcctactaaaagttgcctttcattcattcatgccactgtgatattataaaaagtgtatcagtggactaaccacttacaaagctttgaggcaaacataacaacaagttgatacttagaagtaaaactaaaacattaaacaagaaacatgaaacagaacaaagttaaggatatgtcagaaccaaaaaacatatccaactacttgaagctgcgaacctagattccctgcagtcttcaacaaaaaatggcagaagtcttgttagagtgtacatctcttcttgggaagtttcagaatctctcccattcttgaagcactgttttgacgagtctgaagtctaggatcctctgcttctcgtcttacttcttgtctttttgaggattgacctacttcaaagactgttattaccatgattaggaaggtctgctcttgttggagtggtactagaacccgatgaccattgttgtcttgcagtactagattctccaacatgtaaagtatgagtatctctaactgatgcatagtatggatacgcagctctcaattcttcaggattcagctgtggttgagcaattcgaggaggcggtgtcacaggagcaggaaacgaagtctccgtcatctgcgattgagagttcaggcttgacctatgaacactgtctctgaaggcagctctttctctggctatgctgtgaggacgtggtctatagggacaataagctctgttgtgcgtaaacctgaagcagctgctacagattcttctgaggcgttcgtattgaaatctgatggttaccacttctcccgaattaaagatgattcgttggaagaatctgagcctgtctgtgatgccaaaacgcactcttactcggatataagtaatttgagtagatgtcgcgtcatggtggtccagcatgatgacttctcctaagtctcgagctatatctagagccgtctcttcacacacatagggaaggggaattcctctaatctgcacccaaagatcaatagaagtaacaaagttaagagcaggagccggttcccatctttgagtagccacgaaccagttgttgaatagccatggttctcttctttgttctgactgcaagtcaatttcattttggaagagaaattgaacataagttgcatcaagaattcttccatggacatgcaccgtcagtccccagcaccgaggtaaggctgcaatcaccgcgtttaagttttggactcttgggttgagaggtcttgcaattatactcagtcgattgaactcttcaacatacacataagcttcatggggaatgaagagggctggatcctcaggacctagattcagatcttgaatttcatcccacaattcgtctgccgtggaggtaagattgtaaaagagaaaaagtacaaggaagacagagaactaaagaagaaaaggactaacacacatatatatatatatatagactctaaccttaatgaaaaaaaattaggaaaataaataaaagaaaatattaaaaaaactaaacccgacgaaaatatgtgttagtcctaaacttactaaacctttgactgaagaaaacaatcattagaaaaggacaaaaactaatccacctccacacctaacactctatttgattaacaactcatgagttaactgagcaacgaaatcccacagttgacacctccgactgacttgataatctggattaaaccacctgtaaccaaaacaaacttcgattgatgactgtcacattcttcctggctgagtcatttctgaagcaaagagatctcctagccaatagggaaaaccccgtgaaacataagactgccatctgtgcccagtaataacactcttagcaatctcataagctcctgtattacacaattttggttccaaagccataaaccagccacttttcttttgcgataacttcaaaagctgagttgtatggcctaataatgctggccattcctctagtttgtagagagctttaataatatcatgtgttgaggctccaaaggtgactctgtcaaaatgatgttgtgctatgcttgtaagagcccattcccaacttctaatctttgcatccaacatagaatgaacatgagaataagatctcctactatgaagtaacatctttcccatagcatctctcactacccaagaggcaccagaaacttgaaaacgattagaccaggccactcctatattgcatttaagctcattctatggaggaggactccatttcaactttgactttgagttcttgatacaaacaccttgttgagctgaacaccattgattacaatccacataagctttgtctacaatgctttgagtcacaaaattaactccctcaaatagaatcttatttctatgtttccataagacccagattatccaaggactagcataactcacattactagaactactcaacttctgacaatagttcaaaacatgatccatattagtaaagattgaagacccaaaacctttttcaggggattgcagaagagacatcgcccaaacttgtcttgccaatggacattggaacaaaatgtggttaattgtttcattctcctcattacacattaagcatccatccactgccttgataccacgagttcttagtctgtcttccactgccacagctccttttaggactttccacaagaaaaccttaattttaggcacagtatggagactccatatactgcaaaaaagagggtttaatgaagggttcgctgcagcttcttgaaaaatctctggatgagcttgtcgactaatcacatcatatcctgatttaaccgtgtaaatgccattattattgccagaccagcaataagaatcattttgatttaccatcggtctttgtttcagcataatcagaatatccgaccatggaaataactgactcataagattcagattccagtttcctgaaatggggtcaatgaggtgactcactttcatgctaatatccatcaaagagtgaatgctcgaaggtcttctattttgaccatcaaaaagccacttatcaacccaaacactggtttgtttgccattgccaataatctttttcaatcccttctgcaataaatcacgaccatacaaaatactctgccaagcatacgaaggacgtgttcctttagaggcattaaggaaatcagtattgaggaaatacctgcttttaaagatcttggacataagactatcttcattcttaaagattctccatgcttgtttggccaataaagcttgattaaagcactaaaggtctttaaaaccaaaacctcctagagacttgggcaatattaatttttgagccccaatccaatgaatcttcttcgtattttgcattgtattccaccaaaagtcaatcatagcaccagttaactttgtgcatagagatttaggtagcttaaagcaggtcattgcatacacagggagagccatcgcaatagacttcaacagaacctctttaccaccctgggataaagttttagcgtaccaaccagtgagtctgtcttgtaatttttcctttaagaactcaaataaaaccttcttcgaaccccttaagcattccggtagccccaaatacttcccataaccaccttccaattggattcctgatctgtttttaatccattcttttgtatcatcgtcaattttggctccaaaggtgatagctgacttttccaagttaatcacttgtcctgagatatgtccatactctcataaacaatgcataagctcttcacattcattctttgtagctttacaaattatcaaagtatcttcagcaaacaataaatgattgattgaagtacccgcctcattaaaccgaattcttgtcactttcccatctctttctgcttgatttagaatatgcaccaaagcttccgtacacaaaacaaaaagaaaaggggataaaggatccccttgtcttatacctctttcaggaaacagtttaccaaaagcttgaccatttatcaaaacagaataagagactgaagtcacacaatattccttgtaaaaaaggtcattcaaccctatcagatgccttggacatgtctgttttgaaagctaaaaactctttggaaatcttatcattagttctcaaattatgaactatctcatgagcaatgagtatgttgtcagaagctaacctctcagcgacaaaggcagattgggttggggagactaactctggtaaatgcttcttcagacgagcagatagtatttttgacactatcttgtataaaaccgaacacaagctgatcggtctaatgtttgccattcttcttggggttgaaatttttggaatcaaacataaatgggtgtgattccattgatccggcatgattcccgtttgaaagaaacccaagatgtcctcaattatttgcttctttactaaagaccaatgagactgaaagaatagagcagtgaaaccatcaggacctggtgcactctctgcatttatagagaaaaccgcattgtaaatctcctcctctgagacatctttagtaaggtcattattcattgcgaaagtgactcttgattggaatccatttaagattgattgcatattagcaggataggacgaagtaaagagatctttgaaaaaacttaaagcaatgttgcctttctctctagctacagtatgttcattcccttcttcatcaactaaaaaacttagtgagttcttaactctattagccttgacagaagcttggaaaaatttagaattcttatcccctccatctagccatttgtctctactctttaacctccagaaagatttctcttcataaaaggcagcacttaaaagatcttgtaacactgagactttaggccaagaaggaaactgaacacttttttcctcatccaactctttcctcaaacactttattctgttctgtgcattgaaattattcccctttttccatttaccaatagctttcctgcattcaactaatcccagcatagacgatgagacttctgaagaaacaatctcattcacagaagtacgaatagcttctgcacatttaggatcatccgcaaatcttttatcaaaacgaaactgaccccggaagacttcctgatcattcacaaactttacaaaaacaggcctatgatctgaacccattttttcaagaaaccattgatgtgaatttggaaacacagaaaaccaagccgaatttccaaagcctctatctaatttacactgaatccattgatcattacgagttcctccccaagtgtaactgttccctgaacttcctaattcatgcatatcacaccagctaagcatatctttgaatggttgaaaagaagaagacagtctagaagggcctcctaacttatcttgattagatgtgatatcattaaaatcacctatcatacaccaagctgatttcctgaattcaccaatagagcataacttgtccaaaagcagatatctgagacttgccattggattcccatacacacaagaaacaaaccagctttgagatcccttagtcacttttaaatccaaaagattcttgtcttcatacaaaaactcaatttctaagttatttttccaaaaaagagcgagatctccactttttccttctggttctattgtatgaaaataatcatacccaagccaagtaaagattttcataacaaaaggatcagaattcatggtctccatgaggaaaaaaatatcaggaaaatgatctttcttcatttcctttaagtatcgaattgtccaaggattcctcagtccttggcaattccagctaaggacgccttattgatactgcgacagttcacaaggaacaaccgtagagtccacacccttattatcttgagaattcccagaaccaacaacttgatttcttcttttagcctctgtatcaccttggaagttttaagtcttctcgactgagtgacttctttctcaatgtgtaaactttcctttttatcgggtttttctgcctaatacttagccctgacgaacttgcttcctctaaagtagtctgagaatcagatgataattccatgtccaaaaatccagacagagcttcagattcttggatcttcttgaggttagctttgaaaggaaaaggacctctctgtatctcctgagataactcagtcaaaggaacaggaaaggctggataagtagaattatcctgagcatccttctctttctgaaagttaatcaaatccatattttcagtactttcaaagggagccatagagggagactgaagagatagagtcttgggtctagactctgaacctaattctcctttctttaaacttgcatctctaataatcttctcaaaattagatttatttctttgctgagaaaacggacaatcacctttctcatgagtcagacgttggcaaagaaaacacctcttcctgattctttcataatcaaaagtaaccgagacaacctcaccggtaggaatcagaacctctttacaattgcgcaaaggatttcgaacatcaaacagcacctgaactctgacataatcctgagcttgagacttttctgagtctaattccacttttaaaaccttaccaacacaagacgcaatctccttaatcgtatcagatgtgtaatagttgacaggaatattacgcaatcgaatccaaacaggaagaaacattagatagtcctcttttggtttctccacccatcgatccattatcacacaccattcatcccgagtccaaactccagtttttaaaatttcaagtaaatcatcctctgatttaaaaagaaattgaaatctttcttgtgaaagagctctaattattattattacacctcgaacccttgagtaaagtctcaaaattctcataaaattattattattttctctaaaattaaatactcataccaaatttctcaataaatagaactcaaccttggcgtgtgttctccacacttcactgatattctccactttcattttcagtctttctcatttaacaaaacaaagcaaaaccaaactatttaagtttaaccatggaatctcacaacaccttgaacctagacatggagaaagatcaagaaaaggcttttgactactccaaacgagctcaatggctaagagccgctgtgcttggtgccaacgacggtcttgtctcgacggcttcacttatgatgggtgttggtgcggtcaagcaaaacgtcaagatcatgatcttaactggttttgccggtttagtggccggagcttgtagcatggcgattggagagtttgtctctgtttactctcaatatgacatagaggtagctcagatgaagagagagaccggaggagagattgagaaagagaagcttccaagtccaacacaagcggctgcagcatctgcgttagcgttttctcttggggcgatggtgccgttattggcggcagcgtttgtgaaagagtataaagtgaggattggtgcaatagtggcagcggttacgttggcgttggtgatgtttggatggttaggggcggttttggggaaagcaccagtggttaagtcgtcgcttagggttttggttggaggatggttagctatggccattacgtatggttttacaaaactcattgggtcacatagtcatatgtatgtgtgagttttactgaccaaactcactcttcttcatgtttcgatgtttcatgcttcaagtctataaactgaagaaaaatattgtctagtacgaattccatataaaatttacaaatataatttactgaattctcatgaatacattttatatattttaaatttatttcaacaaaaaacatattattatttcaaacttttatgagactgtatgtttattttaactcatcaactttatcgcaagaagttaaacctacctactatgcttttagtttctacactactcaacctctaattaattttaacattacttaatcaatgggactttgaattgagcacaactagtcaaatcaattttgggtaaaatacaactttttcttgtgcgcactacaaagttcttcatgtgttatttttgtacattaataatggtgtaacaacacctataaatttgtatactccaattttttaaaaaaatttcaatgttatgagtctttgttaaatcaagtaatgaattaattgaaggaatgtcgagaagctagtgaccgttccagatttgaaattaaacacatagatgttcagaaaaatcaaaattaaaacaagcacattaactagacattatttataaccaggttaggaaaatagcagatcgtttgtgtcctaagaaaacatggtaagatatgataagaaaacaagtattctaagaaattaatttaatatgataagaaaataagtattctaaaaaaataatatgataagaaaacatgtattctaagaaacaaatttaattagtctaattgtctaaaatatcatttctagatttttgtaactcttaagttcacttaactacttgactcattttctcaggtgactcactgcaatgaatcactaacacgtggagactgcaagaaactcatacatgtgccatagacctataggtatgttttgcgtaaggtatatatgttcttcaagtgaatacattgctacagaaagttatgatactttttctccataggcttaatcatttggtctttttgaaacatactcatattcaggattcatctaataagaaaccaatcagcaaaaagtacatcaaccaaaaagttgtaatactacaagaaaacattgaagaaacagagtgtctgaagttctacaggcgtgtatgaaacaacgcagagcagaacagaggaacagaggaagcggaaaagtagcagttgcttttgcgagcgtggcatgttgattggagtgaaggaaaggcgtatcactttagacaaaggagacgaatgcgtcagacataggacgtgtgcctagtgtcaagataatgatgaggagctacacttgaacctgctggataaagtggagcatcctgtcttttccgagaaactacataagagaagttttggtctcttattagggttagccactttacttgagaaaagtggaagagaagaaaagttaagtagaacttgttcttgtgggtttcattggtgagtgaacaaagagagcacatggctgttgctgtgtttgtgagctgggtagtttttaggttctgacagtagcaaatcaggttgttgatgttgcataatactgtccaaacttatctgtgattgatcagtttgaaagttgttctaataaagtgtgtttattggagttgtgttctttatcttgtcaaagtacttagggttcttttacttcaattggtatcagagcgggtaaccaatctgagattagtatatctgaacaggttagatcctagttgtggaaccaacggatgttagtactggtacatgcaaggtattactgctagatactaagcggtatggatactggaaagttcgtatgacacaaatcattagaggacaaggtgaagatgcttggactgctgtagaggaaggttgggaacctccgttcgatctaacagaagatgggttcaaaatcactaaaccgaaggcgaacaggacaacagaagagaaacttcaatcaaagtttaatgcaagggctatgaatgctattttcaatggtgttgatgaagacgagtttaagcttattcaagggtgcaagtcagcgaaacaagcatgggatacgttacagaaatctcatgagggaacttcgagtgtaaagagaacaagactggatcacattgctactcagtttgagtacctcaagatggaatcagatgaaacaattgtgaagtttagttcaaagataagtgctcttgcgaatgaggctgaggttttgggaaagacctacaaagatcaaaaattggttaagaaactgttacggtgtctaccaccgaagtttgctgcccacaaagcagttatgagggttgcagggaatactgataaaatatcatttgttgatcttgtgggaatgctcaagtcagaagaaatggaagctgatcaggacaaagtcaaaccatcgaagaatattgcatttaatgatggaatggcattgctagctaggaattttgggaaagctctgaaatgtgtagaaagaggtcagaatcgtgacagtacaccctggagcaataaagatggagagagatcacgtggaagattctccagatctaagaatgatgactcaggaaagaagaaggaaattcaatgctatgagtgtggtggttttggtcacattaaaccggaatgtccagtcaccaagagagaagaaatgaaatgtcttgaatacaaaggtgtgggtcacactaagtttgagtgtcctaacaagagcaaacttaaagagaaatctcttataagtttcagtgattcagagtctaatgatgaaggtgaagagctgttaaacttcgtggcgtaaggacaagctgaagttggtaaaggaaaagctaaccctagaagcgaaacttgctaatgtgagcacagcggataagcagaaactgagtggaatcactgttgatgggaattc

SEQ ID NO: 1347 - DNA, 83442 bp, Arabidopsis thaliana
gaattcctctaatctgcacccaaagatcaatagaagtaacaaagttaagagcaggagccggttcccatctttgagtagccacgaaccagttgttgaatagccatggttctcttctttgttctgactgcaagtcaatttcattttggaagagaaattgaacataagttgcatcaagaattcttccatggacatgcaccgtcagtccccagcaccgaggtaaggctgcaatcaccgcgtttaagttttggactcttgggttgagaggtcttgcaattatactcagtcgattgaactcttcaacatacacataagcttcatggggaatgaagagggctggatcctcaggacctagattcagatcttgaatttcatcccacaattcgtctgccgtggaggtaagattgtaaaagagaaaaagtacaaggaagacagagaactaaagaagaaaaggactaacacacatatatatatatatatagactctaaccttaatgaaaaaaaattaggaaaataaataaaagaaaatattaaaaaaactaaacccgacgaaaatatgtgttagtcctaaacttactaaacctttgactgaagaaaacaatcattagaaaaggacaaaaactaatccacctccacacctaacactctatttgattaacaactcatgagttaactgagcaacgaaatcccacagttgacacctccgactgacttgataatctggattaaaccacctgtaaccaaaacaaacttcgattgatgactgtcacattcttcctggctgagtcatttctgaagcaaagagatctcctagccaatagggaaaaccccgtgaaacataagactgccatctgtgcccagtaataacactcttagcaatctcataagctcctgtattacacaattttggttccaaagccataaaccagccacttttcttttgcgataacttcaaaagctgagttgtatggcctaataatgctggccattcctctagtttgtagagagctttaataatatcatgtgttgaggctccaaaggtgactctgtcaaaatgatgttgtgctatgcttgtaagagcccattcccaacttctaatctttgcatccaacatagaatgaacatgagaataagatctcctactatgaagtaacatctttcccatagcatctctcactacccaagaggcaccagaaacttgaaaacgattagaccaggccactcctatattgcatttaagctcattctatggaggaggactccatttcaactttgactttgagttcttgatacaaacaccttgttgagctgaacaccattgattacaatccacataagctttgtctacaatgctttgagtcacaaaattaactccctcaaatagaatcttatttctatgtttccataagacccagattatccaaggactagcataactcacattactagaactactcaacttctgacaatagttcaaaacatgatccatattagtaaagattgaagacccaaaacctttttcaggggattgcagaagagacatcgcccaaacttgtcttgccaatggacattggaacaaaatgtggttaattgtttcattctcctcattacacattaagcatccatccactgccttgataccacgagttcttagtctgtcttccactgccacagctccttttaggactttccacaagaaaaccttaattttaggcacagtatggagactccatatactgcaaaaaagagggtttaatgaagggttcgctgcagcttcttgaaaaatctctggatgagcttgtcgactaatcacatcatatcctgatttaaccgtgtaaatgccattattattgccagaccagcaataagaatcattttgatttaccatcggtctttgtttcagcataatcagaatatccgaccatggaaataactgactcataagattcagattccagtttcctgaaatggggtcaatgaggtgactcactttcatgctaatatccatcaaagagtgaatgctcgaaggtcttctattttgaccatcaaaaagccacttatcaacccaaacactggtttgtttgccattgccaataatctttttcaatcccttctgcaataaatcacgaccatacaaaatactctgccaagcatacgaaggacgtgttcctttagaggcattaaggaaatcagtattgaggaaatacctgcttttaaagatcttggacataagactatcttcattcttaaagattctccatgcttgtttggccaataaagcttgattaaagcactaaaggtctttaaaaccaaaacctcctagagacttgggcaatattaatttttgagccccaatccaatgaatcttcttcgtattttgcattgtattccaccaaaagtcaatcatagcaccagttaactttgtgcatagagatttaggtagcttaaagcaggtcattgcatacacagggagagccatcgcaatagacttcaacagaacctctttaccaccctgggataaagttttagcgtaccaaccagtgagtctgtcttgtaatttttcctttaagaactcaaataaaaccttcttcgaaccccttaagcattccggtagccccaaatacttcccataaccaccttccaattggattcctgatctgtttttaatccattcttttgtatcatcgtcaattttggctccaaaggtgatagctgacttttccaagttaatcacttgtcctgagatatgtccatactctcataaacaatgcataagctcttcacattcattctttgtagctttacaaattatcaaagtatcttcagcaaacaataaatgattgattgaagtacccgcctcattaaaccgaattcttgtcactttcccatctctttctgcttgatttagaatatgcaccaaagcttccgtacacaaaacaaaaagaaaaggggataaaggatccccttgtcttatacctctttcaggaaacagtttaccaaaagcttgaccatttatcaaaacagaataagagactgaagtcacacaatattccttgtaaaaaaggtcattcaaccctatcagatgccttggacatgtctgttttgaaagctaaaaactctttggaaatcttatcattagttctcaaattatgaactatctcatgagcaatgagtatgttgtcagaagctaacctctcagcgacaaaggcagattgggttggggagactaactctggtaaatgcttcttcagacgagcagatagtatttttgacactatcttgtataaaaccgaacacaagctgatcggtctaatgtttgccattcttcttggggttgaaatttttggaatcaaacataaatgggtgtgattccattgatccggcatgattcccgtttgaaagaaacccaagatgtcctcaattatttgcttctttactaaagaccaatgagactgaaagaatagagcagtgaaaccatcaggacctggtgcactctctgcatttatagagaaaaccgcattgtaaatctcctcctctgagacatctttagtaaggtcattattcattgcgaaagtgactcttgattggaatccatttaagattgattgcatattagcaggataggacgaagtaaagagatctttgaaaaaacttaaagcaatgttgcctttctctctagctacagtatgttcattcccttcttcatcaactaaaaaacttagtgagttcttaactctattagccttgacagaagcttggaaaaatttagaattcttatcccctccatctagccatttgtctctactctttaacctccagaaagatttctcttcataaaaggcagcacttaaaagatcttgtaacactgagactttaggccaagaaggaaactgaacacttttttcctcatccaactctttcctcaaacactttattctgttctgtgcattgaaattattcccctttttccatttaccaatagctttcctgcattcaactaatcccagcatagacgatgagacttctgaagaaacaatctcattcacagaagtacgaatagcttctgcacatttaggatcatccgcaaatcttttatcaaaacgaaactgaccccggaagacttcctgatcattcacaaactttacaaaaacaggcctatgatctgaacccattttttcaagaaaccattgatgtgaatttggaaacacagaaaaccaagccgaatttccaaagcctctatctaatttacactgaatccattgatcattacgagttcctccccaagtgtaactgttccctgaacttcctaattcatgcatatcacaccagctaagcatatctttgaatggttgaaaagaagaagacagtctagaagggcctcctaacttatcttgattagatgtgatatcattaaaatcacctatcatacaccaagctgatttcctgaattcaccaatagagcataacttgtccaaaagcagatatctgagacttgccattggattcccatacacacaagaaacaaaccagctttgagatcccttagtcacttttaaatccaaaagattcttgtcttcatacaaaaactcaatttctaagttatttttccaaaaaagagcgagatctccactttttccttctggttctattgtatgaaaataatcatacccaagccaagtaaagattttcataacaaaaggatcagaattcatggtctccatgaggaaaaaaatatcaggaaaatgatctttcttcatttcctttaagtatcgaattgtccaaggattcctcagtccttggcaattccagctaaggacgccttattgatactgcgacagttcacaaggaacaaccgtagagtccacacccttattatcttgagaattcccagaaccaacaacttgatttcttcttttagcctctgtatcaccttggaagttttaagtcttctcgactgagtgacttctttctcaatgtgtaaactttcctttttatcgggtttttctgcctaatacttagccctgacgaacttgcttcctctaaagtagtctgagaatcagatgataattccatgtccaaaaatccagacagagcttcagattcttggatcttcttgaggttagctttgaaaggaaaaggacctctctgtatctcctgagataactcagtcaaaggaacaggaaaggctggataagtagaattatcctgagcatccttctctttctgaaagttaatcaaatccatattttcagtactttcaaagggagccatagagggagactgaagagatagagtcttgggtctagactctgaacctaattctcctttctttaaacttgcatctctaataatcttctcaaaattagatttatttctttgctgagaaaacggacaatcacctttctcatgagtcagacgttggcaaagaaaacacctcttcctgattctttcataatcaaaagtaaccgagacaacctcaccggtaggaatcagaacctctttacaattgcgcaaaggatttcgaacatcaaacagcacctgaactctgacataatcctgagcttgagacttttctgagtctaattccacttttaaaaccttaccaacacaagacgcaatctccttaatcgtatcagatgtgtaatagttgacaggaatattacgcaatcgaatccaaacaggaagaaacattagatagtcctcttttggtttctccacccatcgatccattatcacacaccattcatcccgagtccaaactccagtttttaaaatttcaagtaaatcatcctctgatttaaaaagaaattgaaatctttcttgtgaaagagctctaattattattattacacctcgaacccttgagtaaagtctcaaaattctcataaaattattattattttctctaaaattaaatactcataccaaatttctcaataaatagaactcaaccttggcgtgtgttctccacacttcactgatattctccactttcattttcagtctttctcatttaacaaaacaaagcaaaaccaaactatttaagtttaaccatggaatctcacaacaccttgaacctagacatggagaaagatcaagaaaaggcttttgactactccaaacgagctcaatggctaagagccgctgtgcttggtgccaacgacggtcttgtctcgacggcttcacttatgatgggtgttggtgcggtcaagcaaaacgtcaagatcatgatcttaactggttttgccggtttagtggccggagcttgtagcatggcgattggagagtttgtctctgtttactctcaatatgacatagaggtagctcagatgaagagagagaccggaggagagattgagaaagagaagcttccaagtccaacacaagcggctgcagcatctgcgttagcgttttctcttggggcgatggtgccgttattggcggcagcgtttgtgaaagagtataaagtgaggattggtgcaatagtggcagcggttacgttggcgttggtgatgtttggatggttaggggcggttttggggaaagcaccagtggttaagtcgtcgcttagggttttggttggaggatggttagctatggccattacgtatggttttacaaaactcattgggtcacatagtcatatgtatgtgtgagttttactgaccaaactcactcttcttcatgtttcgatgtttcatgcttcaagtctataaactgaagaaaaatattgtctagtacgaattccatataaaatttacaaatataatttactgaattctcatgaatacattttatatattttaaatttatttcaacaaaaaacatattattatttcaaacttttatgagactgtatgtttattttaactcatcaactttatcgcaagaagttaaacctacctactatgcttttagtttctacactactcaacctctaattaattttaacattacttaatcaatgggactttgaattgagcacaactagtcaaatcaattttgggtaaaatacaactttttcttgtgcgcactacaaagttcttcatgtgttatttttgtacattaataatggtgtaacaacacctataaatttgtatactccaattttttaaaaaaatttcaatgttatgagtctttgttaaatcaagtaatgaattaattgaaggaatgtcgagaagctagtgaccgttccagatttgaaattaaacacatagatgttcagaaaaatcaaaattaaaacaagcacattaactagacattatttataaccaggttaggaaaatagcagatcgtttgtgtcctaagaaaacatggtaagatatgataagaaaacaagtattctaagaaattaatttaatatgataagaaaataagtattctaaaaaaataatatgataagaaaacatgtattctaagaaacaaatttaattagtctaattgtctaaaatatcatttctagatttttgtaactcttaagttcacttaactacttgactcattttctcaggtgactcactgcaatgaatcactaacacgtggagactgcaagaaactcatacatgtgccatagacctataggtatgttttgcgtaaggtatatatgttcttcaagtgaatacattgctacagaaagttatgatactttttctccataggcttaatcatttggtctttttgaaacatactcatattcaggattcatctaataagaaaccaatcagcaaaaagtacatcaaccaaaaagttgtaatactacaagaaaacattgaagaaacagagtgtctgaagttctacaggcgtgtatgaaacaacgcagagcagaacagaggaacagaggaagcggaaaagtagcagttgcttttgcgagcgtggcatgttgattggagtgaaggaaaggcgtatcactttagacaaaggagacgaatgcgtcagacataggacgtgtgcctagtgtcaagataatgatgaggagctacacttgaacctgctggataaagtggagcatcctgtcttttccgagaaactacataagagaagttttggtctcttattagggttagccactttacttgagaaaagtggaagagaagaaaagttaagtagaacttgttcttgtgggtttcattggtgagtgaacaaagagagcacatggctgttgctgtgtttgtgagctgggtagtttttaggttctgacagtagcaaatcaggttgttgatgttgcataatactgtccaaacttatctgtgattgatcagtttgaaagttgttctaataaagtgtgtttattggagttgtgttctttatcttgtcaaagtacttagggttcttttacttcaattggtatcagagcgggtaaccaatctgagattagtatatctgaacaggttagatcctagttgtggaaccaacggatgttagtactggtacatgcaaggtattactgctagatactaagcggtatggatactggaaagttcgtatgacacaaatcattagaggacaaggtgaagatgcttggactgctgtagaggaaggttgggaacctccgttcgatctaacagaagatgggttcaaaatcactaaaccgaaggcgaacaggacaacagaagagaaacttcaatcaaagtttaatgcaagggctatgaatgctattttcaatggtgttgatgaagacgagtttaagcttattcaagggtgcaagtcagcgaaacaagcatgggatacgttacagaaatctcatgagggaacttcgagtgtaaagagaacaagactggatcacattgctactcagtttgagtacctcaagatggaatcagatgaaacaattgtgaagtttagttcaaagataagtgctcttgcgaatgaggctgaggttttgggaaagacctacaaagatcaaaaattggttaagaaactgttacggtgtctaccaccgaagtttgctgcccacaaagcagttatgagggttgcagggaatactgataaaatatcatttgttgatcttgtgggaatgctcaagtcagaagaaatggaagctgatcaggacaaagtcaaaccatcgaagaatattgcatttaatgatggaatggcattgctagctaggaattttgggaaagctctgaaatgtgtagaaagaggtcagaatcgtgacagtacaccctggagcaataaagatggagagagatcacgtggaagattctccagatctaagaatgatgactcaggaaagaagaaggaaattcaatgctatgagtgtggtggttttggtcacattaaaccggaatgtccagtcaccaagagagaagaaatgaaatgtcttgaatacaaaggtgtgggtcacactaagtttgagtgtcctaacaagagcaaacttaaagagaaatctcttataagtttcagtgattcagagtctaatgatgaaggtgaagagctgttaaacttcgtggcgtaaggacaagctgaagttggtaaaggaaaagctaaccctagaagcgaaacttgctaatgtgagcacagcggataagcagaaactgagtggaatcactgttgatgggaattcacaggactactatcaaaagaaatttgactgccttcaggaagagtgtcacagggaaagagatagagctaaacttctggaaagagagttgaatgacaaacacaaacagatcaggatgctcaacaaagggtcagaaagtctagacaagatattggcaatgggcagaactaattctcaaccaaggggtttgggttatcaaggttatacaggaaagatcaacaaggaagaaggaagagtcatcaactttgtctgcccattcaaagcgaaaatcagaacactgtggaatttagcaaagtgctacattgagccatcaagattctgcactgtgtggattaagaagaaagatctgtatggtgatatggaagctgaaaggtacaattacaagttagaaagaatgtatgaagaagagaaaatgcattacgctagtgtctgcaatctggtcaacaaagaaatgcaagacgaggcaaatcttgtttgcaactggaatctttcagaattggaggactgcactccacaagccaaagtggcttatacttcagctgtttcttaagacaacaaaacgtggtattttgacagtgggtgttctcgtcatatgaccggtgttcaatctgttctaaatgacttttctgtcatcaacaatgggaaggtcacttttggagatggtggaaaaggaagcattaaaggaaaagggaagattgagatatatgatcaaccgcatctgtcaaatgtgtactttgttgagggactcactgctaatttaataagcataagtcaactgtgtgatgatgacttaactgttacgtttacaaagactggatgtgttgcgctcgatattgctggcaacaatgttctatcaggagttggttcaggcaacaactgctacatgtggaaagactctgaagtctgtttgtttgcaatcacatccaagcttgatttgtggcatcaacggcttggacacatgaatactcaaagcttggttaagattgtacatgctgatgttgtcagaggaattccaaaacttgaagcctgtacaagtgttgtctgcaaagcttgcagccaaggcaaacaagttaaagtgcaacataagagggccacgcatattggaactactagtgttcttgaattggtacacatggatcttatggggccagttcagacagaaagcttgagtggtaagaagtatattttggttctggttgatgactactctcggttcacatgggtgagatttctaagagaaaaatctgaggcagctgaaagtttcaagattctggctttacaacttcagactgagaaagggaatcttgttcaaatcagaagtgatcatggtggagagtttcaaaatgaagaatttgagaaattctgcagaattcaaggaatcaggcatcaattctctgcacctagaacaccacaacagaatggtgttgttgagagaaagaacagaactttacaagaaatggctagagctatgattcatgggaacaatgtgtcaccaagattctgggctgaagttgtcaacactgcttgctacatcgtgaatagggtgtacgtaagaccttggacaagtacaactccttatgagatatggaaggggaggtcaccaaatctgtgctacttccatacttttggttgtgtgtgctatgttctgaacgataaggatcatcttggaaagtttgatgcaagaagtgatgaagggatatttcttggttatgccacaaacagtatggcgtacagagtctacaacaagagattgaagagagttgaagaatcagttaaagttgtgtttgatgacaagcatcctacaagactcttcacggtggaacaagatgatgatgagcaagtagaggaaacaagacattcaacatctcttgttgaatctagaacttcaaaagatgttgaacagactactgaaccacgtacatcatcatctagcctcacagtccccaaaagtcactcagaaactgacgttattggagagttggatggagacagagttaccagggggataaagatgaattacagagatatgattctgtttacctgttttatgtcaagcattgagcctaacaacattgaaactgccttagaagatgaattctagtaccaagcttgccatgaagaactaaatcagttcagtcgtcatgaagtatgggatttagttccaagaccggttcatgtcaatgtggttggtactaaatggatttttaagaataaaactgatgaagaaggcaatgtgacacgtaacagagctcgactggttgctcagggatactctcaggttgaaggaattgatattgatgagacttttgctccggtagctaggctggaatctattcgtcttcttcttggaatatcgtgcttgttgaaaatcaaactgtttcagatggatgtcaagagtgcttttctgaatggggttattcaagaagaagtgtttgtatctcaacctaaaggctttgaagattcaaactttccagatcatgtgtacaagcttaaaaaggctctttatgggttgaagcaagcacccagggcttggtatgagcgtctcaccttgttcctaatagaaaaaggtttcaaacgtggaagtgtggacaagaccttgttcattcttgttgatgaaaaggacattctcattgtgcaaatttatgtggatgatattgtgtttggaagcacaaaacagaaacttgtctctgactttgtggaatccatgaccaaagagtttgagatgagcatggttggagagatgaactacttcctgggtctacagattaaacagactgatgaaggagttcatatctctcagtctacgtatgccaaagggttgattcagagatttgggatgcagacagctaagacctcaaaaactcccatgagtgctactgctaaattgtctgcagatgaagctggtctgagtgttgatgagaagctgtatcgtggaatgattgggagccttctgtacttaacaacaagtagaccagatctgtgtttcagtgtgggtgtgtgtgcacgttatcaggcaaatccaaagcagtctcatctgaatgctgtgaaacgtattctcaaatatgttaaaggtacaaccgatgttggtctgttttactctaaacaaactaatcaaaatcttgttggattctgtgatgctgattgggcaggaaacctggatgatcgaagaagcacaacaggagggtgtttctttttgggaaacaacttagtttcatggcacagcaagaaacaaagctgtgtatccttatccactgcagaagctgagtacatttcactagggagctgctgtactcacttgctatggatgaaacagatgcttctggattacggtatgacctctaacaccctgcttgtatactgtgataatatgagtgcaattaacatatcaaagaatcttgtgcaacattctcgaataaagcatattgacatcagacaccatttcattcgtgagcttgttgaaaacaagattgttgaaaacaagattgttgagatctctcatgtctcctctgaaaaacagttagctgatatatttacaaaaccattggatttgaacagtttcttgaatctgaaaaaatcgattgggctgagtgaatactaatgtgtcttggtgttaaagctattgcaataggttcctttgtacagagttgcattagctttatgttttcatccatatgtatatatatatatctattgtgtttgtctttctggtacttcatttcaagaaaaatagctgctcttcatgctcttcctcaatgaagcttccaaaaaggatgtgtgtgttatgtgtaataataaaaaaaggcaaaaagaaaaaaaaaaaggcctgaaggaatgaacaaatgaaagttcaaaaagaaaaaacaacaacaacaaaggttgtgtgttggcaggaaagggattggtattctttcttctcttggggtatatatgtatctatgagtacccccacaaaacattgttcttcattacaggctctaccaatccccctggccgtgttacacacacacatcatgaggttgcttcttcggagagtatgacgagtgtagactatcttgtcttgatcagtgtgtatggttcatctcactgggccaggaagctgctattttctccatactaaaagtaagctatgcacctctgtactttggaatttgtccttctcgcttggatacatttcgcatgtgggttccttgcctagtagaagtttttttaagctatgtagtatagaggtctatatcttaaatttatgctttgttttatcttttagaggattacttgatgagatctcacattcagtttgaatcacagttcttgaatgacagtggctgttaatttcaagtgttgatttggttgaatttgtggttctatatggtttagtccttctttatgttgcaatcatattatgtacatatgttggctgtctactacgtctctgggtttctgttgtgaattgtttttgggcctggtataaggccctgtcgattgtttaacggatctggtttagtgttttgcagcctgtcttggtttctgtgctgtttttagggtttcccttgatgcgctcgtgccttttaaacctagcagctctcacagaaggctcattctccttctctgcttctcaaacctcaaaattcaaagggtttctttctctaaaaacacaagtcaccatgaatcaagaagcgacctcgttgactggagtctctagtgctggtcagccttcctctgcaactccttcagaccctccaccgcctccggttgctccaatgttcattccaaagactgaaccaggcatctgcatgtctaagaaaacaaagtccaaggtctctgctccgactcagcgcaagagacagtgtacggctgcatctgccaagtccagatctaaagcgcctgctcctgctctccgacgtctgtcaagcaggaaatccaaccgatctgcctctgctgcaggacaaactgaagatcttgtccgtgactcttcagatctgcaagatggtgatgtcactgagattgctccgcctctgtttctgtctcgttaccgagagaaccgtcggcttcttgctgttcgtgatcgttagtatccggagctcaaattcccatcgaagactccctacaatagctgttttttgactgaggaaggtcttgggcgctacaaggtcatcgggaatcgctgcttcaacgacatgcgtttccttcctctggatggaaacaacactgcgagtactcaacaacttctcttcaatgctggtctgcttcctactttcactgaaattgactcttatgtgcatgaggttgtcatggagttctatgcaaaccttcccgatggtgaagaagcttccaaatccttcctatccgctggatggtgtgtctgagattcaagttcctgagtccatggatgaagttgcgattgctctgtcaaacggcaaagccaactcctggaagatgctcacttctcggctgttatctcctgagctagctctgctcaacaagatctgctgtcacaattggagtcccactgtgaaccactctgttctgaagccggagaggatgactctgctttacatggtggccaaagctctaccgttcaacttcgggaaactcatctttgatgaaatctgggcgtgttcgaatgcagttgcgaacccctcctctactctccgacttgtgcttccgaacctgattgatcaaatgctgcgctttcagcgcattgttccctctgatgaaggagataccacttcgtctgcaccattgaagttcaccatggaagtgaaacctgttcctgtgctacagtctgacagtccaaccttggatgcagctctggagaccctcattgcatctctcacaacgatgcgtgttcgtctggcaggtaagcctctctcattcaacttacactctgttatcttttgagaatggttttttatatgagtgtgcactcaagcagggggagagtattctgatgtgtcgtactctgttccggatgatgtgggagatgagaatgtggaggaagaggacgatgatgatgagttagatgacagcacttaattgcttagtcctggtcgtttttagttgtgcattgtgttagggggagtttgtccctgattgtttttgtgtgtttgtgaaaactccttgatcttgtttcttatcggcttcttatcggatcttctgtgtgtttaatgattggtcttatgtatggaaccaagaacttatttatgtttcatgtttaaatggttatgtcttttggcagtagttgcttaaacttgagcctttggtttctatgtttggtatggaatattgcttggcttgtatgtgtggtctctactcttttgcagattacttgaggtgtcacactcagagaaaaagggggtgattgaagaaacagagtgtctgaagttctacaagcgtgtctgaaacaacgcagagcagaacagaggaacagaggaagcgggaaagtagcagttgcttttgcgagcgtggcatgttgattggagtgaaggaaaggcgtatcactttagacaaaggagacaaatgcgtcagacataggacgtgtgcctagtgtcaagataatgatgaggagctacacttgaacctgctggataaagtagagcatcctgtcttttccgagaaactacataagagaagttttggtctcttattagggttagccactttacttgagaaaagtggaagagaagaaaagttaagtagaacttgttcttgtggatttcattggtgagtgaacaaagagagcacacggctgttgctgtgtttgtgagctgggtagtttttaggttctgacagtagcaaatcaggttgttgatgttgcataatactgtccaaacttatctgtgattgatcagtttgttctaataaaatatgtttattgaagttgtgttctttatcttgtcaaagtatttagggttcttttacttcaaacatgtcatttgcgaggtaggtattcctctcggatgcatcgcaaatagcacttgcatgtaatttgcgacgaatttgaattcgtcgcgaatctcttgtcgcaaacttgaattcgtcgcaattgtgtcgccattgttgcgataaaacagatccctcgcagagcccacgctaacgtcgcaaaatacatggaactttgcaatgaaataggattgaatgtttccgacgcaatattgcgtcgaattggcgtcgaacgttttcttgcaagttcgtcgctagttagcgatgaatacgctagtaaatgtgtcgtgtagagcgagaattttgcgagagatagttcaagaatccaatttaaactttgtttcacaaatttggtttttgtttgaatttaacattaaaagtaaattgaagaaaaaaactgaaatcaaaagtaaatatgaattctgaataaaactgaaaattgtttgatgttctaagaaagaaatgcatagaaatagttaggttttgaatacaacaaaaaaaaagcaaaataattggatcatattatgattgaggagatggctgagctgctgctacttcggtttgtgtttggtcttgtggttcctctgtttgctcttgtgctctttgtgttgtaggtctttgagctctaagtgttgttgctagagctggacaatcttcagcaataaggtcaaagaaataatcatggatccgttttagaagttcgtcatactgtttcttctccgcttcataggtctcccgatcaacagaatcattcctagcatgtcgatcaacagaagtagatgggataattggaatagaaccaacaccataataccgtccctttttattctttggagtagcctgaaaaatcaaacaaaaacagatgcaacttatagctcaccaaacacatcaccaaacaatctatcttaatagctcaaaaggttcaatgatgcaacttatattcaatgatgcaattgaataagacttaaaaactcaaacaagattgaaaaaagaagggaaaacgtgaagaactagcatgttgcagtttcataggctgagacaattcaaaaataattcctcgaacaagatttgattctttgcagttgttgataagccaccaggttggccagaatcacccggagaaagctgagactcctgctctaagatcttggcttaaacttccttgcaaatttgctctgcaaaaccatcaatgaaatctccattctttctcttgtgagtctgctccatgatctggacaattggagggagttgacctccattcttctcagcctaacatgaaagttaaaatactaatcatcatcatgaaactgggaaaatgagaaaaaagtgaaaagcataaattacttaaactttctaatgcacgtttagcataagtcttttgatctaaggtgtttctactcagaccatgaccggccacactagtgttgtgagattttgaacacttaccacttttatttctagactgtggatcaagccaaaaaactttgaggctcttccataccgttggattcatccacataggcattgctttatcacctatttccttccacatatttttccacttgctaacaatatcacacaagcggattcctgccttacttgtaaattgcctcttaaccaattcgttaattgaattgtcccagttatattgttgctgtgataaaaaaaataaaagcaattaacaccgcaaacctacttctacaaatcaaaaacagaaatctaatcaattttcgcaaacatgtgaaaccgagtgtcaacaatcttcttaggtgcctgtgagatgttagcttgaggttcagtgaagtatcctttgatgcagttagagactaccttcccaacttcattatcaacctctgagcagcagtagacccattagaccgttgtcctctattagtcgtaaagtttctataatgacccattccttgcatctacaattataaacaccaagagatatgaaattttagctatgaagtttctaaattcaatattcacatagaggaacaatcgattaataatgaaccaaggcgttgaagtcaaagtaataaatcaaaaacgaaagtgaaaccaaaaagacagctctaagcctttactagtaccatgagtaaatgaaacaagttacacaacagaactaaaaacctaggaatcaaacttaaagagtgcgttaaacaaccaaacataaacataaagatgttcaatctctcaatccataagcaaaacaaaagcctagacataaaacaacaaagaaagaagcatcagacaattgattgaccatgagtgaatgaaatatctagaaatcttgattctaacacataaagagccatttggctgaactttatataggccttgcaataatatctagaaatctaaacaatggcagaacggtcaccgagctagcattccaaagagccttaacctagacatattgtatatcaacacttcgaaggatatagtaatcacataagcaacataaatatgcttcacgagaaaaaaatttgaatgattaaaaaaaacattcgagatctcagtgtctatatataaaacaattcatccaagtgagacaaaaatgtagaataatcttaatcagaggctaagattcacaagaaaacaaaaacttgttctttaaaatctcatcagaagtgagagctttcataaccaacacaatcacggaatcaacaagtagtacatagaaaatcaaaaatcgaatatcaatatttattagcttgtatctacaatgctcgagattagattgtatctcttgaattaacgtttataaacattagagaacacacacttagctaaagcagacaaaagcaattacaagctaaagccgacagaagtaattaggttcttctagttgtcgattgtcttgatcaacatgtatgatgctttcgagtgtatgttctagaacatgaatctctccttgtgtgttttgtagtggtacttatcagagactacaacaatacgacctcttggtgaaatttcaatgacagataaccacgataccgcaatttgccgaattctgggatatggaatgaaactgacttcttgagcttgagcggcaaggataaatggttcaaatctttgatattttcgagactcattaacatctacaatggcgaaattgtttatcctcacactgcgcttgataacaggatcgtaccactcacatttgaataatatgcattttaaattaaccaattccggatattgtatttctatgatttcttgcaacactctgtaatctgtttcaccacgtaataaaataccaaagtttgttattgtccgatgctgaccgtgagcttgcacatgaaaaacatatccacgggtgaaatacatgggtgcagtagtaatcttcgcaagaggaccttagatcaactcgtgaaaccaaacgggatatgtttctatcccataatgtacctgtaaaatacaatattactatttagataaacatatataagatcaaatactactacaataatttgatatataagaattattaagttattctacatattgttttaaccatcccgcgaagttcctgtctctttgcttcgatatttctttctcagatatatcgggaaatgtttctttcacttgtgttatgaaaatactaaaattagagaggaacttgttagcaatgatattaaattaaaatattaataaaatttgtgttttagaagaatggttgaacgtattcgcaatttagaagaatatacgtgtgggcactttgacgatctttattggatcaccaaatttctttaagttgtccacttagtcatctaatttgtgcaaatatatcaggaacacctgtaacaggatatacaagtgtcacaccaccatcatcataccatcttggggcccttttccgggttcgaactgtaggcggaaagtagtaggaagagaaatgagacgtttcttcagtcaaactccctgaaacaatcgagccttcaactcttgcaagatttttagcttttccttttatatgtttcatgaatcgctcaaatgggtacatccaccataattgaactggacctccaagggctgtttcatgtggtaaatggatgggtagatgttccataacgttgaaaaatgagggaggaaaatttttctctaggttgcacaataagatcacaatgctattatctagatgatctattccgtcttccgtaagagtctgtgtgcaaagatcacgaaagaaagttccaatacctgcattcatagcaaattatgagtataattacatatatggctaactaaattaattaaattatcacacatacctgcaattgcctcatgaacattttttggtaatagctctttgaagcaaatggtaataggcgctgcataaagacatggcagtcatggcttttcatacccgaaaacttttggccttgctcaacattctttgaaagttttgacacataaccatctgtgaattttacatcagatttaacccactcaaaaagcgccgtatttgcttccggggataatctaaaggtaggaactggaaccttctcatctctagtaagatgcaaatcaggtcgcgaacatatatcaggcaaatccaatcttgtttttaagttgtctttacaacgtcgctgcacattcaaaagtgtatgcatcatgttatcaaaaaagttcttttcgatatccattacatcaaggttgtgcctcaacagaagatccttccagtaaggaagctgccaaaaaatgtttttcttgtgctacttgtgattaaccagatatccatctcgcatattaacggggatgtgccaattacccccacatggaacagtttcttaagcaccccaataatctatctgctcaagcaaggcttctccagacacatatacaggtggaggtcacgtaccactttgttcttcttaaaaaactttttgtccttcctgtacgtatgactcatcggaagaaaacgacgatgacaatcaaactagcttgtcttacgaccatgcttcagttgaaatgcatccgatttggacaagataacctaccatgtgtagtccaacctgatagcattccgtacgcagaaacatcacttatggtctacataagcattgcatgcattgtaaagttttattgttatgagtaatcaaatgtacgaactccagtataccaaagctgttgtaagtcatggatcaaaggatgtcagaaaatatcaagagaacgtttaggatgcttaggaccagggactaaaatactcaagaataaaaattctcgctacatacacatagatggaggtagaatattgtatggtgtcacgattactggccacaaagaatactcccgaccggacataccaaatggactaaacccgtcactgcatagaccaagataaacattcctactctcccttgcaaagtcaaaatgtaccgtgttaaaatgttgccaagccttcgcatctgatggatatgtaacctctccatctaaacgtgaatgctcagcatgccatctcattgatgcagatgtcctttctgattgatatagtcgctgaagtctatcggttattggaaggtatcacatacgttggtacgggatcttggttcgtcgtgaacttggcttatatcttggcttcccacaaaatcgacattccagcaattggtcatcttctttccagaatatcatgcaattatcaatgaaaacatctatcatctctgaaggcaacccaatactatatactaacttgtatctcataatactacaagaaaacatggtgatatcctaccaattttcctacgaaaagtttggtaaaaaatctttcttaccaagtacttacgattttcctacgaaatttcctacaaaacatacggtaggaaaatggtaggaaattttctacgaaaatcctataaaatgtagagtcgtaggaatatttgtaggaaatcggaaggaatttgatgggaaaatacttggtaggaatttggtaggaaactttctttcaaattttctacgaaacttttaccaaatttttttttatagaaaattggtaggacatactccttcatatttcctacgaaaacaaagtcgtaggattgttgtagaaattttgtaggaataatattaatagagttataactatttttttcttgagctgagagacgtgaaagaccgagtgaatcatggaatcttgtggtagcaacagcttgtaagcgacctcgccacatttatccacaatcttataagggccataatatttgggagctaacttctgattatacctcatcaccacggagccttgtcgataaggctggagtttaacaaaaaccatatctccaatgttgaaactgcgttcagtacggtgagagtcagcaaattgtttcatacgatgttgtgctcttaagagatgaaacttcagcaccaacaacatattttctcgctcttgtaagctacgcgccaccactgcctctttggattcaccaggtaagtagggaaggtgtattggtggagcttgaccgtaaacagcctcaaatgggctcatctgaatagaagtgtgaaaggtagtgttataccagaattctgccaaggacaaccattcactccagaggtgaggtttatcactgcacatacaacgtaaatatgtctccaaacaccagttaacaacttcggtttggccatcgctctgagggtggtaagcacttgaaaacttaagctccactccttgtaaagcaaaaagctctttccaaaatgtactgaggaaaactgtgtctctatcactaacaatggatttaggacaaccatgaagcttaaagacattgtccctgaacacttgagcaacagacatcgctgtgtaaggatgagctaaaaagccatgaaatgagctgcttttgtaagacgatcaaccacaacaaagatcaatgttttgcctgcagatggaggaagaccatctattaaatccatggagatatcagtccaaatggtttcaggaattgggagaggttgtagaagtccaggagaagccgttgtatcgtacttacactgctgacacacaccacaacttctgatagaattctaaatatccactaccatgcctttccagtaaaaaagacttttaaccttttgataagtatcgtctctgcctgaatgtcctccactacccgaacaatgcatccactgcaagattgagttccgcaactgcacatcatgtggaaccactattttgctcttacgccgcagaacaaattgtgtccaagagtaatgtttctttgctgcaggatctccttttaaagccgtaatcatcattaaatctttatctgtctcgtagtgtttctgaatatctttgagaatatcacattccagaactgacatagccatatgcaaaacctcagctccctctaccctggataatgcatctgctgccacattctctttaccctgacgatattgaatttcgtagtcaaactccagtaacttaggcaaccattgttgttgtataggagtgttcaacctctgttttattaagtatttgagacatcattgatccgttttgatgatgaagtgattgggaagaagataatgacgccatttttgaactacaaacaccaccgccagcagctccttctcatagatagacagattgagttgcctacccttcaaatgacggctaatataagccaaggggggaccctcttgcattaacaatgcctcaataccttctgtacatgcatccgtttccacaacaaagggtttatcaaagagtggaagtgctaaaacaggtgcattgcataaggcggactgcaattgttgaaaggattccaaagcctcttcagaccacacaaatgcatccttcttagttaacaaggtaagaggtcttgcaatagtaccaaaattcctgacaaaccttcagtgactgaggaataagccattttgctactgctttaatttatctggatcaatggagactccctccgcagtgatataatggcccaagtattcaacacggtttgtagcgaactcacatttgcactccttagcaaataagctgtgttctcgcattgtttggaataccaactctaagtgttgtatgtgctcttcaagagatgcactatagatgagaatgtcatcaaaaaatatgtggacaaacttcctgagaaacttcttgaaaatgtcattcattaagccttggaaagaagcatgtgcattcgttaggccaaaaggcataacaacatactcaaagtgtccacaatgtgttttgaaggctgttttaaagatgtcagcaggttccattctcacctgatgataaccagctcgaagatcaatcttcgagaacaccacaacccctcccagctcgtccataagatcttcaattaaaggaatggggaaccggtccttaatagtgactccattcagtcctctgtaatctacctcccttcgtcgagcctttccggggttgttccttccttatcagaacttggcgggcattctttccagccgggggatgggttttgtttgaacataggctctacgcagagtctccaagtgccatcttttttttactagaacgacaggagaagcataaggactagaactcttctgaatggtgcctttagataacatatcctcgaagattttttgtcaatctcggttttctggtgcaccgcatattgatagggtctttctttgattaatagggtcagacccttctttgataggattttatgattgtggttctccctgaagggaggtaaagctgcaggctcctcaaaaatatatgcatattcttcctgcaacttcttaatgattggagagactgaagtgttctcattgctctccaattgcattgtgtttgctttgttccttgtttgagcataaatcatcaagatttgcacttgactctcctgttttttgttaaactttaatgttttcacctctctgactgagccttgtttaatgccatgaagcagaacctttttatgaccagtaacaaaactcatttccagcttttgtagattccatgttatatcacccaacgtcactgaccattgtactcccaataccacatcacaatttcccaatggtataaccataaaatcagcttgaaaattagaaccatggaattcccacttgaacttatccactttccctcggacttcaagttgattaccatcagccacagagactgtagaacagactgcatgactcatcttaactcccaacaactctgctgttttagggtacatgaaattatgtgtagatcatgtatcgagcaacagaaagatcagacgttttccatgagtgccacgcactttcagagtggtataatctgcaaccccggaaactgcacttactgaagcttgtggcctattgttctcctcctgaacgaccaattcatgttcagtgcttgtatccatgtcagattcctccacttatgcttctacttcaatcatataaatatgagttttcttgtgtttgagatagtggtctagtgtgtatttttcatcacactgataacatagacctttagctcttctttgactcatctcttcttgagataagaatttcattgctggcattttcttctcaaagggtgtcacttgttatgtgttgaaattagtctccttcttcaccagaggtttatgataagtaccaccaagtgattgtttaggtggagggtgagctttctcatacaaccttcccaacactaaacactgcctaatagtttgctgatcaaacatccttacatggatttgagtctccaaacgcagacctgccaagtaagtgttgaccaaatactcctcagaaagatccacctttgttttgattaactcaaacttctcatggtaatcctcaattccgttagtctcttgcaatcgttttagttcaccaaccggatcctctaacacatcctcaaacctctccataatcagcgatttataagcataccaatctctcaaccaacgcttaggatctggagtctgaaccatagtatggtgccaagtagaagctctaccatcaaaatgtatggctgccattttcactttcatctcagggggtgtaaaatcaatctcaaagaatccttctactttaaccaaccaatcgcggatctgagtaccatcaaaacgagggaaacccaccttaccaattcgagtgatacctgcgtaataaggctgattttgaccgatctataactccgttgagcttcagaccgatcctcaaagtttcccggtgacgctgaaaccatcgcaaacgtgttgtctgctatgtttttaccactggatgatgcttgatgtcttggcatcagcttcactatctcgtacatttcagccatgttcttatcaacccgcttattttgttctgccatcgtaacctccaacgcctgaatccgtttgatcatctcctccaaacgagctctgatcgtctcttccaccacttccgattgttcttgtgtgtcacccaactcagattcaacagctcgagatcgcgtttgaaccaccatcgtttccgagagtcaattggctttgataccagtgataacgaaaacaacatgttgaaacagagtaacacaaaaaacaaagtaaaactgaatattccgattgataaactagatataacgttcctagaaacgcgttaccaacgtctcacatgcaagagtctcgacgagagaacctccggcaaacgatgaggaagagtctagagaattctagaaagattacaatcagatattcgtgtgtaaaagcatgagcgtacatgtgctcttaataaagtaaaagaagtaaacgttaataacatcttcagtcaccatccaatgtcgttaaacctcaagttgattgccagctcaccaaagcgcatgtgctactcttcttaacccaaacttcccactgccaactgatcttctagaatgctatatcagaatccaattgaattatgattatgaaatcatgatgaatatttggtgctttagggtttcagatttagcttaaccaatggtttatagtcaaagagattatacactgaattggatttggagtaggaatctcaataattttcgagatgacactttaaaagaatctgaagaattattatgatttattgtgaagtctcattcttgtattgttcatgtagagaaaagagaagtatcgttatcctattctttcaaatgtaaacaggtgagagaagttaattcactggccaagttaaaccgaaaccttcaccacgatcttttttctatctcctgagaaggccattgtttgcagaggatctacctgaagaagcgcaagccactaatctggtatttacttttcactgctgattatgagtgtgcacgtgtgtgatcgttgttgttaacttgtacaatgtttggaccctagacaaaatgcacgttcgtagagttccggtaacagaagatagacccaatattttgttaggcattgtaaaaactggttttgtttatactatatattcagaaaatttaggcatccttcctatcaactaacaaacattacaattgatttcagggttacaatgctggccttgtcaatcttggcaacacgatctacatgaactcaatggtacattgcagaatggaatatactgtcatttctgttggttattaccataacttgtttctctactccattgcttgtaaagtctccatttgttctttaaataactaacattttaattttttatgcagttgcgtcgatctgctagctcacttgatagctgctcagcttgggacatgcatgaagtttgatgatcatcaatccatggtggcatcacagcttcgaattcaggaccaaatcggagacatcatgaagagttgtaggtttaacgtatattagcattagtattagtaaaataaattatacatttaattgattatatttgtagaataatttgtacattgaattgattatttttttgtaattgattttgtgactaattacgatgattattgttttgggaaattttaatttaattttcaaaattaatataattattgggaataaattaattaattttattttttattaagttcgtaggaatatggtaagaaaatttggtaggagtatggtaggaccgtatttcttacaaatattttggtaggataatggtaagactaggtcctaccatattaactacaaacgtttttcgtaggaaattggtagaaaacaaacatttcctaccaatttccaacgattttggccgtaggaaaacgatttatttcttgtagtatgactcaggagctaaattatcctctgccaaaaatatcgttaattaattcagcccatgaatccatgcaaatctcatataagttgttatctgttttaatgttcattattctagatgcaactgataatctagacattccttctctacatccatcgtagatcgattgatttgcagcatctaacatatcataaaattgtcgaacatctaaattaggttcctcatggttatcggtgattgttgtagtttcatgaaatacatcatggaccatatattcaaaactattatggttttgttgactataatcaaattgttaaggctcaaaagtgatattaggttcctcttcatgttgaaaattagaattactagacgatgcattcaccatattttcttcaccatgccaaaaccaaatataataatttgacatgaaccctctattatataaatgctttcgcccgttttgacagaaaaataacgaccatttttgcactttcgacatagaaaagacatattaccagtttcttgcgtgaatgacagttgatttgcgtttatcatgaattcttctagtccatctgcaaactctcttgtcactgatctatcaacatatttgtgcttatacatccactccccccggatataaatctcgtgagacgccgacatattatatatatttattttgaagataaaaggaatataaaatttgagaagaaaagatctgaaaacgagatttgaagaagaatgcttaatattgaagaagagagattgtgatgttccttactcatcccaacatggctttatataggcatacaaatctatttgcgacgaatttgcgatgaatttttgcgactatattgcgaggaattgtaaactagttaggtagcacattttaaaacgtttctcacctaacatatatatattcgtctcaaatgcgttgcacaattgcgtcgaatttttacacgcaaattccacgccaaatgtgcatgtactttgcgatgaagtggattggaactgttgacttccactcacattcgtcgctaattagatgcttatccgccttgaattagcgagtcattatatccaagaatatttgcgacaaagttgagttgaattacactattccatcctaattcgtcgctaattatacacttatttgcctcgaattagagacgaaaattttccaagcaaattcgcgataatattgagttgagtcgttaatgcgatgctaattccactctaattacatgcaatttagcgacacatttatttccacgcaatattttcacgctactcacatgttttcttgtagtgtaatcacatatgctcataactgcacctcaccccatatctctccttcgatggcttttagagaaattgacgtgataaagatctttgttgggtcagagttttcagtcacaaggagctttccattacaattcaaaagttttgctctatttccaaacttgggtagcttttgctttcccttgacacgagcccataccttctcatgcatgtacaccttgatttggtttcgtttttgattgaaagagtaaaatcgcttgtttatcacacataaacgcttgagaatcctgtggtttacaacctccaatcacaaaaagtatgtatttgatgagatcggtctcatgacatgagtggaaggaaagttgggtgtcggacgcaagacgtactcatcgatgtaggctttttttgcataccgatttttgaattttggtagcctaaaacatacttaaataatataattttttatttaattaaaaagaaatcatcgaaatatatttaaaaaatatcagaaaagtcattgaatttctaaaatttagttttgtatcatatttattacctagtaactaagttaactaaacaaaaaacaaagtaataaaaaaaatataacttgaaggacttgaaccaataatgtacgtttgccagtgtcctacgcaaaacttacaagattattaaaactgttaaaaccataaacaaattattattgaatttgcatctttcttttaaaagccaatttgcaagagacgaaagaaaaaatctatagtgttgattatcatgtaggtcagtttttttttcaatcgaagttaggggtttttggtcttctttttatagttaaatcaggatttctgttgatgatataattagtttgtctctaaaagccaatattatttttcaaaaagaccctacagaataaatttgtagttttaataatatatatatatatataattattataaaaaattattaaattatttatcgataatattttaatttggtatagtaaatacggattcacacactttttctaatatttgacttaggaattgttgtattaaataaaatttaattattttctaaacaaaaaggaaaattaacaaatctgttttttcatgtgctattggtttattaaatttagcatgtattaattaaaaaatccttgaataaggataacagtactaattttataatgtcattgaagtttaaaataccaatatgatttatttgatattaatttaattagataaaattgcatttatcattgtaatatattagttttattcgttaaattaaaacataaaataaaattattaagcttgtaagaataaattttgaatacttaagtttaattctaagaattttaacgcatcatgtgatggagggtattgcatcctttgatgtgttactacaagcatatactgatgttttattgtaagaagtttaactcatgtagtcataagtgaaaacataattttttttttgggaaatagcttataggatttgacttatcaattccttaatgagaagttagtgcattttgatttatttattttaactcatctagaattagtgtgtatgaggtaaattaacatacgaggttacgccatatagatttgatctgatataaattttattttaatatgaaattgttatcacttaagataatgtgtgtaaaataaaaatcaagtttatcatgatgaaatagaaagttaaactataatgcaaaatcgaatgtgtaagatagaaatttgtttttagttaaatcctaaattgaatatagaaaaagtgtgtaaactacaatttagaattcaaatattatcaatgagattgagtgtgtagaattaaaatgtataaggaataaaatgcataaaactagaatttggtttaaaaaaaaaattattaaattaaatatcctaaaactgtataaattactattttattattcaagattcaaatattatcgataaaaaattatatttatgtcttagacgtacctgaataggcgggctttacctagtatattatatatacgcattactttgatcatgaaaacgttgtaaggcccgtaactacttcagattgaaaggatgtttaatcagatcgtataattgttttagcatcttgcaacaaatcaaacagaatgaaaaaaaaaaaaaaaaactaaaggtgaggtgatcacttttatttcaaattatatagtcaataaaatacatattattaacataaaaaaagaataactacagctgttaatataattgattttgtgactaaaaccaaccttttgttttggtaagtaaacctcacagtttgaaaataataaaatcagtgataagaaggaatcaggtgagagttgtctagtccacattttcttttcccaatatagtaacattataaattatttccattagtcacactattactaaatttgtaagaaaactaaatactcatacagatttctccataaatagaattcatcataggcgtgtgttctccacacttcacatcctaggcgtgtgttcaccacacttcaattctcttctttcattttcactattttttttctcgtttaacaaaagaaaccaaaaccaaaaggtcctaaccatggaatcaaacaacaacaacttgaacctagacatggagaaagatcaagaaacgactttcgactactccaaacgagctcaatggctacgagccgccgtgctaggtgccaacgatggtcttgtctcaacggcttcacttatgatgggtattggtgcggtgaagcaagacgtcagaatcatgctcttaaccggttttgccggtttagtggccggagcttgtagcatggcgatcggagagtttatctccgtttactctcagtacgacatagaggtggctcagatgaagagagagagcggaggggagacaaagaaagagaagcttccaagtccaacgcaagcggctatcgcgtctgcattagcatttactctaggagcgattgtgccgctattggcggctgcgtttgtgaaagagtataaagttaggattggagtgattgtggcggcggttacattggcgttagtgatgtttggatggttaggggcggttttgggaaaagcaccagtggttaagtcgttggttcgggttttgattggaggatggttagctatggccattacgtttggttttacaaaactcgttgggtcacatggtctttgatatgtatgtgtgagtttacttacgtgaccaaacccttcttcatgtttcatgcttcaaaaactggaaaaaaaaatgtaataagtagaattaatttctaatgaattccctttacaatttttaatgatcatgaccatcaaagacagtttataaatttaaaatattagtcaaacaaataaattgatactttaaaaacttatatgagtactagataaggttcgcccaaatagacgggtatataaatgtaaacttttcttaatagtatttgaattttgaatatagtaatttattctttcttcttgatatttaatttaatattttttgttttaaaaatttcagttttatgcattctattttattatacattttaatactatacgctcaatcttattaatgatttttgaattctaaatttaatttagtatttagaaaacaaatttttatattacacattcaattttgtaatatagtataatacatcataatacactcgattgttttgctaaatttagttgactactaatacatgtaaaacaaatttgttatttttccttttggttaagaattttttttactagatacatgataaatctagttgaccaatacacatgtaaattattttggttaataaaaaaatagatataaatgtataaattagtatatataaatttgagtttttttttttataatgttttctaacttttttaagagaaaaaagttaaaaaaattctgatacatatcaacatttgttcgattgagttgatacgtgacacaatcttatgaattgctaactttaaaaaccatactttagataataagatatttaacagatttactttgttagaaaaatctaatattaaacaacattattcaacttgaatagacttttaaccatgtaaacatatattcaagtcacctaacaccaaatttggatatactcgattctttttatttggtcactacaaagttgtttatgtctctttcgatgtacactaataatgttttaaacaacactaaaaaatgtatctatagtccaaaaatactttaaaatttgcaagcaattgattgaagtaataaattaatgtggagaaaatagagtagctagggaccagtgaagatttcttgaagatataaatataatcaataatattagttgttgacaaaaaaaaaacaataatgttacttatcttctgatcttcccaaaaaaagcaactaacaatggtggaactttcgttctctcagctccttgtcttacttttaagcttactctttctcttcactactctcgcgtcaagttccaagaccccccgattcaagtattcgttagagaagcctcaccacccacttgacccactaacgacacctgaaataaagagagtccaaaccatcctctcgggtcatgatccgggtttcgggtccgggtcaaccatcattcacgccatggctctcgacgagccggataagcaacgtgtcatccggtggaagaaaggtgatcgtctcccgccgcgaagagcggagattcttgctatgtctaacggcgagagtcacgtgctcacggtggatcttaaatccggtcgggttgtttctgatttggtcaacccgacttttggatacccgattcttactatgaaggatatcatcgcagtctcacaggtcagtccggtttaaattcaatctgtgtcaaccggtttaattatttaaattcaaaccaaatctgagcagaccggtttccacaaacaaaattcccccaaaatgtaggttccttacaagagcgtggagttcaatcgctcaatcgaagcgcgtgggattccgttctccggtttgatttgtattacaccgttcgccggttggtatggaccggacgaagaaggacgacgagtcataaagatccaatgtttctcaaagcaagacactgtcaatttctacatgagacctatcgaaggactttatttaaccgtcgatatggataaattagagatcatcaagattgtagacaatggaccggttccggttcccaagtctaccggtacggaatatagatatgggtttcttaatgaaacggtatatatggaccgtgtcaacccaatgtcgatggagcaaccggacggtccaagttttcaagttgaggatggatacttggttaagtgggcgaattggaaatttcatattaaaccggatcaacgtgccggtatgattatctcacaggctacagttcgtgattccaagacaggtaaattaattatatcacaaacaagtcccttgaatttagttattgttagaaattgactccaaaagtcttccaagttacaatgaaacccaatttgttgaggttgaaacaggtgaagcaagaagtgtaatgtacaaaggttttgcgtcggagttgttcgtaccgaatatggatccaggggaaggttggtattcaaaagcttacatggatgctggagagtttggtttaggaccttcttcaatgccacttgtgccactcaacgactgtcctcgaaacgcttactacattgatggtttcttcgcttctcctgaaggcattccaatacttcaacctaacatgatctgcttgttcgaacgctacgcgggtgacactagctggcgacactctgagattcttctccctggtgtagatgtaatgttctattacacaacactattattattttctttatatgatatgatacttatgaaaatgtaatttggatatcgacagataagagagtcaagggcaaaggttacactggtagctagaatggcatgttctgttgggaactatgattatatttttgattgggagtttcaaatggatggtgtgattcgtgttacggtatggttacattatgtgtatgcttaaaagtgtctcttaatagttgttataatgaatgaaaaacgttataaatataggtcgcggcctcggggatgttgatggtgaaaggaacggcttacgaaaacgttgaagacttgggtgagaaagaggatgattctggaccgttgatctcagaaaacgttataggagtcgtccatgatcatttcatatcgtttcatctagacatggacattgatgggtcagccaacaactccttcgttaaggttcatctagagaagcagagacttccacctggagaatcaaggagaaagagttacttgaaggtcaagaaatatgtagccaagactgagaaagatgctcagatcaagatgagcctgtacgacccctacgagttccatcttgtgaaccctaaccgactttctcggttagggaacccggctggttacaagcttgtacctggtggtaatgctgcaagtttgctcgatcatgatgatccaccgcaaatgcgaggcgctttcacaaacaatcaggtactcggtttaagctcggtttgacaggttcaacaaacttaaatgtatataatgaatgagatctattggtttagatatgggtgactcggtataaccggtcagagcaatgggctggagggcttttgatgtaccagagccgtggtgaagacacactacaagtttggtccgacaggtacaccatacttaattgctcctattgtctttggtttaactataagctttatctttaactgctgtttgtgtgatgaaacagagatcggtccattgagaacaaggacatagtgttgtggtatacactagggttccatcacgtaccgtgccaagaagattttccagtgatgccaacaatagcatctagctttgaacttaaaccggtcaatttcttcgaatcgaacccggtacttgggatttcacctttcttcgagaaagacttaccagtctgttaaaccagatgcttcatcttattcgacactgtgcattttcaaatgtcatgtgtagacttttctgattataaatgttgtgcatattctattgatatatgtatatcagtatatgaaatcaacatgctcttgatattcaattatttatctgcaacagtatatgagtatcatctaaagatgttgcagagcacattttggtattatacagtagttactttggcaacgaaaaagtgaccccactagaatgaagaagtagagtgatgcattaagaaggtaatgaggataatctaagaaacagagaatgttgcagagttttcactcgcaaagactaactcagacaaaagagatcaatttggcatccattgattagaccaccttaaatacacaaaagaaagttcaagtttttttttttcagatacctttcttagagacacccttgccttagtgatgaaggagaatttctaaacacttattattgaaactaaagtagctttgagctaattttgaagacaagttttgtgtactttacagggaaaatcacaaaaaggctcagccttgtcgtattcttacaagattaaaaaacaataaacaacatgaatctactagagatcgttacaaacacaaaaacataaatggtaattattacctaatgaacagatcaatttagagttcaaaaaaaccctaattaactagtgttaagctataaactaactaaaccagaggccattccattgcttcttcgcttaagtattcactaatatcgatcataaactcgtctttttcgttagttgaggaatgatcttgaagtggaacctcaaggttttcgttattaaaatccttgaatagattttcccaaaagctctgatcctcagtgaaaagcgttgatgtctgtgtttcttggggtacactcattccgttcttctcttcctctatttcacataagctgtcaacaaatccaagattaacattaaccaagtaaccagattgatcatcattaactaagtaaccagattgatcaaataatgactcatcaacaaagaagatatgattttgatcaaaacaagtaacttgtgacgaccgaggctcgccatggttctgataaaagcaaacaatttgtgaggaattcggagaataggtactagggttttgaccaaaattagaagcaatttgagaagaagacagagtagaggtactagggttttgaccaaaatcagaagcaatttgtgagaaaggagaagaaaacccaccatgattgaatatctcgtcggtgctaggtttttgatcggaaacaaattgtgatttttctttcttttcgagacaatccatcagatgcttcctcgttctcatcagacgatcctcaattatttttaattcagagatatcgtcgcagttacggtagaggtcagggtcttgataagcctgtgacttatcggaacaagaaataagggtagagtgagagatatacgccttatgcgacggagagttaagagagagaaatagaaatgatattgaaatgattatgtttgataacaaccctaatggggaaagttttccttaaatactaaagacccccaaaacccttaaaacacataaacccttaacaccacaaaacggtgcgctttgtccttagacttattgagtagaagcagagcttctgaaccatccagagtctcttcttccttagccacttttgttcaggactttcctgagatacttctccaaagctcttgcctttcttccgccacttctcatcttcctcctcatctttcccaatgcaaccctgagcctatcaatgctctcccgcaggagattgatcttgtcctcaagatcgaactttggaaactgttgcacaagtgtgatcaaaggttccagctcggataacccactccattgcactaaaacctctgcactgtttcctgattctgcttttctgatgtcaagtagcttctcaggacccaccgcccattccagcaaaggggtcatgatcttgggtagctcctgagggctgtaggctgcatgcacggccagcttcagctgggggacatggaataccgggtcaatgtggctgtgagcagggagtttcaacttataagccacattgcccactttactgattatctgatacgggccaaagtaacggggagctaacttctcattcttcctgtgaaccactgagttctgtctataaggcctcagctttaagtacacccactcgtcaacttcaaacacaacatctctcctgtgtttattagcatctttacacatcctgttctgtgctaggaccaagttttctctcaattccattaggataccatctctgtctctaagcagctcttcaacattagcatttggagtagggacatcgccatacctgatcattgcaggaggctctcttccatagactgccatgaatggtgtggtcttagtagcagaatggtaggatgtattataccagtattccgcccaaggcaaccattgaatccaagtagttggacgtctacccgtgaagcatcgcaaatatgattccaaacacctgttgtccacctcggtttggccatccgtttggggatggtaagcaaagctcttgtgaagagcggtaccttgtaacttgaagagctcagtccagaaatggctcaagaatatcttatctctatcagacaccatcattgagggaaactcgtgcagtttgattacatctctgataaatgcctctactactgtctttgctgtgaatgggtgttttaatgcaataaagtgaccatatttgctcaacatgtctaccaccacgagaaccctcttgagactggcagtccctccacgaagtctaaactgatgtcttcccaagtctgttgaggtatcggaagaggagctaataatccagctggagagagtgttagaatacttgttctcttaacatacttgacagcctttgatgaacttaacaacatcacttcttatgcatgtccaacacacctccttagtcaatcgtttaaacgttttcagagctccttcatggcctccaacaacgcttgtgtggaacgtttccagtagttttggaatgaagggagttactacaggtactacaagacaacctttcctgtaaggcacaccatcttccacagtaaaatctccatttttctgacagccttgttctatatcctgcaacagcttactcaattctttatctgccttgactgcttcttttagagctgttatgtcgatggtgtgagtagcttgcaatgttagctgtgagaacacctcagtctggggtttcctggacagtgcgtcagccaccttgttgtccacaccaggcttgtattcaatcttatacttcagccctattaacttcgaagcccatcgttgctgtattgtggagactgcgttttgatctaggaggtgtttcaagctccgctgatctctcttgataacaaactcctttcccgctaggtaatgtttccacttggtaacaaccattactattgccaacaactctctttcgtaaactgatttaatcctcccttggcttgaaaaaccttgactgagaaatgcaattggtctcttttcctgggagagcacaacaccaattcctgtaccagatgcatcggtttccacagtaaactgcttctgaaaatctggtagaatcaagacagggagttgagtgacagccttcttcaatgcctgaaacgaactagtggcagcctcattccacaagaagccatctacttaagagatctgtcaaaggtcttgcaataaggccatagttttttacaaatctgcggtagtaacccgttaagcctagaaatccgctcaattctgtaactgattttggttgaggccagcttagtaattttgatccgcagccactccttgtgaagaaatgatgtgtcctagataagatatcttggtacttccaaacacacacttcttctcattgacgtagaatttatgaaatttcagcagctgaagtaccgtctccaagtgcttcacgtgagtcttcatgtcggggctaaagactaagatgtcgtcaacccgaagggcattactaagaattcgtaatggccttgatgggttttaaacgtagtcttctcgacatcctccgccttcattcttatttgaaaatatcctgactttaaatccagcttggagaacatcgcaactcctttgagctcatctagtagctcctcgataacaggaatgagatacctatccggaatagtagctttgttgagcgctctataatcaacgcagaatctccagcccccatctctcttcttgaccagtaggatagggctagagcagggacggatccacgttggtcttgggtggggcatgtgccctatactgaattcaataaatattatataagtttgcactatgtagttaaaaatgtacttggtgtagtggttttttacttaatggtgccccacattaacccaagttcaagctttactaatgtctttttattgatttttttttaactgtgccttatatagaatcatatcctggatccgccactgggcttgagtattggattatactcggacgtataatctgagagtccagcatctctctgaccaacttttcaatctcgtttttctgtccaaaagagtgcctataagaacgcagattaatcgatgaggtaccatcctacaaagtgatcgcatgttccctgttacgggaaggaggaagcccctttggcatctgaaacactgatccataattatccaagactctcttaatgtcttgcacaattgcctttttatcttgcggctcatatgatcaaataaagtagataactccagcaagtaagctgctccagtgtatttaatcaccctttccatggctctcagagagacctgttctctgcataattcgggatcaccatgaagggtaacccatgtgttaccaatctgccagcttagtctgagttgtccccattttgctcttgtgtctcctaacctggccagccaagaaaatcccaacaccacatctaaatcccccaaatcaaaaagcaagaaatcctctataaattcgatgccttgaacttccagtgctatgtctgcacatttaccgcttcctcttattactctacctccaccaacctttactccaaagcctctggtttctgtgactcgccaacctttgtgtttcactatgccttcgtgaatgaagcaactcgtggccccaaaatctatcagtattaccacgcttgtgctcctaatgtatccacgcatcttaatggatttacccctcgagttttcttacatagtgcctagtgagagtatctgcaagccttcctctgcttcagcttcttcatcatccaaaggttgtgagagtcaaaactcgcacaatagaaattgttttaagggtttcttcaaagaacgagtctttgtgagattctcaaagaacaacagaattgttgattaccgcagacggtgttcttggttgtattattgaaatagtaagaatttgatcgtacaagtgtttttgaatatgaaaataagtgtttttgctttcaaagtcagagcgtttttgatagccttaagttgagagcctctctccttttctcagaagttctttatatagggctttaatagatcgcttctcgcgatattctcggaagatttctccttatctcagagctggcgaaggagatttatctttatcttccgaagattctggaaatccctatatttggtgatatcctcggagattttctaatctcttccgggtttttcggaaatggtatgtttgatcacatattggttaagtcatttcttgaatgttctgtcccgatccgatgttcctccgagccgggttgagttggctctcaggttgtggttgagtggctcggactttgttaatcgaatgatgcgctcctgaggcatcttaaggtccgcctcggggtgattctccggattgctgtccgaggcgcttcaagatcaggtcggggaatcctttgtggcgatgttccgaggcgtttttggcgtcgcctcgggacatttcctcgacataatccccgaggtgttttgggcttggctcgggatggttcttcgacaaggtcgccgaggcgttaaacatggtcggctcggtttattaggtggaatccgaccccaacagtttgtcccccagctcattgacttggcagtgagacgatgagcttcatagataggttcccaagccgactgtttatctctttagacttagttgtcgcttcatcttcccggacggtcaaacttccgttgcgtgccgccgattttattttttaagaagtggaaacgtttctcgcttattcccgaggatgacgcgggtgtttccttcttccgagcccacgcgcttaaacgcgtttcaattgtttgatgcggacccgacgcgcctccaaaaattctatatatatggcgagctattccttcgggagttcacttgaagttttcgaagaaaataaacaaggtttgcttccttctctctgatcttgatatttctatatcgttctttcttttccggtgaagctcccccgttcttttgtcatttttggtcgtttctcatctcatcgatcgtccccgagccaaaaattagttcctgtcaacctctttcgaccccgagcgcttctctcgtcgattccagcgactcgaatcacccagacgaccttcctccaatctataaatggagagcggtttggacgtcttctgaagatgaagctgtatcttctttgagtgcccccgagcagatgacctctttcatggctcgggaagataccaacgtcgatattgctcgagaattggatctgcccgatgatcccgagccgcctctcgttcggagatcccttgctcctatggttgatgaagccgggacatccaattggcgagatgtgcccgagcctttaatgccgacgataaagaatgccgacgatgagtcgtataccgacaacttcttctacgtggctctcggagatgctgttcacaatgatcttctcgggacggttctgacgagatcgggaactttgggtagttgtagttagcgatctatttatgtccgacgcgatttatataatttgtttctttttcaaactagtttttcctttgttgcagaacgcaccctcaagttcctcgagccgattcctgacgatttcctctcggcttatcacgcgttatcagctcggaagtgtgattggtcgaaacatttctctcgggatcgagtcaaacaagccctccgtcttcttcacggcgtttcctatccctccagtttagaatcttcagaccatcgtactcaattcttcgtcgatatgcagtcaactaaactcagtttgagggaggtgtacgcgaagaagaaggaagataaagagagacgtttggccgaggataaacgcctcgcagaagcaaggttaatttcgccgcgggcggcttctccagaagcgactcaagaccaggatgttgctcccgatgttgcggccccagttgacccggcgcctgctgagtctcaagaggtcgatcctaccgctgctgcgcctttgcccgaggcgattgtcgcgctgcctgcgagcgacaaggcgatgggtaaacgtgtgcggacggatgattcatcgtgcaagaaaaagagcaagaagaagaaggcctcgagtgccgaggcgggaaaagagctccctatctttgaagatcgggtagcctccgcgaacctcctcggtgggtgcgcctatcctttgctttctcctccggatactcttctggagtcgcggaagtatgctgaaacggcttcccacttcttgccggtaagtgcctattcaattttttcatttttcatgtctggatctccgatctgtaattttctttctttgttctctaggttgtcgcctcattgaaccgaatggtgcattcgtacgattcggccatgaggaacaacatggaggcggccaacaggttggccgagatgatgctcggatccaagctgccgagcgagaaagagatgaggcgctctcccaagctgccgcgccgaaaatagcgaaggaggaggccgaaaaggaggctttcgtgaacaaggcgaacgccattaagatggccgagctgaacctgagggcggactccgaggttgttcgtctcaaacgcatgctgaccgaggcgagggggctccgcgataacgaactggctcgggcttctcaaatggcaaggcgcgaggcctccgaggccaaacttaaggccgccgcagaaagtgttgcttcttgacgggattaatgatcagtttatgtatttatcccaagcgcggggtaatgcgcaactgatcaaggcactcgaggagggtggagtgctggcgaccgagaaggaccaggttgaggaatggctgaaagacttcgccaatgtcgaggttgactttgccaattttatcgccgagctgaaagaggaactcaaggctcctactcccgaccccactcctttaagtccgggtggtcacagatcggtcgagactcttgccgacgaggcgggggtcattgatcagtttggatcacttctgcctgccgaggatattcgcctgtctgaagagctcgactaaatacccgacgcggggtcttttgtttttttttgtcattgttttttttttgttttgttaatctgttcggtttattgtacttgcgcctggatggctttatccaatgatttgtagaacctatgcctggacggctttatccattttgcaatttgaaatacttggtgggattctaaaaacccgaaccgttttattgcctgatatgattcagtttaagtgtgggtgaagcttttcggttgcgatccgatccgattcaccctttgaccagcgtttaaaaacgagctggggtaccggtgagtgagtatgaccgggtttccgaagatagaaatttcttttcagaaataatctgaaagaatttatcttgtatttatatagcgcgctgtagccgagcaggcgtaaaagatactccgagccgtcgttcatcgtatttagccgaagcgtttaaaagttgtgaatcaaacttattatttatgtcgaagccagtacttgtacaaaataatgagtgggagtatggatatacggacccattccccccctttttaatgggggggtagctgaactcgtccgaagacgagctgcctacatacccttttcagggatcaagccacctcgtagttcaagtttagtcacctcggatttagttgtagtatttccttaggtggattgcgttccaggatcttggaacggctttgccgcttaagtctgcgggctcatatactccgggtcggataactttagagatcaagtatggtcctttccagtttgtctcgagctttccagcgtttggttcagcggtgttctgaaaaacttttcggaggacccgatctccttcatggaatcttcgctgtcgaacgtttgagttataatgacgagccgtttcattctgataattttgtatgcgaaccaaggctgaatctcttcgttcatcgatcaaatcgagttcgtcgaggagcctctgagtattatcagagttgttttcgggagatagactcctacgtaggctcggtactatcatttcggccggaattatgcatttcgttccgtatactaaggcgaaaggggtttctcctgtggctcggcgaggagttgttcgatgcgaccatagaacaccttcgagttcgtcagaccaagagccctttttagcatcgagcagttttctcaatccgtcgaggattgtttagttagcagcctcggcttggccgtttccttggggatatcgtggtgttaacttgctaagtcgaattccccatttatcacagaagccttggaagcgggttgatataaactgccacccgttatccgtaacgatctcataaggtatcccgtggcgacataggatatgtttccacacgaagttctcgacttgagcgtcctttatactggcgtaagattcggcctctatccacttagagaaatagtcggtcaagacgagaactaactttttctgcttcgagggatgcataggtccaattatgtccattgaccatcgcatgaatggatacggcgaggcgattgatgataagagctcggctggctaatggattgttggcgcatgcctttgacattttttgcatcgttttgaataattttcgcagtctttgatcattgtcggccagaagaatccgtggcgttttattttaatggctaaagctctttccccggaatgattttcgcacgagccaccgtgaatttcctttatgatcttgctaacctcttctccttccacgcatgtcatcaagggtccggataatcgccacttgtaaagttttttatttcctagaacgaaccgtgcagcttgagctttgagtttccgagctttccatttgtctgagggcaatttcccttcggatatatagcttttgatgggttctatccattctgggttgtagtcatctgggtcgtcttgatccgcaccgatttgtattaggaggacgtgttcttctttgccgagttcaatacttggcttctcaatgaattttattgggatgattcttctcaggctcgggtcggatgtcgaggctagagctgataatgcgtccgccgatgtattttctccctgagggatccttgttaactcgaattcgtcgaaatccttcgccagattttgtacatgaattaggtaggcttccatcttttcgtcctgagctgtgtattctccgttgaactgattcgcgacgagctgagaatcgcaaaaagctcggatttttcctatctttagcccccgagctagattaagtccggcaacgagcgcttcgtactcggccacattgttggtagcctcgaagtttaatctaaatgactgctcgaggacctctcctcttggcgaggtgaggcggatgcccacacccgagccttgctttgatgacgagccgtctacgtgctgtagccaagttgtgtcgagtggattttcttgggcctccttagtgggcagttcaacgataaaatcagctaggacctgggattttgcacatgttttgttccgatattcgatgtcgtattcgctgagctcgattgcccatttagccaggcgtcctgattggcttggactgtgtaagatggcgtggagtggcatggatccctttactatgatggaatgggattgaaagtagggtcgcagcttccgagccgacattatgactgctaaagcaagtttttccatttgccgatagcgagattccgcgccggtgaaagtctgcgagacgtaaaaaatcttcttgagttcttgaaaagcttcttcgcatcgggtcgtccattcgaacttcttgtttccccaaaacacatcgtaaaaggccaagcatttgttggttgagcgagagatgaaacggttaaaggccgcaactcttccggttaggggctgcacttctcgcttgttctgaggtgacgccattcccaacaatgcctcgatttgcttcggatttgcctcgatgccgtggtgcgtaactaggtacccaaggaactcgccggatcttactccgaagcggcactttgcaggattgagtttgacgttgtagatgttaagctgcctgaaacattcgcgtaaatggggtatgtgatctttctctgccatagatttcactaacatgtcgtcgatgtaaacttccattttcttgccgatctctaatgcgaagattttgttgacgaagcattggtaagttgccccggcgtttttgagtccgtagggcatcactcggtaacaaaagatgccttgttctgtgtagaaagcggttttttcttgatcttcgggttcatcatgatctggttgtaaccggcgaaagcgtccatgtacgatagtagcttgtttccagaagttgattctatgaggcgatcgatgtgcggtaatgggaaactgtctttcgggcaggctttgttaaggtcagtgaaatctacgcagactctccatttgccgtttttcttttttactacgaccgggtttgcgatccaatcatgatattttgcctcggtgatggagccgatcctcagcaatttctctacttcggctttcacggcttctgctcgctcccgacccaattttctcctcttctgcttgataggtttgaaagtcaggtcgatgttgagctcgtgtgaaaaaatgtcaacacttactccgggtaaatcttctggggaccaggcgaacgtattgacgttttctttgaggaaagcggtgagttcagttgttaactcttctcctagatctccgccgacttctacgcatcgcttgggcttttcgtcgtcaagggatatggagattaccagatcgggagttggtgttgcagtttcccgagcctcctcgatctttagttgctataactgctcggaaattgatttttcttcagcttggccaagcttggccttcttatgactcacgtcggccgtcgattcagtgacggggttcctgagcttgtgcgctgccatgaaacagattcgagcgtttttctgatttccccagatggttttcacgtcgtcgcttgtggggaattttaggcagagatgatatgtcgaggcgacggctcagaatttatttaaccatggtgtaccgatgatcgcgttgtacacgctcggctggtcggtaacagagaaatcgacgatttttgttacccctttggctcggactggtaacttgatggtcccgagagtcatagtagtttccccagagaatccgagcacaggtcgtggagttgtacgatttgcgtcatgtcgatcttcatttctcgcagagttgtaagaaaaatgatgtccagtgtgcttcacgtgtcgactaggactcgttcgacgttgaaatcaccgattgtcagtgtaatgactaaaggatcgttgtgcggacggtctaaactgttggtatcgctttcgtgaaaagttacttcgtcatttggcccgttaaatggccgcgtccagttatgattcgcgtcggctttcctttgataagctttgattgatgccgcagtgtcttgacagaaagccaaatctcctaaaattgtgaagatcctcccccgagcagcttctggctcatcgtcgtttgcttcgcgattacctcgacctcttttgggtccttcgaagttcgctgcgggggccgcctgctcgggattggccacagcattgacctgctcggttttacccttttccgcttccaagtcttcgatggttaaagctccaccgatctctcctgctaggaattttgcagccaactttgctccgaggctacgacatctggaagtatgatggccgtaactcttatgcaactcacaatatttctgctcgtttcctgcgagttgatccttcgtccaagtgtaggattctcgaccgcgtctacgaccgtggtctcgtcctcggcctcgggcggcctcgcctcgcctcgaccgcggcctcgtccttcatggtgaacgaatgtcccgccttgagcgccctttttgttgtttggagcactggtatcgatgcgaggcgtttgcttggatggttcgtgtcttttggatagtagttccatttcttcttcatgggatacgtaatccgaggctcggtgcaaggcgtctcggattgtctgtggtttggacaagtttaattcttttcgaaattcggatttgtaccatagtgctttcttgagagcagatagagccgctacgtcgttgattccttcgactttggctagggtagatcggaattttgcgaggaagtctcgaagcgggtcattaggctactgagatactgaccacaggtcggcgtctgatgtaccgggatcgattagcaccgaatattgcttcaggaagagtgtcgatagctcctgaaaactgtccacagaatttccttcgagtctcgagaaccaatccagagttggccctttcaagtgctctacgaacaggtgacagagatcggcgtctctttcttctggtctaaatttggctcgggccacggagatgatgaatgacttcaagtgtcctttcaggtcggaagatccgttgaagtattcgattcttagttttcctggatctgagattatcgcgttagagatcctgtgtgtgaatggtgtgttgtgggactcttctagaatgcggtcgatgttcggggccgaggagactgcgttatgcatttgggatcttacgagcttcatttcgttttctgccttggctagggagagcttgatagcgcttatttcctgttctctggcgtattcctcagcccaccgaacgttctcttccgaatcttcatcgtctgagaccccgatctgatcggcctcggcaacttctgctcggggaggagggagctgcggttcgtttcctctcgctcgattcgtttcccgatttcccaagatcgccggttcggttcgatctcttccaatttccggtgcggtttggcggacgggccttgtagtattgcgaggcgtgtagaacacgagccgtgttgggttgaggtctactgccgctcgtcgatcctgaagatgcctcgcgccgaaacgagtagccctgatctgtccttgggaggtagctgcttcgagttgttgcgccaaggatcgatttgcctgttcttaatcgttcaccttcttctgaagttgagccatcatacttcttagttctgctagggccgcgggagcaacgtcttcaggaacgtctgtctggtttggagggattgggtttccctctgaacttccagtgctatgtctgcacatttaccgcttcctcttattactctacctccaccaacctttactccaaagcctctggtttctgtgactcgccaacctttgtgtttcactatgccttcgtgaatgaagcaactcgtggccccaaaatctatcagtattaccacgcttgtgctcctaatgtatccacgcatcttcatggatttacccctcgagttttctgacatagtgcctagtgagagtatctgcaagccttcctctgcttcagcttcttcatcatccaaaggttgtgagagtcaaaactcgcacaatagaaattgttttaagggtttcttcaaagaacgagtctttgtgagattctcaaagaacaacaaaattgttgattaccgcagacggtgttcttggttgtattattgaaatagtaagaatttgatcgtacaactgtttttgaatatgaaaataagtgtttttgctttcaaagtcagagcgtttttgatagccttaagttgagagcctctctcattttctcagaagttctttatatagggttttaatagatcgcttctcgcgatattctcggaagatttctccttatctcagagctggcaaaggagatttatctttatcttccgaagattctggaaatccctatatttggtgatatcctcggagattttctaatctcttccgtgtttttcgcaaatggtatgtttgatctcatattggttaagtcatttcttgaaggttctgtcccgatccgatgttcctccgagccgggttgagttggctctcaggttgtggttgagtggctcggacttcgttaatcgaatgatcgctcctgaggcatcttaaggtccgcctcggggtgattctccggattgctgtccgaggcgcttcaagatcaggtcggggaatcctttgtggtgatgttccgaggcgtttttggcgtcgcctcgggacatttcctcgacataatccccgaggttttttgggcttggctcgggatggttcttcgacaaggtcgccgaggcgttaaacatagtcgactcggtttattaggtggaatccgaccccaacaaaggttcagctaattcctctattaatgggctctctttttcttctttagtgacttcgagagttttcaacctttgctgcttgcagcggtgacccagaaaccacctatcaccacagtgacgacaagggttgtgattcctgccttctccagtatttcctgaaccactacttgaggcaagattgctgttgttaatgggttccaacagtctcttagactaaactctgtcgtaaaccctcgcagcggcaggtgacaagttacttgtagcaggaggacgggattgttgtctcacatgatagttatggttatctttttcttgagattcaatcagcctagcaatttccacaatatcagtcaaatttgtgggtctacacctcaccacttgatcctttagactctttctcaatccattcagaaaagcagattctaataaatcggcagtaacatgtggcaactccactatgagttcttcgaaacgacctctatacccgtccatagtactggtctgcctaatattaagcaaatggtccatagctgaactacctctactaggcttcaaccttatcttaaacttatcctgaaaatccttccaagtataaattttctccctatcctttgaacatctctaccatgttacaaaagcaccagttagacaaggaattaccttttcaagcttagcttcctccgcaatgttgtgtaacgtgaagcattgttccaccctaaatagccagtcatctgggttacctccttcataatcgggtaagtctaagcctctcggcgccggtaatgttgcaggaggtggtacgagaccttgctcaacaggtgggatgtggaaacggacctctcgaggtcgcagctgagtcgcaggcgtcggacagggtacgattgctctctgttctgcctctctgagctcgaagcaggtgtactctaaaactgcggggatggaatgggtttgaaaaaggccaacggagtagactctcttccttcacgaggagggccatagatctgaaagcgtaagagttgttgaatgccttctctgatgtacgccatttccttctccatagtatcaactctgttttccagtggtgggggtggcggaggagtttcgctgggaggggggctgagttctgacaggtcaggattaaactcgatgacaacggcttttggatcgatgggagccattgcaaactctcgatgaaaagcaccaatgataagcctgtgacttatcggaacaggaaataagagtagagtgaaagatatgcggcttatgcggcggagagttaagagagagaaatagaaatgatattgaaatgattatgtttgataacaaccctaatggggaaagttttccttaaatactaaagacccccgaaacccttaaaacacataaatccttaacaccacaaaacggtgcgctttgtccttagacttattgagtagaagcaaagcttctgaaccatccagagtctcttcttccttagccacttttgttcaggactttcctgagatacttctccaaagctcttgcctttctcccgccacttctcatcttcctcttcatatttgccaatggaaccctgagcctatcaggaagagttgtcaagcgggccgctagcccgcgggctttgtccaagtagcccatggcggagcgggcttggacgttgatttttttgtccacaaattagcggacctcgcgggcaggccaattacggactgcggattatagcggacaagcccgttgcggactgcgggtagcccacgaaagaaaaaccaactcttttaaaacccttcatttctcatagaggctttcaaaccttttctctctattagagtttcttgtgcagttcaaaccctagaagtagcagttcacgctcaattgcttaataaggaaactaaaaagtcattctctatctcttcaagtttcttttttacgatcattgaagcttcttagattcagatttcagatcaaaacagagcatctaacacttgtaatggtatgttatttgtgactacacataaacaattagatgttttacttttgtttgattgatttgctagtcttgactagtttttgtattttgttaatgataggatccgttggattctgttgatgctgagtatttgagatcattagatgtggaatctcggagagtcattgagttggaacaagctagatatgaacaacaacaagctaatgatgaagcatgaggatctaaaaagctgaaaagaaaactgagagatgaaacaggaacacctatgacgcagaggaaaaaagtgtgtgaaccagaagcatcaaaaacccaaagaagaagcaagggtgatgaagcttttgcctctaaaacagagagaagaaaaaagtctgaagctgaagcatctacaaaaccgaaaaaagtgtttgagattagtgatgaagaggaagatgatgatgatgatgaagaagatgacgatggggacaatggagctgatgatgttgatgatgatgaggacaatggaaagtcatcgaaaccaaagaagagaaggcaatactcaaaagtctggaacgatttcatagtgattaaaaaggttaatcatttgggaaaaagtgaagaaagagctatgtgcaagcattgcaaatcagattatgcgtacaatgcacacaaaaatggtacgaatacatatcgacgtcatttgcaaatatgtaagctcgtgcctagaaatggtgatattagtcagatgatggtgaatgctaagacagatcaatctgttttccgcgaattggtagctaagacaattatccaacatgatcttccattttcttatgtggagtatgagagagttagagaaacgtggaagtatttaaatgcggatgtcaagttttttagtcgaaacacagttgctgcagatgtttataagttttatgagattgagacggataagctgaagagagagttagctcaacttcctggaaggattagtttaactacagatttgtggtctgcgctcactcatgaaggttatatgtgtcttacaacacattacattgacagaaattgaaggactggggaattgagaagaaagttttctccattacggtagacaacgcgggtaacaatgacacaatgcaagaaattgtaaaatctcagcttgtactccgagatgatttgttgtgtaaaggagatttttttcatgttagatgtgcagctcacattctcaacatcattgttcaaattgggctgaaagggattggtgatacattagaaaagattagagagagtatcaagtacgttaaaggatcagaacatcgtgagatcttatttgtaaagtgtgtggaaaacgttggtattgatctgaaagctgatttgttgttggatgtggcaactaggtggaattcaacattcaagatgcttgatagggctctgaagtatcgagctgcatttggtaatctcaaagtcattgatgccaaaaactacaaatttcatcctacagatgcggaatggcatcgactacagcaaatgagtgactttttagagtcgtttgatcaaataaccaatcttatatcaggttcgacatatccaacttcgaatttgtattttatgcaagtttggaagatccaaaactggttaacagtgaatgagtccaaaagttatcagaaacatgattgtcctaatgaaagagagtttgataagtattgggcagaagtaagtgatatctttgcaatcgctacggtatttgatccaaggttgaagcttacacttgcagattattgttttgcaaaactagatatcagtactcgtgagaaaagaatgaaacatttgcgtgctcaactacgtaaactttttgaagtttatgagaacaagtccaatgcggtatcacctacaactgagtctcgtgaagatgttacacatgatgatgaaactgcaaaagggaattttagcaattacgatgtaagtttcttatgttttgtttttgttagttaatatgcagtttttttatgaaaaacagcaagtcattagtttttatgttatgttattttgatttcttatctttgttataagatttctttgcttttcgcaaagcaaacgttgttgccaatggaaagtcgacgttggatatgtacttggatgaaccggcaatgaacgtaaaagggtttgagaggttagatattctcaattattggaaagataacggtccacggtttggaaaattggcttccatggcttgtgacattctaagcattcctatttcaacagttgcgtccgaatcattgtttagcatcggaactcgagttctaagcaagtatagaagtcgtcttttaccgagaaatgttcaagcattaatatgcaatcgcaattggttaaaaggttttgaatcttatgaaaatggtaagtaagttgttttcataagttttatagtcacacagtcttagtctatgaattaacattgttagtttgtatgatatttgtagaggagtatgaaaaatttgatgctgaagatgagactctaccttccttccagtcgcttgtggatgatgcagatggatgttgagttgcagattttattttaagtttgatattcatgtttggatttgagttttagttcatgtttcagttatcatgtttgcgtttaagaagttgcaggtctttctcttgacttaagttcaatttctgtttcacatttgagtttaacttgttacaattaaggtttgaatatgagtttaagttcagattaaggtttacaaatgagttgcaagatgagacacgacattgttccttttaggatattttggatttgtgtttaagttaaggttctgatagcacgatttcgcagcttagagctatctcagattatcttgcttcagccaagcaggctgcagttcttcaggttcttttacctgcaaatgtacaaactgatatcgatcagatcggatcgaaactggatttctctgtagctattatcactgagaaatcgactagtaactccaatcacataagacatttccttgattctgtgtaacaaactcctcctaacagtctatctgttacagaatctttggattttgaaaaacaaatgtataatagtcatttctgtactcgcaggagagtggcgcttatcgtagtttcaatcgtcatgcttgttatcatttcttttgctgcagtttcttcgatttgtactgcagacacatgtgtggcaatgagcgaatgggttgagagaccatcaagcaatacggctatggacgagatattgccttgtacagacaatgccacagctcaagaatccttgatgcgtagcagagaaatgcccgcgggccgacccgtatatctgctgggctttgcgggccgggcttggacactgataattttgtctgcggtcctaaacgggccaacccgccgcagcccgaaaaaagaaagcccactgcggggcgggctagatgggcgcgggccggcccgtctgacacctctactatcaggtcttcccaccaaaaccctaactcgttggattgagtaatcttgggaggagacttgtcgttgagataacaatgaacaatttcagatgcagaagagtagcctgagaagagaaagagtaaacaacgtaggagttctcgtccggagaagttacgaaaacgaccatgttggctccggagagaagacatagatcagccgctttggagaagagagttagacggcgtttgctgcaagctatggatcgttgttcttttgtgaaccgcttctcaatttcaatctttctctttgttcctctcttcctcctcgtgcatgtctctgatacgttagacgacagcattcttaggattttttttttctacagagaaaataagagagaatagaatcgttaagagatagagagagagagagtgaaaaaagagtagtagaagcgaggaaccacttttataggatttgataccctaatgtattttccttttttacttactatataaatttatgaaattttttttacttctactgaattttttattttatttttgtcaacatgtactgaaattcatttaaaatgtacatctatcatggtccaataccacataatgcggtaatgagacaacaatcatcttcaggatctaatgctagtctaccaagggaacatgaatttctataattctatcaagggatgcaaggagatttgaaaatagaaaacctgcaaggagatttgaaactggtgggtcatcaagaaatatggatataggagaatcttctgaagatatatagatgtttgagcacaaggcgactctgtgaagcacatgaaagaggtgtgcgcgggaagcagcgagactcaaatgatgatgatgtggcgagctgcgtttggttgctggagttactagaacgtgatgaacaagtcattcaagatataagcaaatcatggaaagaagatttgaagatatcttagaattaggaaataggttaatgacgcttgtgtcgttacctatataatcggaagctagactttaggtttaggtagccgtcttatctcacaagatttgtgaatctcaagatctaagctagaagctattagggttcttggtgagtgaacaaagagggatacataactgttgatgtgttgtgagttggatagattaggaattggtcagtaacaggttgtgttaacttgtgtaaaactgattaaacagatctataagattgtttaagtgatttttaataaagagaagaagttcttttcaacctatcgatatctctattattctcatttggtatcagagcaggaaaccgacctgagtaaacactcaatacatgttgagatcctgctgattaaggatgtcgaagtctgaactcatgcgacctgtacctctcgatcacagagggtatgggtactggaaaacacggatgatacagctaatcagaggacaaggagaagatgcttggactgctgtagaagatggctgggaacctcctttcagcaaaggcaaattggactgaagaagagaagaatctgtctaaatttaatgctagagctataaaatgctatttactactgtctagatgacaacgagtttaatcttgtctcagggtgtgaatcagctaagtagatgtgggataccttgcagaaactgaatgaaggagatgttagtgtaaaacgaaccagattggatcagctggctacagattttgagaacatgatggatccttcagaaaaagttattgaattcagtgataaactgagtaagattgccaatgaagctaaaactctgggaaaaacctacaaggaaaagaagttggtgaagaaacttctcagatgcctaccacagaagtatgctgcacacaaagctatcatgagagtctcgggcaatacaaatactctcaaatatgaagcattggttggaattctgaagtctgaagaaatggaagctgctgaagatcaatgaaacctgaacaaagggatagcgtttaaggctgaaaaagaaaaagttcctgatccgctgcaggaaatcaaagatgatctattccttatggctagaaattttggaaaagctctgaagcgcgttgaaagaggcagaaccagagacagtcgtgatgcaagagaatccagtcgttggaacagaagtgatacagaaaaatcaggcagcaggcctgtgaagaacgagaattctggtaaaaggcgcgatgtgaaatgtcatgagtgtggtggtatgggacacacaaaaccagaatgtcctgtcacaaaacgcaaggatatgaagtgctatgagtgtgatgtgattggtcatatcaaagctgagtgtccaagtattcagaaaagcaaagaaaaaacttttctgagtttcagtgactctgagtcagacagtgaggataagacaggtggtatgctgaactttgttgctttcagtgcaaaggatgacaatgaatcgagcagtgaggattctgagtcagacaacgatgagacacagattacaagtgagagctatcgcatcttgtatgacagctggttactgctgagcaaggacaagctgagacttacaaaggagaatctgcagttgtcagcaaaactagatctcttggaggaagaaataaaggaagaagctattggtgaaaagcttccattgcctgataaacagataatagaaagaaagatgaattgtctccagcagagtctgagtcaagaaaaggagaaatctcttttgctagaaagagaactgagtgagaatcacaagaagatcagaatgctgaacaatgggggttagaatcttgatgaaattctgtctatgggaatagttggatctgatcacagaggattaggttatcaaccttctgtgtcctagacgcctcttgatagacctaagaccatgaactttgtaaagagtacaacgaatcatgaagaggaagatagtaaactcaagtcagctctacagaacacagtcaagtaagagcataaaccgatcaagcaaaaaatgactcccaaggcttcagtatcgcatcagaagactagttacagaaaggtgtggaccaagtccagacgaggtcgaagggtgtttgactgttatcactgtggaaagactggacacatcagaagtttctgttacaagttcaaagacaaggtcaaacaactctggcaagctcgaaagtgctttatagagcctttgaagtttggcaaagtatgggttaataaactggatctgtacagcaagtcacaggagcatgatgaggaaaaatacaacagagttgtagatgaatctgaggaaatcaacctgatctgcaacgcctcattgatgcaattagatgaatcagctgaagatgaatctgaggaaatcaacttgacctgcaacgtttcaattatgaaactagatgaatcagatgaggacgagcctgtagtagcaaaggtggcctacacatctacagatggatcagcaagcaatccttggtatttcgatagtggatgctccagacatatgacaggtaacccaggtgttctttcaacttatactgaagaagcttgtggaaaagtaacatttggggatggtggtaaaggacatatcaaaggcaaagggaatatcgagtgtgttgataaaccaccattggcaaatgttttattatgttgagggactaaaggctaacttgattagcataagtcagctgtgtgatgatggcctgaaggtgacgttcacaaaaactgattgtcaagctatggacgagaataaaaatgcagtgttgtctgggttacgttcaggaaacaattgctacatgtggacgacatcagatacctgtttgtctgcaactatctcagatctggagttgtggcacaagagactcgggcatatggatgttcaaagcctggtcaaaattgtgaatgctagagtgttcgtggtgttccaaaattaggagataagctggattatttgtgtggtgcctgcaacaaggggaagcagatcaaggttaatcataaaaagggttctgaaattggttcgaagaagatacttgagctaattcacatggatcttatgggtccagttcaggtggaaaacataaatgggaagaagtacatttttgtattagtagatgatttctcaaggtatacatgggttcgcttcttacgagaaaagtatgaagcagtagagagtttcaagattcttgctctgcaacttcagaatgagaaagggaacattgttcaaatcagaagtgaccatggaggggaatttcagaatgagacttttgagaagttttgtcagtctcaaggtatcagacatcaatactcagcgttaaggacaccacaacagaatggagttatagaaaggaaaaatagaacactacaagagatggccagagccatgatacacagaaatgatatgtatgaaggtttctgagcagaagctgtcagcagagcatgtcacatcatcaacaaggtttatgtaaaacctggaacaaagaccaccccatatgaaatctggaaaggaaaaagccataatttaagtcattttagggtttttggttgtgtgtgctatattcttaatgacaaggagcagctacggaagtttgcgtctagaagtggttaaggtatcttcttaggctactccacaaacagctcagcatacagagtttacaacaagagaaccaagaccatcagtgattcagtaaatgttgtgtttgacgacaaagccagatttgtattacctcctgtgtcagacgaacgaccagtaaaagctgcatccaaaccaattgaaacacctgttgcaccagtagctgaggaaacagaaaacgaacaacctgatgatcaaaaggaatctgtggaatctcagtcacctgtggtgacagctgcagccaagaagctaattgttcctaaaaatcacaaagttggtgatgtcataggtgatctgaacacaaaaacaacaagaggggtttagattgattttcatgagatgctgcagtattcgtgttttgtgtctatgattgaacctgcaacaattgtagatgcgttggaagatgaattctggtattgtgcttgcacagaagagttgaatcagttctccagaaatgatgtctgggatctggtccctcgaccagcacatgtaaatgttgttggcataaagtggatctttaaaaacaagattgatgaatctggaaatgtggttcgcaacaaagcccggctggtagctcagggttactctcaggctgaaggagtggatttcgatgagacttttgctcctgttgcaaggcttgagtctatccgtctacttctgggaattgcaggtatactgaaaatcaagctgcatcagatggatgtcaagagtgcattcttgaatggcttccttcaggaagaagtctatgtagcacagccaaaaggatttgaagatcctcactttcctgaacacgtttacaaactaaaaaaagctctctatgatttgaaacaggcacctcgcgctaggtatgagagactagctcagtttctgttggatgacaattttcagaggggaaatgtcgataaaaccttgttcataaatagaacaggagcacacattctgatcgttcagatgtatgttgacgatattgtttttggcagtactgatccaaagctggtgaacaagtttgtcaagacaatgactgaggagtttgaaatgagcatggtaggagaattgaattatttccttggacttcagattactcaatccagcactggtattttcatctctcagagtacttatgcaaagaatctcatcaaacgttttgacatgcaaacctgcaagacagcatacactcccatgagtaaagcgtcaaagttatcaaaggatgaaggaggtcatgctgttgatcagaaactcaacagatcaatgattggaagtcttatgtatcttacagcaagccgtccagatctctgtcacagcgtgtgtctgtgtgctcactatcaagccaatcctaaagtttcgcatatgaatgctgttaaacgtatcatcaaatacgtgaaaggtacaattgaatatggtttgtcttatactatactaatgataatcttgcaggctactgtgatgcagattggtcaggctgtattgatgacaaacgtagcacatcaggaggatgtttctttctggggaataatttgatttcatggcatagcaagaagcagaattgtgtttccttatcatccactcaagctgaatacattggcatgggcagttgttgcactcagttactgtggatgaaacagatgcttgcagattatggtatgacttctgaaattctcataatacactgtgataatactggggctattgatatcacaaaaaatcatgtgcatcacactcgcacgaagcacatagaaatcagacatcatttcattagagaacttgtagaagggaaacttgttgaaattcattacattgatactgagaagcagttggctgatattttcactaaaccacttgatattaatactttctcaaatttgcaaatggcacttggcatttgtgaacactgacctggtttggtttttaagggagtgttgtaacaggatccctgcacaggagtacatttattttttgtgtttcgtttccttgtacataacaagcaaaacctcctattggcaacttcattcaggcaaagagctgctcatcatgcttttcttcagagatgttcaacagagacagcctgacttgtacaaaaagaaaaaaagaaaaaaaaaagttgttttgagaaattccttttctcgctgtgataatgattgaacctctcctgttactcctaagtggtcagaaagttgttttgagaatgtctctgagtcgagtatgcggatgtgtagactaatctgagtgaaaaagtgtgtgcaaactatccgaccgagaaatagctacctcactgagaaaagaagcagtgggtgtgaaagctcctcaactgagaaatagctgcctcactgagctgtatggttgatcatgtttttcctctgttacttcaggctggctcttgtgtacatcatgctgcttcaggaacttttaagcttaaaggtatgacgtgtctcctcatctgctaaatggcaatctaatgaacttaattttctatatgctgcttcttgttaaagctgtttttggatgttagacatggtaacttcgtgttctctgatggcttttcacaaatgtctggtagtgctgtgctagacagaaaaaatgtgtattgcacaggataaatgtgtattgcacaagaaaaatttcaaaatcgattgtgtcaaaaacaaaattttaaaattttttccgtctactaatcaatttctagactgtttttgactaagcatttcagggttggcccagaataaagcagatccggttttggaagctgaaacgttcccgcttatattcatagtgtttcatcgtattgctctcacaaaccctagatcgattttgtttttctctcatgtccaaagacaaagtctcttctcccaccgccgatctcatcccgcagcttgctgctacactcgtcgctgctcttggcgctcaatgctaccgcctcacactaccgccgtctcctccgcccagaatcctgacgccgcaagtgccaccttcgtctgctaccatggcttcctccttcaatcctacccgaatccttgaccatcgcgcgagctctcaccggaatcgtcgtggggcttttccggctagcaaacgtcgccgtctggtcgatgagcccatcgattacccggatctctccaacccggcttaccaggttctctccactccgcttttcgcctctggaattgggtcgattcgcgagcttctgtcgtcctctcctccgccgacgacgtcttctcagcctccgtctgtctcgattccaccaccgtccgctccaccgctcgttctcagcgattctaaggatgccgaacccgctggtctcaccaatccgtctgctcctccgtccccgttggctcccaaaaacatcactccggttgcttcaccggtcgcagacgtcccgatgcctgatcctctgatttcgcccaccgctgagactgcagagggtgctagtgtgccagatgcggctgtctcttatgctgctcgtgctgcagctcatcgtcaggtttttgccgagagagatgaactggatagaactcttcgtcgccctttggtgccgccacacaccaagcgttttttgtctgccgctgctgctgaaaggtacaaacacatcgctaaacgcgatttcatattccagaaaactctgcccttagatcctgaggtcctgaccgccaccaagtattttctggaacactcgggtatggctcagactgtcgttgcggtggaacagtttgtcccagaagttgttcgtgaattctatgcgaatctgccagagatggaatatcgagaatgtggtcttgatctggtgtatgttcggggcaagatgtatgagttctcgcctgctcttatcaatcacatgttctcgattgatgactccgctttagatccagaggctccggttaccctctctacagcttctcgtgatgatcttgctctcatgatgacaggtgggactacacgacgttggctccgcttgcaacctgctgatcatctagataccatgaagatgctgcacaaggtttgctgtggaaattggtttccaacgaccaataccagcactcttcgggttgaccgtctccggttgattgacatggggactcatggtaagagtttcaacctgggcaaattggtggtaactcataccatgagtttggcacgtttgggacccctttcttcacatcgtctggcttacccaaatctgatctaccagctgctcacctttcagcgtgatgtgcgctctcgtcctcgtgatactctctctgacgaaccgggtgtctttgtcaacgatccgccacccacgcagcctacccaagcaccacctccgatgggtcataaactccttcttgaagacattaatgatcttcttgagatagggaagcgcatacgacgtcgcttgacaggtaagttgttttcttgcttcatgtggtgctttgcttattgtgttcttgccttgtgttttctggaattttgatgttgtggctcctgtagttgaggaagaacctaggaagaggaagaggaagaatttgatcctggctgagttactatagcttggggtctagtaataaggggaggaaatgtgtagtgtagcttttgttttttgtttttgtgtgcactactaaaactctgtgtttgtcccctttgtttcttcgggtggtgtgtctgcttgcaccttattccgtgatttgagttttggttcttgaatctttatgctaatggatgttgtttttcagaattcttgtgatgttgggatatatgttgtctttgtgttcttgtgtttttttgttggactaatcatgacaggatccattggagcttgagttgtcacattcaagtaaaaagggggagaatgaagatatatagatgtttgagcacaaggcgactctgtgaagcacatgaaggagctgtatgcgggaagcagcgagactcaaatgatgatgacgtggcgagctgcgtttggttgctggagtttccagaacgtgatgaacaagtcattcaagatataagcaaatcatggaaagaagatttgaagatatcttagaattaggaaataggttaatgacgcttgtgtcgttacctatataatcggaagctagactttaggttaggtagccgtcttatctcacaagctttgtgaatctcaagatctaagctagaagctattagggttcttggtgagtgaacaaagagggatacatagctgttgctgtgttgtgagttgggtagattaggaattggtcagtaacaggttgtgttaacctgtgtaaaactgattaaacagatctgtaagattgtttaagtgatttctaataaagaaaagaagctcttttcaacctatcgatatctctattattctcatcttcaaaacgtaagtgttttattatattattattcgtttattattactttaaattttatttctagtattgtttttcatggttattgcaattaactattttctatagtttgtatgttcacatgatgtagaaaaaaaaagaacttgtactcttaaaaatataaaaagagattttttttaattcttttgaagttgtttaatttatccaaagtaaattttatagtaaggataacttgtcatttcataaaataaatatacttttaatttttatttaaatgttatttcatacacatgagttttattacttatacataagagattgatgtatgattttttaaaggttatttattaaataaaatgatataatattgttctttgtttatgtatttgtaattttaggtaaactcttgttttatttgtttgatgattttttgtaattttattaaatatctttatcttgaaattattgaaacattaacacccgagattctttcaaactttgatatagctgattaatttggttgtaggaaagttacaatattaacagtttgattcatttatttgaaagttaaacttttggaaagttataatattaacatcttgatttactcgagattgttgcattgattcattcaaccaatttgattataggtgtgtgatattttgaaggatccgaaaaacagaaaatagatcaaatatccgaattaaaaaccgggtcaataaaaaaaacaatccgattaaattccttaaaatgtacttaaaaattgttaagtagatagaagggagctttcaatttcttctatccactttaacattgttcttctacacaaatgtctactcaagaacgtaacaaaaaccacaacaaaaaattaaataaacattttcatcaagatcatcaacacaaaccggattagagataaccttaaccgggtttattttagactcgcaaccaaacaatctctctacttattggggttttccttaagacaatgacaattataccctcttcatcaatcatcatcaattttcgtcttcccgtttcttctttgtttgaatttcccccaaattgggaatccaaaaccctagaaatctccatgagagaattcttctccatctgaatccaaatgtcaaagctaatgaccagaaccagcggatcatcaagccccaacacgattccagaccaaatcgaatcaccaacaagctcaagatcggtgacgcagacgacaaacggatcgcaccaattcgtgatacaaggatacagtttagctaaaggaattggtgtagggaaacacatagcaagtgataatttctccgtaggaggttatcaatggactatcttcgtctaccctgacggtaaaaatccagaggataactcttcttacgtctctgtgttcatcgttttggctagtgaatgtactgaagttagagcgctttttgagctttctcttgttgatcaaagtggtaaagggaagcataaggttcatagccattttaatcgttcacttgatggtggtccttatacgcttaagtacagaggaagtatgtggtatggcttgaaagtcttttcagtatcttcaatggcatatattattgtttttacactcgttttgctgctatattgaactgccttctcaggctcagagccctctaattcttgtttcttttctttggattttgaataggggatacaagcgtttcttcagacggtccttgcttgagacatctgactatcttaaagacgattgcttgaaaattaattgtacagttggagttgtcgtttcagaaatgcattgcccacggttactctcgattcatgtcccagactcagaacttggatcacattttggaaagttgctggatactttacaaggctcggatgtcacatttgacgttgccggtgagaagtttcaagctcataaattggttttggctgcacgatctcagtttttcagatcaatgttttacaatactctagcagagaacaacagcgacgtagtgatcagcgatttggaacctaaggttttcaaggtacaaatttcgagtttatagcttctcgtaatatttttctcgtattgtttgttggtacttatccaagtcgatggtccaccttatacaggccttgttacacttcatgtataaagattccctcccaggagatgtggaaccattaacggctcattcatttgacctattaaggccgtccgaaatagatgatacactgattgtaaagcttctggcagctgcggaaatgtacaatctgagtaggctcagattattgtgtgaatctcacatctgcaaaggcatatctatcagctccgtgtccaagatcttagctttatccgacaaatataatgcatccgaactaaaaagcgtttccttaaaattcactgcagaaaacctagcaggtacgatcaagatccagtttatgagatcacgttgatagataatcttcttcaagtttgatttttttactgtcttggaaattatagctgttctgcagacaaaagcatatgaagatctgaaggatgactgtccaaacctccagtctgagctactaaaggcggtcgctggttatgacgacacaagtagcagcggaggaggaaagtctcagagtgtttgggctcaactctctaacggtggtgagaccagtagccgaagggtcaggcagcgaaccacttagaagtgcttcttcacatgttgttaacaaactacttttgcttaccactcgtaaacagattaaccggtttatctagtatgtaccgaatgaaagggaagcggagccagaaatcttgtaccacaagagaagagctatgcggctgtgcactagtgattaaccggtgcttaaccggtgcttcacctttcagttccttcacgtctctgtggatttttgttgttgagtctttttttcaaattcttttcccagcttcaaattactagaaacttatgatgatataatagaaagagttaactatattcctgtatggaagttataatcttgcaacttgtaacacagaatcctaggttacatttttagaatgcctttacatgatacattaatgatatttttttaatatttttctatcacaatattttttctcgcttcaaaaaatatcacgtttttctacggcgaaaaacgaaaaaaaatggtcagaaacagacgttttctaccattttcctaccacaaatgttccgtaagaaatcaattttggtaggaaatttgattgaaattttctacaaaaaatattcataggaaaatttgtaagaaatctagtagaaaagtgaaagaatttaaaatttactttaattttttatttaattttaaaatacgatattccataacttatagtttccttcatatgtttagatttattttaataaataaaatatctcaattaggttctaccattattgcaattatttagtactatatattacaaagttgaagtgtataaatatgtattgatgactactataaattacctggacccaaagctacctaaaatctccttttttatctctaattatattagaatttgactcagactaaataagagggagaaagaaaaaaagaaaaattccaaatatacgaccatatagttaaagtcaaatcgtatccgtggaataaacaaataaaattccttgctctccaagacataaatgaaacctatataactttaaaaaaacaataaaatcattgaggaaaaaaaaaaaaaaaaaatctagtaatctaccaataaaaatttccttttatttaatcaaaacaactttccaaaacctaaaaagtaaatcagatagatttggcctctctatataaattgagttatctaattaagtgttttgtgtgttgaaccaagatggaagaagcaacgacgaccggtgaagaaacgatgtggtgtggtcactgctgcgttaaaactccgatccgccgtgaagggaacgctggttctgtcaagtatgttctcttaccaaattctttttttccattaatctttctaatgtttaacttttgtgtttataacttggatattaaaataattcgcaggtcgtgtgattggtgtggaaaagtgctagcagatgaaactggaaccgctgaagaatataatcaactctttcttcgatttcaagctttgcaagactctcttactcttaccaacatgagaagtagacgaatcaagaaaactagacgaatcaagagaactagacgaataaactgattttattttgttcatgttttttgaacagagattagggtttcatctcttggccggtttagtttggttagtgaacccgagccggttctaggttttttttttttttgggtttgatgtttgtgggttgggccttcaggatttgtatgggtctatttctagaaatagcccattgacattatttataaaatttgaaaccttctaacaaaaaaaaaactgattttattttttcattgaattttttcagacaatgaattttagaaaatcttatatttgaatagttagatattatcggaaatcttttatattcagacttaagttttatctcttaaattgtaaaccaatatggatatggttgtaaatctttttttcttctaagagataaataagatactttttgataaacacaaataagatattatatatatccaaaatatttgttacacgctgataaacaagtatcacccaatgagattagacttaacaaaaagtaatagaattaatcagttaggaataggacgagtggatacatatacatataatcgtggaagtggtgaaggaagaggtataattacaagagatggagacaacgccaaaacgatccaagactttgttaatgtcaaacggagaagagagaagaagcatgacgtttggtattgagatgcttcctgatgatttagtattaagttgtctagctcgtgtgccaagaatgtactatccaattctctccttagtctccaagagattccgttctttcctcacttcaacggagctttaccaaacccgaaacctcttaggcagcaccgagagttttctcttcgtgtgcttacgaatcgtcaacgattctaacccactacgtttgtttactctctgccggagaccaaatagcttgacgaaagttatggtcccaattttatctcccgattctattcccaagttcttgccagatgttgtactggttggttctaatatctatgtcattggcggtttaataaacaacaatgcatctcataaagtcatggtcatggactgtcgttctcacacatggcgtgaggcccaaggcacgtgtgtcgcccgtgtgagcccatctgcttgcgttcttgatggaaaaatatatgtagcaggaggctgcaaaaatctagatgcaactatgtggatggaggtattcgatacaaagactgaaagttgggagtttgtgtcgagtcctggcgaggaaatttgtagggaccttactagctgcgaaagcatagggtatgatggaaatgtctacgtggaatctatgaagacgtatggactttacgagctgcataaagggagatggagagaaggacaatactcgatgagtaggggtggtagtttatcatctcaatgtgtgatcgataacgtgctctatcgttcttggagctatatggtcgagtggtacgactctgagaacaaattgtggaatagcttgaagggtttggagaaattgtttatcgttactaatcagtatgttcctactaaatgcgtgaattatggtggaaaattggcggtattctggctcgagaaggtgtatgctaaacatcttcatcaagagacaaagatttggtgtgcggtaattacgattgaaagacgcaaaaaagaggagatctgggggactcgtgagtggttcgaccttgtgtttacaactaatgaggaaatggttgacttaacgcatgtttttgctgctactctttaattgatagatcgtcctgttgttgtttttattaagggattatattgtgtcctcctcgatttatgtaactacaaaagaatttggttctagagtgtatgattccatcttctgaaactcttctaatttacatgcatgtcttttttgttatcatttttcacttccggcaaaaacacctcaaatgtccggcaagattgttgcttaatggtagccttttacgacaatcacagtaatctttttataataatgtgtcaaaaaaacaaagaaaatattgagacacaggtttaacttcttgttggaattgaacggggtgtgagaccaagatctttggcttgttggagagctagaagcatcgccagagcttctgccgtgagagccgatctgatgtttcttgctaaggattgattagagagatcggcttcatgaaggtgacttttaattatccatccgaatcctgcctctttagtttcagctttccaagccgcatcagtataaatctgagtataacttgtgtcgattttccttatggtttgtactcgggtaggaggggatggcttggaggaggtttgttgagtgatactccattctctagcttgtatgattgtttgttgcaaagcttttggtggggagatggttctatcttcaagtagtttcttgtttcgtgctgtccaaatagtccagaagatccagggagctaggggtactgcacctaatcctgtcgggggtagattgatcagtcgatacgaggcttctatgcctgagcacagtgagaggattcgagagggttccaagatggttttaaaaggagcgtgtgtccacaagtgggtggcaaaggtgcagtggaaggtctaggtctaagtagaagcatggtgcaagtgtgtgtactaatagaagtaaccccagcaattgaagtagacattatttactgtaaaattattatcagtagtgctaattaacatttatgaaattatctttattttctgttcctttaaatttttgtaaaatagaaaaaactaatatatgaaggaaaaaaaaaatttgaaaatatgaaaagttttctaaatattttgttaccaaataatataaaaagtataaaaatgtaaatttttattttattaaatttataaatgaaaataaatttttttattattagtgtctctaaatttatcattatttcatctttaattacaatagacaatcacaatagctatctcattgaatgatatttttaaaatttacgagtttgatatttaaacaacattataaatatgagaaaatatgacaatacattgaagcaagatgtatataaatatagttattagaatacatttaataattcatagtagtctcacaattttgattatactatcataagtgaccaatcgcgattagtcgtatcactaattgatactttcgacatcatgttaattaatatttttaaattataatattatatatatattaagatatttatgaaaaagaaaaaaaaaaagaattatatatgtatagaatagaaatgtaagcttttgaaaaacaacatatgaataaaaatatatataaataaaaaatctaaatttctgaaaaaaatgtgaatacattaaacttctatattaattttgctaatcttttatttttttgcgactttgattgaggtaaatttttggatttaaaaaagaaggatagaatatttgcatacatcacttgaaacttgagaggatagccaatcatattcgttataattaatatgaagccgacgagcaaacagaaaaatctgaccaataaaaattaaatatgaagataaaaataacttttgcgatttgggtaaaaaaaagtaaccaccgtctataaagattaaaggatagaataatgttaattactgtgttattttccggtttcttgagaagttgaaactggaaagaaatcatgtctatcgaatctgacacgtcgtttcatcgaaatctcttcggctgacgactgttttcttgacaatcgttttctaaaggataatttcgtttcactcactggagtaaccaccaaatatatatattatatggcagaaatgtaaataattttaatactgggtggcccgattcagagacagtgacactttaatatctgaacatatattttttaacacgttatttctttccaaaatattggtgcaaaatagtaaaatatgctatcttgtgagaatatttaggaaaatttaacgaccagtacataactaatatgagataatcaactatatatgctatatatgcgtcttgatcttctttaacattttcctacaattcaaaattgtcttttgtccttttttcttgatataatatttctttttgtgcggtcatgtctgtaataacaaaacaaattataaatacccaaaccagacccttatgaaacttcaagaatccaatttcatgtgttccatcttcaaatacgggttaaaagttgaaacttggtgaagttggaggagatctcttgcaagacaagatgacaatttgaacgatactttaatatggggcacgttaaaatgtcacgtaaaatctgttgttattcaatcaagactttttaaaagtatgttaaagttttgtgttattcatttaagatttgtaaaaagtaatctaaaatttttataaattttgggttattggattcatactcttataaaatgagtaaaagttttgtgttattcaattaaaacaaaagaatctctgattgttaatgatttcaattattatgttatcagttcatgactttctacatttttcttcacaaaataaagtcatgaaaagtcatgaaaggtattatcaaaatagagagattgtttgagagactttacaagattataaaaaaaaattaacaagcttataaaaaatctctaacaatagtttttaggatttgattgaaatcattaaaattctttgtaaatccgaaaccaataacaccccctaagtttcgttacttagaatttaataaatgactccaatgaaacaaactacacaacttaatgtaggggttctaaaattattagcttaggtatgctatcgatgatactatatatatatattttaaaacatctctcttctttttattattttgaaaattaacaaattccgctacaaaaactaataatgaaagaatcatgtttataaaaaaactgaattcgttaaataaaataattaacatatcgtagttggtttagattaaggacggaaaaaaatactaagctacaccaagtatgatgaaatacatggccacacatgccaagtttagaaatgtacaaccaattatacgaactacatgtattgcatgtccacatataccaactatatgacgacatgtggtcaatatcacgaacatctttttccggtatatcaatcgtcaaaatttggtgttgaccatccttgaccggcattgaccaaccaaaatattcaaaaaaaaaaaaatttaaaataaaaagatattcaattgaatcgtttctactgttatataatttaaaaggaaacatattatatattaaacataaatatattttgtgtatctatttaatacattgactattataattagatagtttttcaatttcaaaagtaaaataaaagtgaaataaaaataattaagcgaatttattgtttttacattgtcaataaaaaattaacgtcttatagtacaaatgtttttgctaaaattgttatcgttaattatctatatattaaaaaaaaactttgcgacctattttatttagactaaagaatatgtaaattttctatattttttaactatgtattttgattttaattttggcaaaaaaattatatttctttttaccatgtaaaatttagactaaagagtcatctacttaatttgttcctaatgaaattaattaaatatattttcatttcccttttaatttagttttgaaattgaaaaaaactaaataataataagaatcatacaaaatatattttagttagatatacaatgtgtttatttattctaaaataccataaactattcaatagagtaactttctaagtaatatcaaaaataataaaaatttatatcttttgaatatttttgttggtcaatgccggtcaatgattgattttgacaattcgtatgccggaaaaagatgttcgtgatgttcaccacatgtcgtcatatagttggtatatgtgggcatgcaatacatctagttcgtgtagttggttgtacatttctaaacttggtatgtgtggtcatgtattctgttatactcggtgtagctgaacatcttttttcctatttttaactatgtattatgatttttattttggcaaaaaactttatactttttcttttgccatgcaaactttagactaaagagtcatctacttaatttttccctaatgaaattaataaaatttattttcatttcccttttaagttagttttgaaattgaaaaaaaaaaaataataagaatcatacaattttttttgaaaaaatatagaatttttttatttattctacaaaacagtaaactattcaatagaataaatgttttaagtaatattataaaaattcatatttttaaatatttttgttggtcaatgttggtcaacgatgatcaacaccggatttcgacaattggtataccagaaaaatatgttcgtgaggttggccacatgtcatcatatagttggtatatgtgggcatacaataaatctacttcgtgtagttggttgtacatttttgaacttggcatgtgttggcatgtaatctgttatacttggtatagctgaatattttttccctatttaaaatggttgtataaaatgagctaagaaggtcactatcaatatataactacataagaccttaagaaaaaaacacattagctttaagaactgatacattgtcataatgaaaatttgggtagtaaacaaaagaggtaaaagacacatggcttaagtagaccattttttatagttattgttttaagaaaaaaaaatatatatatgaaaatatattacatatataacaaaaatatttatgaaaatttgggtattgaacatgtcacttagtgtttagtgtttctctatatatactgtagaataatgggtttagtttcacacaagaaaagaaaggaagaaagaaagagagaaaaagagagaaagaacttagctagttgaatcaaaagagtcatttctgaggaatgttgtttatatacgtgatatgatgcggttcggtacaaacttttcatgctaaattgctcgctttgacatttgcattacgagaaattaacactacaacattttgtatcttgattgtactaaaaatgtccatctatattttgattggctagttaagaggagggaataagaaaaacaaattttgattgttctttggttgatttttagtttaataaaaaaaaaaatgactagtaatttcatgagattaactatcaaaattttatgagtttttgtatattaatgaacataaaatataataagaatttaagaaattgttaggaatgcccatccaaggctaccccttttaaattccaccccttctggtaatttattttcatttatacactttttaatttttaatgaaaattttacacctatttgaaaatgttttaggttaacataatgaaatagtgattttttctgccaagaatattccgaagatactttttccgctaaaaatattctgacgatatttcttatttaattgtatataaaaagataggttgaacttccttgccttgttaaaaaagcttcagaagccattatcatgaattaaaacataggagttcgtaaacaataccacctctctctactaaaattttaaaagcagataacatatgctctttttgtctggcctcatacctagtgcataatccacatcatttcacaaaaggcaaacctcgtgcccacattattgatgcaccagaatatgtatcatgcatacgtttaacaccatgtgagcccaagattgacaacacatactgaaacttgccaagctttctgaatctagcaatagttgattttgtatgacatttctattgggagatcgatgagatcgacctaaaccgagtcgaaaccgatagagattacaaaccaaaatcaagatatgattatggaaatattgtggattgtcaatatccgagtttagtaaatttgatattatgtccaattatattatttacattgtggattgtcaatatctgagtttagtaaatttgatattatgtctaattatattatttacattagagtttatcattttgatgaaacttagatttattttatctttatataagacaataaatcttgcatctttattatgataatagtctaatataattcttcctaaacacttttgtgttctttactctcatcaatttatcggttactaaaattatcttaacccataataagatggttgttatgaatatattgttagaagttaaagcatgttaggtagattgcttgtatctaagaccatcttcattgggagtatctcaatagagtttctcataataataaaagtgtaaataataaaaaagaaaaagagagagtgtagaaagtttctcatatgagaaactcttagatactctctctatctaatgataacatttctttctataacattggttcatttttataaaaaaaattaaaatttaatcatatagctaaattacaataaaatactaaaaaaaagtttttttgaaaaccttgttgagtttcttattgatggagatgctctaaggttgtgtgttatgatgattgttgtatagcttaagaaattgttctatgtttcgttcactgagtaaccccctttttccccttctttacgaggtgaagatgatgttgaatagctgttcaagcttgtctctcttcatggtgttctttgggatttgggtttatttttcaataatacaaagacatagtttttctttaaatttctttaattatttttacgagttttcggtgttacttttatgaatttactaagaatgcttcttgaacaaggtgaatgtgaaagtgttaaggagaaataataagtatggaataatgttttctaggaaaagtggtacgccttttcagtatgaatatgttacttaagacaagttatttttataaatttaataagaatgcttcttggataaggtgaatgtgaaagtgttaaggatagataataagtaccgaataatgttttctaggaaaagtggcacgccttttcagtagtttgggaggaggtgttacataccgcctcatattcttgccaccaatcgtcatccataccgataactccagttctgcgatccgaacttacacttgttttatccattaaatctacctattctttgtaattttccttcaatgtatctatcttgtttttagcctttatccaactattaacatgtttttttgtcctctttaatagttcgctcataatacgatttcgatatggtatatttagaccatatgtattatagtctactttaacaagctcggcttcatatagttcaagcacaatattctcttcagaaggcgaccaatattctttctaaaaaatatgaaaatatttaaatgtatatatatatatatatatatatgaatgaatcgtataaatgggatataaaaaaaattatataacttacattctttcgtcaacgtgaagaggtaggaccttcaatgtaggcaaaatattaattatgacaaatcaatttactaaaattttagtaataatttatattttacaataattaataattctaattataaaaatagtacaaatacgatcttataaaattatttttacatttcaacaaaaatgtaatcattaaaaaaattataatatgaatgtattaaaaaatgaatgtgttctataagacaactatattataaatattaaagttatatttacataatattttttattttaattataaattagcaacgtaaataaatcttaaacaataattattaccttgatcttatataactgaaaatgaagtagtgtattctactctttttcaagattatgctgagaaatgaaatcactcgtttctgagaaggaacaatttgtttataaaatttgctttgttcttctttaggagaagaatgttatactttataatatttattttattaataaaaaataattcagataaaagaaattttaatcagccaatagcattacgtatgtatgattcacgtgttatctcttaacgtgaatgattattttctttttggttttacatgaataatttttttaaattgaggagagatagagtttcttgaagatactgaagaccgaagataatgcatacagttattttaatattacacagtttttttttattgattttgtttgtacagctttagtaacacttttttgatcggtaacaaaagttttatacaactttcattttagtcaccaatcaaacgcaaggttccaccatagttagagataaacatggttgttgcttacggatccttatatgaccatctcaaacattcatcatctagttatataccactgcgcatcacatattccatgattatggaaatgtgcttttgaaatttcacatatagcgattaatggttgcaaattgtagtaaataattttgagttttggttcggtatttcccggttattgaaaaaaaaacaatctttattcaataagatgaatgaagaaataatccgtggatacacaaagtaataaattcaagaacatagcctacaaaagcaataatactcttttaagaaaatacataacaaataatggtgttgttaatggttggaagagaatgaaatcagcaaaagatgtaaaatgcaaaagctaatgggaaaattataagattgagaaaaagagaataaggtgcactgcttggtgcatcgctccctctactagccgaaggacccgacccaaatcctcctggtgattctgcacctatccaaatttcaatcactatggttaattaatcggttgacaaagtaccgaaccaaaccaaaccaaaatacaattcttttattcaaagtacaaaaataatttgatttttttactgtggtgaattttctctttaaccggttcaagaatctaaaaagagaaatgaagtggatcgtttacctgacatcgaacctggagcataggctggggaggctccctcgtctcccatagctacaggtgctccaacaggaattccaaaaactggtaataacagaaatttaattagaactcttgttgagaagatattttgagtcactcatcaattagtaagaactttgttcttttgatttgcatgaatctgagcttaaagtagatgaattgtaaagttgtggggtaaatctatatttcagtaactttaacatcaagaaagggcaataaaataagacacaaagaaatacttttcgacgaccgacaaaagtggttgagtagtaaagttggatggctcgcctaatcaataaatgaattc

SEQ ID NO: 1348 - DNA, 97371 bp, Arabidopsis thaliana
aagcttgtctctcttcatggtgttctttgggatttgggtttatttttcaataatacaaagacatagtttttctttaaatttctttaattatttttacgagttttcggtgttacttttatgaatttactaagaatgcttcttgaacaaggtgaatgtgaaagtgttaaggagaaataataagtatggaataatgttttctaggaaaagtggtacgccttttcagtatgaatatgttacttaagacaagttatttttataaatttaataagaatgcttcttggataaggtgaatgtgaaagtgttaaggatagataataagtaccgaataatgttttctaggaaaagtggcacgccttttcagtagtttgggaggaggtgttacataccgcctcatattcttgccaccaatcgtcatccataccgataactccagttctgcgatccgaacttacacttgttttatccattaaatctacctattctttgtaattttccttcaatgtatctatcttgtttttagcctttatccaactattaacatgtttttttgtcctctttaatagttcgctcataatacgatttcgatatggtatatttagaccatatgtattatagtctactttaacaagctcggcttcatatagttcaagcacaatattctcttcagaaggcgaccaatattctttctaaaaaatatgaaaatatttaaatgtatatatatatatatatatatatgaatgaatcgtataaatgggatataaaaaaaattatataacttacattctttcgtcaacgtgaagaggtaggaccttcaatgtaggcaaaatattaattatgacaaatcaatttactaaaattttagtaataatttatattttacaataattaataattctaattataaaaatagtacaaatacgatcttataaaattatttttacatttcaacaaaaatgtaatcattaaaaaaattataatatgaatgtattaaaaaatgaatgtgttctataagacaactatattataaatattaaagttatatttacataatattttttattttaattataaattagcaacgtaaataaatcttaaacaataattattaccttgatcttatataactgaaaatgaagtagtgtattctactctttttcaagattatgctgagaaatgaaatcactcgtttctgagaaggaacaatttgtttataaaatttgctttgttcttctttaggagaagaatgttatactttataatatttattttattaataaaaaataattcagataaaagaaattttaatcagccaatagcattacgtatgtatgattcacgtgttatctcttaacgtgaatgattattttctttttggttttacatgaataatttttttaaattgaggagagatagagtttcttgaagatactgaagaccgaagataatgcatacagttattttaatattacacagtttttttttattgattttgtttgtacagctttagtaacacttttttgatcggtaacaaaagttttatacaactttcattttagtcaccaatcaaacgcaaggttccaccatagttagagataaacatggttgttgcttacggatccttatatgaccatctcaaacattcatcatctagttatataccactgcgcatcacatattccatgattatggaaatgtgcttttgaaatttcacatatagcgattaatggttgcaaattgtagtaaataattttgagttttggttcggtatttcccggttattgaaaaaaaaacaatctttattcaataagatgaatgaagaaataatccgtggatacacaaagtaataaattcaagaacatagcctacaaaagcaataatactcttttaagaaaatacataacaaataatggtgttgttaatggttggaagagaatgaaatcagcaaaagatgtaaaatgcaaaagctaatgggaaaattataagattgagaaaaagagaataaggtgcactgcttggtgcatcgctccctctactagccgaaggacccgacccaaatcctcctggtgattctgcacctatccaaatttcaatcactatggttaattaatcggttgacaaagtaccgaaccaaaccaaaccaaaatacaattcttttattcaaagtacaaaaataatttgatttttttactgtggtgaattttctctttaaccggttcaagaatctaaaaagagaaatgaagtggatcgtttacctgacatcgaacctggagcataggctggggaggctccctcgtctcccatagctacaggtgctccaacaggaattccaaaaactggtaataacagaaatttaattagaactcttgttgagaagatattttgagtcactcatcaattagtaagaactttgttcttttgatttgcatgaatctgagcttaaagtagatgaattgtaaagttgtggggtaaatctatatttcagtaactttaacatcaagaaagggcaataaaataagacacaaagaaatacttttcgacgaccgacaaaagtggttgagtagtaaagttggatggctcgcctaatcaataaatgaattcacattttctatcgattcttaattttaacaaaattcaaaacattagtaagacacatacaggaataattttattcattcttaaaacatttctcaatatataaatctatatccacattagttcattttctagaattccacaaagaaaatttaactatttatatgaataaaaaatcacctatcaaatgcaacttttattttcatacttttcgaatatcaatcggtaaatggtataacataaaaattatatatagtacacattatttcatgtttttgaaaaaatcactaaagatttgtctatattttccttcaatttctatctcctagatttcagtttcaaaatatctatctcctaatatactcagcttcttattatcacaaatttgaataatataagtttatacatttgagttattattggtcatgaatagtcattagtggtcgtataactatatttgcatgcaagattatttcttaacaactctcatgaatatgcaaaccaagaactagaaagaaggtcaagaaatatacgagaacaaagtgaaggatcgggagtgatcacgccgcaaactccgggaagtttgagagcctttgccttatcaatcttgattccaagttgtgccgccatgtcaccggagaggaggtaacataagcattgcggcgagctctccactagccccgctagcgccggacaacacgtcttgtccggcttggccgcaccaccaccttctccgaccgtaacgtacgagagacagcctgtcatgttcattaggttcgccatgcagtctggtgcacccgatggtcctgacgacggagacatatccatttgtgctgacacatgtcctgttagcgatgctacgatgagaacaacggcgattactacaacgttagacattgttcttttgcgttggtttgagagacgaaaaaaaattgtgaagataaataatctcgtgagcggaaacaaagctatattaaaggattttagttagttgccattaatgcgtgttaataacttccacctaccctcttattttattttcctgtatttaaaagtttcttattataaaacaaaagctaataaaaaagttgtaaaatacataaaatgcttattaatttgttgcggtatatgaaatgaactgtggtggcgagatcaaatcagtcgaatagataatgtgttatgttttcctttggctgagtaagaaattatatgttggaaaattataagatttttgtgatagtattatgaaaaccatcagaattcacaatctgtaccatctcttaaaatagttatgtttacatcaaattaaagtaacgaacaacaaaccgtacatgcaagggaataaatcatatgatgattatatatgtgagcaaaatggtgttgttgctaaagtagaacaaaaaattaaaaaacaaaaactataaataacaagaaaaattattttaaaataacatctctctgaagaaaaacatatctagagtaaatgtttttgaaaaaatatttaacatatatgaacttttggttttgtttgattttggttcgaagtggatttatttgatgtttagaaagttgaatttgtagattataccatgaatgatagtaatttttaaatgagtatttggattttactttatacaaaaatatttcattgtccaatatagattttagtataaaatactttaacattttctattttatttgaaagactaaaattaacttgactgtacatttttcattaacttagaaattaaaatttaacaagcgaaaaaataaattttttaaaatagtaaatcaaaatctattttaaagcctaaatataatttccatctccatgtgttaccgacctttgtgtgtattgactattgagtaggcagttgatacgttggaaagcgtttgaacgcattaaagagagaccacatgtgatacgaatatgataagacagatatgaaatattactacatttttcagaacatgatttttttccttcataagcatagtgaacaaatgtgactatatgaagatataaaaatttaggtatagatgtaattaatgaagccaccattctcttaccgatttagataagcaaccacatggccatcttcataacttccagctgttttggtcttcacgttatttttttgtggttctcaaataacacctctttcttagttgaaataaaatgtctcttcataaaaaatttcttagcaatgatgagaaagatgataaggaaagtgaattaaaccaaatcaaaatcatttttaattttgttaatattaatttccgaatcaatattataaaactaaaataaaatctaaaatagtttgggggactgacacaaatattattaaaaaaactttattattttcaaaatgactgattactaacgcagcgattacaaaaagaacaatgtcatttcttttcaaaagccatagaatttaacagcaaaaaacttagagacaagttcaagtaaaatgagataaaaaggtaaagaagaacgtgtcgagaaatcgctgtccatagaggtttgttcatttaactctgttaagatgatctttccgattggattttaaagttttaaaatacaagtccaagtttgattttatatacaaaacatctcagatataacataaatgattacaaattcaagggaagaacgtgtccacaagtccttgtccacataagtattgttcatttaactctgttaagatgatcttctcgattggattttgagataaaaaaagtaaagaaaaacatgtacagaaatcgttgtccacagaggtctgttcatttaattctgtgaagatgattttctcaattttgcaccaaaatgtaaagaagaacgtgtccagaaatcaatctaacatctgtgaatgaaaattagtctcaaatttaaggtaaaacctccatcaatttcagagaaccagaactagcaacaaggttcttcaataagtgaatcaaccatcaaaaaacttataaaccgtttatgatgaatacataagataaccagattttctgaaaagatacaacccaaatataatcatgaatcaaatccacataacaggaactaagcaacgagttccatcaattagtgattcgaccattgctatcaaacgattcgaagtccactacaaggctttaatcccaattcaagagaaaaatctcgaatatgtaattggagaagcaagacaaagaatcaaagagcaagtaatcaaattaattttacaacaaacagcaaaaacataaaacgaaaagcaaaccacaaatccaattcaagcattcaacgagtcatgtaactaaattagccagattctcaaattgatggtctgaaaaattctccttcaagtcagatcaaagcagacgcggaaaatttagaaagctgaatctcaatctctctttctcataaaagctgatgatttgttgaagagggcgaaaagaaaaagtaagaaatctatttttttggcttgatttttgtttatttttcgataaagtgagagaaagagagagaaaggataagagagaaagagagagaaaggataggagaaggagagagataaagcgatatgtggttagagggtaaatgagtcaaattatccattcaaagtgcgttctctttagaaagtgcctaaccacgaaaatgttttttaaaaagtgttttagagtgtaatattctcattaattaaataatagagtttgttactaccatttgtgtcaatcctccaaataaaaatgagagcaaacactattttaatattaaattgaatcaaaaacttttttaaatagtggaaatatatatcctaaattggaaatagagaactcaaatataatagcacaaactaattttaaaataaaaaatcacttttaaatggtgaaaatatataccctaagttggaaattgggaacccaaatataataccataaactaatattaaaataaatcaaaatttcttttaaatgtttgaaatatataccctaaattggaaatagagaacccaaatataatattttaaatttatttctaatttattttggttgaataatttttatataaaattgtggtattattgaaaaaaaaattagtgataatacttttagaacaaaaaacttcatattaaatcaagtagtgctaattttggaagtttatggagtgtgtgctattattgtccgtaaaacttgttttagtgctatttttaggaatttctctaataattttttttcaccaatatatatttcaacatatttgtattttaaaaaaagctgaaattttatctaaaaattaaaaataattaaaatataaaaattaatacagatttcgagatgacacatggatttttaatttttctgaaacaaattggtcaatcttcttgtattctttatttaagttagttttttttttgtggtctaaaattttattattgatcttagattggaaccaaggtgaaatacaaagtccaaaagaggaaaactaatgccagacggacgacatgaaagtccccggaatcaaaatcggtggaagacgaaatttccccggaaactaagccttatagaagggaaactaaaaacagtagtacaaagcaagagctttcaaaccacaaacgcaagaggtcgaaacccaaaactaagaaagaagcaacaagcttaaaccttaacaaaaacaaaggaccacaaaaacacaagtaaaccaaatcttctaaagcacatgcgattgagatttaccaaggatgcccgcggccaacccaaagataacatctacctcctccgatcacgatgagagctgatctctcagaaaccaagaaccaacacttcataactcggtaagcaagacaaatgagttaagcgaacctcgagcacacttccgaatacgacgatcgactgctgcgtccaactgcgtactagaaaccttcaaaacatgatcctatcaaaacagatcaagaaggcaacgacaagaggaaaggcctaacctctcgaaatcaccactcttaagaccaagaataacgaagaaccgagatagataacaaccacaacaaacaacatcatggagaagaaggccttgtaaacttagaggtccatcgatctaaacaaacaaaacgaaacttcttcttagcaaggaaacaaactcaataatgtgatacaaaggtttagacgagcagactaggaacgggaggaatagcaaaggctggactgaacctgattaaagcccaaacaccactcaaattagtttattttcttattttccaataaatatattttttaaaaataaaatcaagcaacatgttgactaataaacaaaactatctatttagtgcgtcacaagttaatgaggaaaatatcattcttttgctttcaagctgatgaggaaaatgaaagaaaaaaaaactaaaaaaaactagacataaaagaattttttcgaacgaacaacctctttatctaagattgacctatttgtttattcggaagaacaatctctaaaggattaacaaccatgttgcgctaagattgcataagctgaaatagaagcagacatgttgattaaaaaaattggaacataaagactctgtttaatgaagggaactaccgccacaactttacgatctcgaatattacttaagtctgtagtgtcagtttcaaccttgagatcttcagttttttacttaggtcatcagtgttagtttgtattagattgtatatatagacagtccggtttagccggttaacttagattgtaattggtttattcggtttagtgtagagtatataaactcatatttgtacattatggtacgatgagaaatacagaaaaaatttcacatatctctttgattcatgttctctatcatggtatcagagatttttttttgcgtctttcgagttgattttaccttccgatcttcgatttcttcataaattctttgattattcgcttctctttacatcgattgttcttccgcactctcgattttggcgaaaatggtgaagaaaggtggaaaaatgatgaatctcaatgttacacctgacgatggtggttctgttgctcgatctactcgtaactcgatgattgttgaagatcctgaagttgcgagagctcaacaacagctcaatcggtgattcgaagcttctgaggtccatggatcgatgttgaagaaaactgatttttttgacaatccattggttctccattcatcagatcatccaggtttatcgattgtatctcacattcttgatggaactaattacaacagttggtcgactgcgatgaaaattagcttagatgcaaagaacaagctaggcttagttgatggatcgttgtttagaccttctgaagatgatttgagtttccatgtgtggagtagatgaaatcgtatggtgaaatcgtggattcttaatgtcgtgaacaagaagatatatgatagcatattgtatatttaggatgctatggaaatgtgggatgatctattcactacgttcaaggttaataatctgccaaggaaatatcaacttgaacaggctgtcatgacactcaagcagggagatctggatctgttaacatacttcactaagaagaagacattgtgggaacaattgtcaaacacaaaaactcggactgtgaagaaatgtgactgtgaccaggttaagaacttcttgaggaagcaaagacaagtcgtgtgattcagtttttgatgggattgaatgataatttcaataacatgcgtggtcagatattgaatatgaaaccaagacctggattgaatgagatttacaacatactggatcaggatgagagtcaaagaattgttggatattcaagaccggtggtgtgtactccttctgcttttcaagctcaggccattcttactgaacagaacaatattctgagggcacaaggcaattcacagaagcctaagtgttctcattgcttccgtgttggtcatactgtggacaaatgtaacaagatgcatggttatcctcctggtcatccaagggctaagaagaataactatgtgggcagtaccaataagactagctcagacccagtgttgtctcagaatgattctatggtttttcaaaaagagaatttgtctgaagagaagaatgcagacatgtcaccaaatcaacttcaataaatgatttcttatctaagctccaaatctaagctctaagctccagtcaaatactatctttccatctcctgataaggctatagcctcgtcttccacttccgtaccatctatctcacagataactggtacatttctttctctttatgacttatcttactatgacatgttgacttcatctatacctcatgaaactgagttgtctcatagagcttgggtaatagattcaggggctagtcatcacgttactcatgaaagggaaatctatatagagtacaaaagccttagatagaacctatgtctggttacctaatggtcagactgtgaaaattgagggtgctagttatgttcaacttactgatgctttgtctttacataatgtgttacagattcttgaattcaagtataatttgttaagtgtgagtgttgtgactaaaactttgaaatctaaagtcagttttacttctgatgcttgctctattcaggcaattactcaggagttaatgattgggcacggtagtcaagttgcaaatctatatgtcctgaatgttgataagtctcttagacatgcttgtgagtcttcttaaggtatgtctgtttgtgctagtgttcatgttgaacctgatatgtggcataaacgattagaaaatccatctttgtataaaattgatactctttctgaagttttattgttgtctaaacagaaaattaataaaacatctcatcattgtcatgtttgtcatcttgctaaacagatgcatttgccttttaaattgtcaacacatatgcgtaatcaaccatttgaattgattcatattgacacatggggtccgttttatgtgcctactatagatggttttagatattttttgacaattgttgatgattttagtcgtgctacatggatttatatgcttaaacagaaatctgatgtcttacatgtttttcatggttttcttaatcgtgttgaaactcaatacaatgcttaagtttgttcagttaggtcagataatgctaatgaactgaaatatacatctttatatcttgaaaaatgaattaaaagctttcattcttatcctgaaactccttaacaaaactctattgtagagagaaagcatcaacatctgttgaatgtagctagggcactcatgtttcaatcatgagttcttttaaagttttgggggggattgtgttttaacagcagctttcttgattaatagattaccttccccagtcttggaaaacaaaactctttatgaaaagttaactagtgagaaacctgattatcaatttcttagaacatttggttgtttcttttatagctcaacttcccttaagaatagaaccaaatttgatcctagagctagagcttgtgtttttctaggatatccatcaggttttaaatggtataagctattagatattgagacatactcagtttctgtttctagacatgttatatttcatgaggaaatttttcctttttcatcatccactatctcggatgatgttaagaatttctttcctcaattttctcttcctgcaccaaatcatgatggaaatttgcctctagtgcaaccatcttctgatgctcctcaaaatcaagatgaatcatcatccatggtttctattccttctgaatctaaactaactaggcagagaaaactgccttcccatttgcaggattttcattgttataataatacttttaaaacatttactaaaacttccccatatccattaggcaactatatttcttattcatacttatttgagcctttcagtgcttttgttaacatcatcaccaaaataaaaataccataaaagttttcagaggctaagaatgatagggaatggactgatgctatgggtaaggagattaaagcttttataagaactgaaacttggagtatctgtgacttaccacaaggtaaaactgatgtgggatacaaatgggttttcaccatcaaatttcatgcggatggcagtatagaaagatataaggccagacttgttgcaaaggggtacactcaacaagttgggattgattttatcgataccttttctccagtagtaaagatggttacggttaaggttgttctatctttggcacctaaaatgagatggtcattacatcagttagatgtctcaaatgcatttcttaatagtgatcttagtgaagagatatacatgaagctacctcttggttatggagagttgatgggagtagaagtttctcctaattctgtatgtcgtcttcataagtcaatttatggtttgaaacaggcttctcgccaatggttctcgaaatttaagagtactttggtgggttttggttttgagaaatgtcatggttatcatacattgttcatgaaagaagctaatgggcattatctggcggtgttggtgtatgttgatgatattttgattgcaagtactcatgatgaagctgttgtggaattgaagtcacagttgagttctgctttccaactttcgggatcttggtcctcctaagttctttctaggcattgaaattgctagaaatgatcaaggtattactctgaatcaacagaactatgttctagacttgttagcatcttttggtttttctcattgcaagccatcttctatacctatggaacctaatcagaccctttcacaagacactggtgttgttcttgctgattccaaacagtatcgtcgtcttattggcaagcttcagtacttgtgtatccctagaccagacattacatttgcagtttctaaccttgcacaattctcatcagctccaacagatgttcatcttgtagtggttcataaaattcttcgttacttgaacagatctattggacaaggtctgttttatggtacaaatgcaaattttgatttgcgagggttttcagatgctgatggaggaacctatccagatagtcggaggagtgtgactggatttgctctttttattggttcttctttggtatcttggagatcaaagaaacatgatgtggtttcaatgagtactgctgaagctgagtatcgtgctatggttgtatctactaaggagctcatatggattggatacatattgacagctcttaaggttcctttcacagcacatgcttacttatatagtgataatgaagcagctttacacattgctagcaattctgtgtttcacgagagaacaaaacatatagaacgtgattgtcacaaggtcaaggaatgtattgaagctgggattctcaagaccatgttcgttcgatatgataaccagcttgcagacatgtttactaaacctctttatccggagctcttcagagctaacaacatcaagcctggagttcttaacatctatgaagctcaaggttgaggggtgctattagattgtatatatagacagtctggtttagccggttaacttagattgtaattggtttattcggtttagtgtagagtatataaactcatacttgtacattctgttacgatgagaaatacagaaaatatttcacatatctctttgattcatgttctttatcagtttgaatactatagtggcaaatcaactaatttaaacggctttataacctcatttcgctaccagatgtcattcttatcaaattacttctagatttaagcaattgactgagtaaatttacaacaacatttatcgaatgcatttcctcaatgacgtgagatgttccagtaccactgacgaacccattattgagaaagttagctatgagtttatcaaacatcctaaacaacgtctaagaaatgattgcattagagagttgaagcaggaatgaaaatataactagacacaaattaatgttcattaccaaagataactaatgagatagatgtatggactatgaataatttcatacttagtccatatgcaagtttcaaaatttaatatttttataaaattcaaattttaaaatattatgaggagattttttgttttttttcttgtttttttttaattgaagactttaaggatgagttatttatatgatttttaaaacaattgtcaataacctattattatatcttatatatagaaaagcttaataagtgagctgaaaacttttctctcataagtttttttttcttgatttaaggctttaaaacttaagaaacattttatcaaatcatctatgtttactgtgattagtagcctgcttattcacacaccttagagcaaatccattgaggagtcctaattgaagctccttacatttttataatattaattttaaataatttaaagtttggagtttttttgttgaatctttacattttttattgtccaatagtgaagtttttaagtaggtttattaaatatatatatatatatatatatatatataaatataatgtagttttttatttaacaaaacataataattattagaaatattaaaattgtaaatataaaagtaaaacaaaatacatagaaatgaaaaaattgaataacaataaaatttaagcttgattcggaccaaatttttgtcatctatgttcaaccaaatcagtttcatattaccgagatttgaaggcatatatgtagaataggtaagatccacttgtgaaaacctgattgattccgaatgtgtgaaatcggatacatcatactgagtgtacccatctcagatgttgtgagatttggtatggaatctaggatgttgtgtaagctagtagagaattatatggtggttaggacttgactagaactgtttcttacatggaattgatttgtatgatcatggtaataagccagcgagatcgggagtttccatgtttttcaaacctcttcaacaggttcagctttatgttttgcttgagggcaagcaaaggctaagttgggagagttgatatatcatgatttttactgatttctaacatagttttagaatagtttttagagtttttctagtccttttcgtatgttttgagccattacatgtgtaattatacatttgagagctatggagcttaataaagaattttggaaacttttcagcagtgaagactatcagagacatttttcaagcgatggacatcacgtctatgtcgatcgacacccttatttggcaaagagaatttctacgtttcaccaagtctttaagaagtctctgaagttttccttatttgcaaaatagaccctgcatatttttagtaacctatatacataattttatggtcattgtttagacctatgaaagttttgtaagagatatacttttggagagaagaatcttatccctgcaaagaagattatgaactccttctactcttcttcatattataattcaatgaaatttattcagattatgatttgtgttcctttgatcatgtccgagtaatcaccttgttgggtttagggagtctcactagagatttagattgattagtagatcgataaccccttaggattatttttagagtctttcatctataattgttcttacttctggtttcagattgatcacctagaacttgatattagaaaatagatatacacaccataagtatatgttatcagaactattaattatagatgagcctggtttataagtgtgcaataagaatcggtctatctacttaggtgaacttatcgaactcggttagcatgcatgtttaggtataagatttcacggcacatcaccagaaatctaagctctaggcatagtgagtttcacgaaacatcactagttattctataattagagtttaagttcaaggatagttcgataacaattttgatcatagctagatttaaaatttatctacttcccgacaccatccctagacctgacactttaatctcctgaatctacaactcaatttgctgttttattgttttttacttttatctacttagtctagcttaatattaatcatcataagtttattgtgtgaacaacgagagcttagtggaaattgacccttaagtgctaacgacgatatcctatttgagggagtaagcttaaggtaatttgagctatatcatatatcatcaaaacaggtgagcgatcgagaatattgatatcgtttaatgtacctgtaggtccaaaaaatgcgtgccatatccaaagatcttggaaagcaacaatctctaaaacgattgttgatttttcagatccaagtgtatatttccatttctaagcggtggggcaattcttcaactcccagtgcatacaatcaatgcttcatagcatcccgagaaatctacgtatctctccaatatggagtagtcgtatacgatcttctcgtatgagtcttcttagatactcatccccaaaacaaatatatgatttcttccaaaaaaaattccaaacataacatcgaagtactttcaccaatctggaggtattcgtcaaccgcatcagccgctaaaccatacgacatcatacaaattgctgttgtagcattctgcagtgatgagaaatcgagttttccgttagcatctcttctttgttcgaagtatggaattttatttgagagtcgatcaacaatacgcatgaacaacgggttattcattctaaaacagcgtcaaaatatatgcagaagaaatgtcaaatctcttttgaagtaatcgttccataactagatgtgtcctttttcacggtctctttcaatatatgctcttttttggtggctagccttggcgacgatcaccataattctctaaagcttgatcgatatattgatgacattgtcatccatcattttgtcgagattataatgcgaagaaccaaccattttggatgaagaccaattttggatgaagtagaatttcttttctttttacttaaagaagattgttttttggattggaacaaagaagagtgaagttgagtggagaaataagagtggtttcgtatgattttatagagaaaattatatagttttcaatataagtacttgtctcaatattgttttgtggtctcaaacaaaagtgatacaaaaccaaactagtggtaaaaaacaaaagtgatataaaaccaaacttatggaaagaagagacgacacaaagactcacttgcactcgtttggtttgacatcacttgtgtctcttcttcgtcgacaaacacaagacaagaaaccaacattaagagcaaataaagacaagaaaccaacattaaactgaagacaagtttaaacttcaaacttaaattgaagacaagtttatttaaacttaaacttaaacgtaaactgaagacaagtttaaactgaaacttaaacttaaacaaagatgtcatattaggaacataaactcaaacaacaatgtcatattttaggaacataaacttaagagtccactcaagttcactcaagagtgcgtaaacacaagagtaaaacaacaatgtcatattgggaacataaacttaaacaaagtgaaacaagtcatattgaaacttaaactaaaaacaacagacatacaagtcatattgaaacacaacaagactaaacattgtcaaataagaaaacattcaactagaatactgaaacacaacagacgggttatgcaagaacataaactaaaaaacatacaagcaacaagattaagacaacagatcagtgattaccttgttattaagagttatctctatggcaaagagactatcaaacaatttagtcagactaatcttctcttatttgttaattagcttctctctcaaagccaaatatttctccttaatatcccaaataagttgtacctctttcagattgccatttttttcaccaaacataatacttggcttagctttggcttttgctgccttaacaccaggggaacatatttggctttggctttggttctcttcaatgccaactggaacagaggatgatgactaaatagattgttcaaagcactttcttctctttgatgttccattagtagtatactcactgcaccatttctgctcatggcaaaccaccctacaagcatgctcaaaggtgaacttggtaccatagtctttgtaaaagatctgatgagccaagttcaccaaatcatcatcattttggccactggtttgttacttggttgcagcaaaaaagcttctcacatgcttgttcacaccctcatttatctttgcaaacctctgcttacatcataatgtgcttctcttttccagacctttgagcttctgacttgctgcaaaatactctgatatgcgttgtcaggaagctttgcctttttgctcgttggaaacaacaaatcctttgacgtgttcagctagacacttataaggaccaaaagttggagaccatttgcattttgatttcttctctacaattggcgcttcaacttcgcttggatcatcagaccactgtgtactaaacacatggacgtttgatgatatggttggtgaaaaacgttcatattgaattggtagaacggtttggttctcttgttgactagttaagaggtttaaaaagcttgaaagatgattacgaaaagggttgaaggaatccataaccttcttatgagttttaaaagataagacaaatattttatagtttgaagttatgtgctttaagcaaagaaaagctttggttttaatagcttcaaaaaatggttaggtgttaagttaaagtattgaaattaaacatagagagaaaatcaatcacagagagcttttacttaggctccgagtggtgacagtggatgatgcggtgcggaacaagcggtttagcagaagcggtgaggtttaattgtgattcgttctgaagaaacgcatcatgcggaacaagtacggttagtgcggagcaaatgtgcgaatcaatatttgaatggtgaaaaacatattatgcgattctagacaaatatttgaatggtgacgaatacaataagcagtacgagctaaatatttaatatattaaaatagattagtaatactaatataattacatttttgtatataactaatgattaatgaccaaataagcaaacatttaaaatcaagattctcttatattttctttgaataaataaataaatatatatatatatatatatatatttacaaattaaaactcatgaactgatagaaaattatacgaaaatattgaaataaatcattagatgtgtaagtagaactattagatgcgtgattatatatataaatatatagaattgactaaaaagattaataataactataaagatatgtaacgagtgaacttatttataagtttagattttttattaataattctataaaataatctagtactaatttattagttagtgtataatattcagtaattaataaagttaaatgtaaaattaatttattaattatagatttatgatttaaatttttataagaaactataaacaactaaaatgaaagacatgtacattgtctcacttacatattgaataaaacttttttgaaatatattagaagtaataaaatattaatttgtgtgttgttgttattattaataattatttatcttatataaaataaatattaaacaaaaaaagatagtggactgcatacgaaccacaccctattacatgtgttcttcaattttacttttatatgattaagaatattgttgcggtccaaaactttgcttatttttgatgttttaattaaaattattaacttataaaagtgagtgtggatggtgacaaaatgacttaccacacttggaaccacagtgttccgcgctgcacattcactcccttactccgaatggtttaagcggactaggtggtgcggaacaagcggattaagtagtgcgatgcggtttaactgcggtttaaacgagagaaacgcattatgcggaacacatgcgattgttgcataagagcggtttacaataatatgtgaatgatgaatattacaattatggtacagatgtaataattattaaatttgattaatttattttaacatcttaaaattctcaaaacatttttttttgaataaaagaatttaaactgattatctttatttgtgtaaaaactttctgattttttggaattaaaaagaaataaagaaaaagatggaccgcacggaaaattatctattatgccattttttcacaaaaataattctactttgccacccatatttatctaattttgttttcatttaattttaaatagaaaaccatgatgaattactaaagaaccttgtgtctttaggaaatttacaagatccaaccgcatatccgcggttagaaccggatccgcccaagttctaattggtttcccctaaaatcgaaatatttaccctaactatcaaatgaaattttgtaaaaaatcgaatcgactaccgtattcttcttcgaccgacaatttcgatcgaaaaacctttctcgtcgagtaaatctccctcccgtcgccgtatctctccaaatctctatcgccggatctctctcctctcttcttcttcaccagtcgccattatcatcgcccttagaatccgtcgttttccgcggccgttccaaatctccatagccggatttctcctattgtttgtaagttccataacggcgttttgttttgaatgcgaaccctaatttcttttttaaccaaaatttggttgttgttttgcaagggaattatggtttgtgcaaagttagtcgatccttcaaattcgagtgagagtgaagatgagaggatccgtgatgacacgatccgtgaagctgatgtgaaccgagaagaagtggaagaggaaaaaaaaagtggaagaagaaagctgtgaagaagaggaagaggaaaaagaagtggaagaagaaaaccgtgacgaataaaatccggaaaaccttcacgaatcggaagaagaaaaatctgaagtatatacaaatatctgaaatttttgttaggatattgatatagtgtataaagaaaactagaaaataattagtataacttattagtatagggttgtgtgattggtgaatgcaagggcggatctacgtatggcaagtagggggaacttgtcacctccaaattttctaatttccttatacacttctaagaatttaacagattgtctcccttaaaaaattaattctgcccccactaaaataaccacttctcaaaactgaaagttatttctaatttggcattactttgtttccttttttccacacataatttcttatttctttattacaatacaatcaatatcttttatccaacataattttttcattttccttttcttaattgatttttgaagttagaaaatcaatatttcatgattcgactaactactttttttttaattttttgaagtactaaatagttattatatatattttattcttaataatcaagtcttttaaacattttttgagtgaaaaaatatttatgctacaaatattttcattttttatatttttgtggtccatggaaaagtataattttttcatttcataattttcttttggagatatctacttttttaaaaataaaaaagttgttaagtaaaattattcttccaaataatagtgtagaattgtttttaaaaaaaatatattttgttatttttttgagaaaaaatattttattttttggtatatataatattagctcctggtaaaataaatggctagatccgccattgggtgcatggatttatacgttaacgtgatcaatcatatattggtttgcattacaaaattatattctgagaaaagttgataatgttgggctgagataactagtacaactattgcaacgaactctttaattttatgtttgtgtatgaattttctggaaattgatgatgaggaacaacaaatgcagccacaaggatgttctttggtccaagcgaataccaaaagacgtgtaaggtagggacgagatgcactgtgcagcagacagtgaagtatttggaggggtttaaagaagatttgccatggttcaaagcgcattcacagtttaggcatgtattccacatgcctgaggagaaaaaccacatgactcaaggcatgtggatgcttttgcttcgcacatcacagacagagatggatagaaagtgctggtttgtggtgaatggagtgcctattaggtactccattaaagagcatgcgctcttctgtggttttgagtgttatgagtaccctaaggagttctagcccagtatgattatcaaaaaagatgtttaaaaatgtatcaaggattaaaatcatatatgttgaaaagaagctgaatgaaatgaatgattgtggagaaaggaagaaggcagatagaaagaagttatctattttgctatttttgtgcaaggtgattgttgcaaagtcaaaggttgatggtaacattgatcgtttcttgctgaaaattattgatgatgtgcatgcatgcgagacatttccatgggatcgtttcacatttgatggatgtatggaagggattaagtcgataataaacaacatgaatgggaaagcaaaagtggagacatgtttctctggatttatttttccattagaggtaacaatttatagtattctatatgatgaaatgcattattagacttaaaaataatagttatgtgacgtttacattgaatgtgtagattttatcatttgaggctatcctatagttgggacaaaagtttagagaccctataaggttcgagaatgagtgtccgagaatgtgtaatagtaaattctctaatagtgtcatgaaagagttctcattggaagagataattgaggagcttggaagtgtaaatgtaagatttgtgaattatatcttattatatgtgactatgtgcttgaatataattattttgatgtttgaatttttataggatatctctagcatttttgaaccggatgacgaagagaaatatttgttgagacgcattgtagatggtaatgttgttgatgatgggataagttttgttgatccagttgttgatagttggagaacctgtttaatcaaaaagaggaagaaaatatggtggaaggacttgtttgacgaagatgtgcgttctcgaagcggtgagccaacggaggaacatgtctcaaaaaatggtccggacattagcactttgagagaagcaattgatgcaggctttaagcaagttgtggagatgttaggagaatacaatcaaatgcttataaccactgtaagaagacaagttggtgagaatgtacctccatttaacgagaatgtgaattccgatgtgaatgtggagaaggaagatggtgagaatgttctaccatttgaggagaatgtgaattccgatgtgaatgtggagaaggaagatggtgagagacatccaccatatgaagataatgtaaatgtggagaaggatgttggtgagagtgttctaccatttgaggagaatgtgtatatggagaaggaaattggtgaaaatgtgtcactatttgaggatgttggtccaaatgtagtgaaaaaatgcactgacatggttctttatgttagaggctctccaaaaggtatattcttatgtcaatctttgatcgtttttaatatttgatgtttgttggtatcaatggttctgttttcttttgaaggacatgttcaagatgagaccgaaggtaataaagctactgaagcggatatttgtgttgatgagacgcaaggcgatgatgagacgccgaagaaggaaaactagaagaaagggaagtagggtaaagggaagtgtaatgataagaagaatgacaagaaaaaaagagatgaggatgagaacgagggtgagggtggcaaaaaaccagagaagaagcgtaaacagaacccatcgagattccacaagccaccttataccacagagagaatgcgagggaccattggtcctgtttatgtttggagaaaaatggatgaaacacttgcgtcattgtttttgtgtgaacggtttatttatgtatttcatgatgtatgttttttgggatgattgatcttgttgtttgggatttatggtatttatttatgtgaatactacactacaaaaaaagtttagtttacatcatttttttcttaatatttgtattagttgtaaatgatgtaaaagactttcacatcactaacataaatgattcggatagtgatgatacaaataatttacatcagttaattaacaactgatgtcaatatacaaaatatttacatcgattattgtaattaatgtgaatatgtatcagttgcagaaaatgatgttaattttcaatcaatttatttaagtgattttagtattagtgtcgattaaaagaattgatttcaactatttacatcacttattaacaactgatattaatatttgtgtttttttttcaatagacgataatagtaaaactttgtattttattaatattttttgtatagcaaaagttattttcaatatctactaaatcttttataatttttatacaaataattattgtaccagatcgtcatttaaaaaatgaaaaaaatattttaaatttaattcaactaaaatagctcattagagattttataaaaaaaaaaaaaacaagccaacgaacaaaaaaacaaaaatgttatatgaacttcacaatctatccatgatttcttctagaaacacatctcttcaagtgttatatatataaacacacaaaaaaaaaatataatatcagagccatatatacgtgagaaaatagaaaacacaaaaatgagagaaacaagaagaaaaataattttgggttggagatatacgtacctggagctgattcactgataccaataaatataacttgattcacataaagttaacttctatggttggcatccttcaaagaagaacttctgggaaaattgttgtttttggacaattctcttggaaggatacgtgtgatcacgtctaaaatttttttgtttgtgttatgcaaaacttggataagaatttctgaaaaaaattatattaaaaaaggggttctctaattttatatacaacaattttaattaagtagtttcggagagatggtggagtgttggaatagtggaaatgatttttttaatttttcaaaaaccagtttttatatacaaccgaagaaaataatgaaaggtgaggaatttaaggaataaggaataacagttttttgacatttaaaaaatagaacacaatcttgattccaaacagaaatatttgtgaatataattataaacaaaaaatgataaatttagtatggataagatttgtcatatattgcttaattattttcaactacttctgcagcttttacaaaaatgttacttaaaaatacaattatttaaaacaaattttaattatatagattacgaatgagtggataaatgactcaaaacaggtacaaaaatacaataactaagtggcattatttgctgtagccaaacacatgaaaatcaaaaggtaataaaattcaaaattcaaaccctagatctttaagaaaatccaaaatccaaaccctagagattatcaaactatcataaacggcaaccttaattccattccaaaccataattcgatgcaaaaggaggaaaaatcaaaactttaattttatttcaatccaacttgaaacttacctctggagcttaaatggacgtcagaaaacttggatccggcggcagatgcggaagattcgggggcgtaggcggaggtttatcggcactgttattcgacagaaaaggagagaagaatgaaagagagaagaaaaagagagaagaaagaaatgtaatttattgagaaaaaaagaagagagaattaaaatacagaaatacaaagaaaattaaaagtaaatacaaaaggaaataaataaatacaagagttattaccaataaacgtggaatgtgtggaaaatgtattgtgggccccagacaaaagactgcgaagaaggcatagttgtcccatatttgggttttgattaacatcatcaattcacatggaaaaatttttaccaatccatgaatttgtaagttgttctttaagttttgagaaaaaaaaaattgggattagagaagggaggaaggaagaagacaaagatgcaatttttttttgtttttttttttaattattgtttaaaccttcttaatccattagaagatttggattatattattgatgttgaataataacatttgatatttatttcgggtgataactcgaatcggttttaattcggtatagtttatttggattgggtttggtatcgggtttgacacagtaaaccaaagataaaccataaaatttgaatatatgaagaccaaggattcgaactttcgatttagggagaaattggacattaacttttattttgtggggactgaaatagaggttcgaattcggtgtagttgttgtgcaatatgaaactttctgggggggccacatgtcgttcacccaatcatttattctcctcaattactcattaaggagataagggtaattgcacactcttgagtggtactttaaataattagtagcacgccaaaattgttttccagtttttgtgtcaaaatagattggttttcggaccgtaccttgcaatgtcctaaccacactaaaatagacatatgctaaaaatattatgcggtttgctaaaagttgaaccacacttccctttttgatttttattataattgattatcagaaaagataaaaggcaaagtagtgatgaatggtaagaaaaattaaaagcacacctagctgtttacggaacgcgctgcacattcagacccttaatctaaacctaccaagcattcaatgaaaagagaacaaatcagtcatgcatttacaagagagaaatcaatcacacaaatcaatcacaaagactttcagctaaattaaaccatgatcaacaaactagttaacatgcatttatcataattcaaaaatagatatcattctatgatgtaatgctatcacaattcatgataccaaatcagataaacaaaataacaatgaaaaacacttaactttttgtatagcttcaaatgtaaacgtttgaatatctctcaaagagataattgtattttttgcatctctagatgaagcttcattatctcttctatgtggttgtttagaaactctggtggtcctgaaatcttcaaaattcaagagagcaaagactcattcatttgtaagagaagattgagacatattttaatgctacctaatctgaacttgcaaaattcaagagcttacatcatcaatgctacctaaactaaaccatacgcaacagactaattaacatgcatttatcacaattcaataacatataacattcaatgatgtaatgctattacaattcatgttaccaaatcagagaaacaaatcatatatatgaaagttggtcaacgctctccatatgattgccacatcatcacacaagaaaattacatatgtcattctacattatttaacaaaaagtttagcataactaattgagggaaaatgaaaagtcttctattgtgttaaatcttccattaatatcacttttaactacctttttaaaactttaaaaaatacaaaatcatgctcaagtaccaaacactactttacaacttatcatatgacatttttattttttatttttgtgtctaatagtaaattggtaacaaaaagtttttttcatgtaatgaacctttgagacattagacataccaaaaagttaaaaatacgagactttttagctatatggaaagagagaaatctaaagtgtttaattaaattactagcatataatgatatggttggaacaaagaattttttgtttaatatgaagttagacaagttttaaaccacgcaagtaagataattacatgctattgtatcaatatattttatattgttgttgtatgtatccatgatagtgaaaagattaggatcttaggtctataaataatcagatcagatatatatatgagaaaagtataattgatggttcgagttaaagatgaatctaaccattacaattataactatatatatatataaataagacaaataaaaacatataaaaattaaatcaaagaactaagaatcttgaacaacaaccaaaaagctattcaagctcattggtttttcttatatactaatatagctgaacttttaaaaaataattacaagtcataattatgtttcaaaaataatgcatttaaatttatttatatgaaaagatattatataaaatagtaacacataaacccgcactacgtgcgggtattcatctagttaacaatgaaaaacacttagctttttctatagcttcaaatgtaaacgtttgaatatctctcaaagagataattgcatgttctgcatctttagttgaagcttcattatctgcttctatgtggttgtttagaaactctggtgacactgaaatctgcaaaaattcaatagatcaaagaatcattcactataagcttttcgagtaagaagtaaagttcaatagaagcaaaattcaatagaagcaaagaatcattcactccaaaccaacagacactgaattctgattaaaagatatttatattaatcaaccaccaaccctaacctagtctcaggagtcctaaccctaaattccgatcacataaaatccatagatccattcaattttacagcgaatctcctcaacgaaaacgacaactagatgaattgagctgattaagaaaaaattgatttgagagaaaacgtcgtgctgaaaaaaggccgtaattttaagcggaggaagcagatgcagataaatcaaacacaatcaaagtttttttagctgcaagctcatgaaacacatctaatttcaccgattcaacttaatccaccggtgatgaagacatggcgagatttgatggggatcgtgacagatcgagacttgacggatcacagatcttgtggatcatgataagatgatgagaagagagagatgatgaaaagagagatgatgaagagagttcatttgtcgagtttcagaaaaatcaagggaagaaagaggagagaaaaagaaatcgatttgcgaataaaaggaaaaaaaaaacttattttgtctaaataatcatccaataatataatgctacataagtgcactttataaattaaaacacctaaataagaacttgtaagatgtgtatcttatttaggtgtttatatcattggatgactatttagacaaaataagttttttttttaatttggccgtttaatacctctaatattaactaaggtatttttctttcaaatttaatactagagatattaaacgggtaaattagaaataaatggtaatttttcctagtttttttacctcttatttaatatcaaaattctgattttttatttggtttatgttttttttttaaattcttgtaaaaaactcataaagtccctacaatttagttggtcttacaagttgccgtttcgaattatgtaattatacgtagaagtcaaagtcttctgctttttttttaccaagagaaagtaacgtatttgacatgtaagtttgaaaaactaaggctctgaatgttttgtagtttttaattggttcttagtttctagtttttggattttggtttttagtttttgatttttgtagtttgtgatttttgttgtagattttaaattttgcaaaatcttgaatggcaatttgtttagcttttagttttttacatccctttattattaaaagggaagtacaaattgaaattttgtctaatttggcctcaattttgatttcaattttggattttgttctttgctattcaaaatcattaagggtaatttggtcttaacaatctcctaaactttatatgatccgatgcaatctaaactgttcaataaaattaattcccttcaatctaaaccgttcaacaaaaataagaaatttatgtcgtttttgaaatcaaaatatgatcacattccatccctaaaaacactatattcaatcacgaaatcaataatcaataatatctaaatcatatattacgattcttcactaatcactagaaatttatatttataagtttaggatatcaaatttattcaaatatttagtataagaactaaataaaccgattgtccgcggtttgttaaaacctagtaatatttatttttcaacgtttttaagttctctattttaatttatagttttttttttctgtttaaaaattactaaaacaatgataataaatattttcttaataataaaaaatttaaaagatgcagaaaaaattaaacataggtatattgcatataaacatatattttgtaaataaaaccaactcttacatagaaattaaatgaaaatctcatattaataccaaaacaatgatgtagaaaaaaaaacataacatatttaaaaaaaaaaaaaaaatatcacataaatcttctaaaaagctcacaaaatttggtttttggattttatgaagaaataaataaaatctcttaaaatctagtttctctttttttaagaaatctacttttttcttaatcatgaatggataattattagtttttgcaaaattaaaatccaaaaactgttctaaaaactgcagccatacaaagcctaaatcatttttttttggttttggttttacagaatcaatttttaaaaaaacaattatcaaagccactgtcgtcttatatatgttgctaaaatactaaaaacctcttgtattttattcatattttttgcacactagtaatttcaaattttaaaaattttgaacactgagaaaattgcaaatcagaaaatggttatttattccaatgtttttcttacatttaaataagcaaaaaaacattttagttcttgagaccaaaacttgtaaaagggtttgaaaaagtcagattacgaaaccctagttctctctccggcgaaaaccatggtggcgcaaaacagtcggcgggagcttctagcagcttccctgatcctaactttagctctaattcgtctaacggaagcaaactccgaaggggacgctcttcacgcgcttcgccggagcttatcagatccagacaatgttgttcagagttgggatccaactcttgttaatccttgtacttggtttcatgtcacttgtaatcaacaccatcaagtcactcgtctgtaagatcctctctctgtcacattgttttgatgattcttgaattcgtttcttgtacaagttgttcaatttcaattggaatctatcactgtaatcttgatttcattctttgatatagagaagaacagaaaaatacttcattgttgagaaacttcatatacttatctgattcaacattagtctctgttttgctcttatatttggcttcttagtttcctagtatgttttcttcttggcagggatttggggaattcaaacttatctggacatctagtacctgaacttgggaagcttgaacatttacaatatctgtatggaatcatcactcttttgccttttgattatctgaaaacatttacattatcagtcacacatataacattttgctttgagtcatatagtgaactctacaaaaacgagattcaaggaactataccttctgagcttggaaatctgaagagtctaatcagtttggatctgtacaacaacaatctcaccgggaaaatcccatcttctttgggaaaattgaagtcacttgtttttttgtaagttttgaggaaaggatatgaagtttttagttttgtatcagtagctgaatacgctagtgagtaggtgttagtgttactttcttttgctttctctctgtgttatgacattgtaagtaattgcttgacatgaacgacacaggcggcttaacgaaaaccgattgaccggtcctattcctagagaactcacagttatttcaagccttaaagttgtgtaagtccagctattaccagcattgctaagtaccatgccacacaattctttgagtatattcgttcacttgatattgatacactttctttgtcttatctttttgcagtgatgtctcagggaatgatttgtgtggaacaattccagtagaaggaccttttgaacacattcctatgcaaaagtaagttctgttttttccttttttttttatgaccaacattttcccttaccacatgctggttttctaacacaaagctcatttggtacagctttgagaacaacctgagattggagggaccagaactactaggtcttgcgagctatgacaccaattgcacttaaaaagaagttgaagaacctataaagaagaatgttaggtgaccttgtaagaactctgtaccaagtgtttgtaaatctatatagagccttgtttcatgttatatatgaaagctttgagagacagtaacttgcaatgtattggtattggtagaaaaagttgaaatgagaattgctttgtaattggatttgtgtttcttatgtaacttgaattttcttattaaagaatcatatgagtttcaagacagtaacttgcaatgtacatggtaggcctgagtaaataaaccgaaccgaatgtaccaaaccaaaaccaaaacaaaaataatcgaaacgatctgaaccgaaaattggaaaataaacgaatggatactaaattctataaccaaaagaaccaaaacataaaatatccgaaatagaaatatatttccaaaaatattagttatatctagactaaataattaaaaatagttgaaaaatatataaaatactaaaaatactcgaaaataaccaaaaatatctagaaatatccaaaaataatcaaaattatccaaaattaaccgaaatatccgaaaatattcaaagtaaaataatcgaatggatactaaattttaaaacagatggaaccggaaccaaaccgaaaccgaacagaacttttaaaataactgaatgaatacaaccgaaaccgaatggataaccgaacgcccatgactagtatatggtattggtaaaaaaaaagttgaaatgataatagcttttacattcttatgtaattgaattgtgttttcttatgtcacttgaaataggatttgtattttctttgtctctcttaaactgtactttgcaaagttattaattttaacttttggataaatatgtaatgtagaaacgtgtaaaaaaagttatctagaaaatataatcctaattggatttggactctctcctattctcacgagtaagcatatatcctctgttttctctatatatacgctctgatgtagaagaatcttcacatcaaatctatggaggaaagtactttagtaccatccggcgccatatacaagctttactttaagggtatagtaatcgaggaaacgagtcagttattggcgggatttggggttgcaatttttgaccaagacgataagctcttgtttcagatgaagagaccaattcatggctcggacattacggttttggaggctgaacttacggcattgaaacaaggactaaccgaaactatgaagttgggtctagatcgtatctcaatttgttgcgatcatgatcatatttacgaattggtaagtgtttccttggcgtttaagtttctcacatgtttatacataattgattatttttcttcctaggtcatggggagatccacgccggagcaagataacattgccatgctaatgaatgatgtgcaacgcatgagacaacaattgagatatagtaatcctattctggtgactagagatcaaattagctttgcttataagcttgcaatggaaacagtagtttccgagatcagcatatgtatgcctgcgacttgcagcatctgtttcaataatgttttggaagctgagaagatgttttctgttgctatatgcggtcatcaattctgtgtggagtgcgtgaaacattatatagaagtgaagctactcgagggaggtgtaccgagatgtcttgattatcaatgcgagtctaagctaactcttacaagttgtggcaatcttttaacacctaaactaaaggcgatatggaagcaaaggatcgaagaggagttgattcttgtagcggagagagtttattgtccaaacccgaggtgctcgggattaatgtcgaaaaccgagctctctacatcaactgaagaagatgtaagtactaggacttgttgtgttaaatgcggtgaacccttttgcatcaactgcaaagttccgtggcatagtaacttgtcatgcgatgattacaagagattgggtccaaatcctacaaaaaatgatataaagctaaaagttttggcaaatcagcaaaagtggagtcaatgtgcaaagtgccaacacatgattgcacgtatcgaaggatgcaacgtaataatctgcaggtatcatcatcgttacattctctaactattataattttggaatatgattatgttatttgttttggcctaattaagataggaattttctttggtttgatggatagatgtggatataagttttactataaatgtggagccgaatggaaggaaggaggttgcactcatcgagtgacgtacgggctgatcatgtgtggaatcatcactgtacctgttttgatagttggctttctagtaatccttatagcttatggctaatccaataactaaaaaaattgtaccattttatattaccaattagaagaccttttatcatgttgaacagaatatttaagtaaattttttttttgaaagtaatgttaaattagattcaaaaaaaaaataaacgtttttacaactagtgcatcgtttggtttatatgaaaaggattgaaatcagaaaattgaatgaacaacttggagattaacttcgactttgaagccagcgttggaagctagccttgtatcgacggtctctctttcgttgaatggtggtgattctgttacgcatttgcttgtcgatcccttgtattagagtggctgcagatttgggggcttcatcatgacgtcttcgattcctttcatgccagatagtgtaaacggtagtttgaaatatgtatttcatcaagaagcatgctacattgtccttgcgttgagccgagacaatggtgagaagttgattccactcactagtatagtgttgctgaaacaatcctcgagcaagcgcttccaatatttcagctgaatagctgcaagaaaaaaagatatgatttctggattcaatgcagttcgtacagaggtagcagacacccgtttcacctctgttccatcttaacattcggccacctatagcaagtcgaacatgagccgctaagcaaaccgagaaggagtgtttcggggtctcatgtgtaaaccaaactcctctatgccgatccattgtgttcgaggtagtccgaatatgattccaagtatctttagtagagaacttttctttgaatatatcatgagtacctctccacataattttgtctctccgatccgtcctttctaaccattgggaatgcaacacatcctctatagcattaagagcattgtttcggtgtcttctcctgtgacgtgttctccaagcatctgctacagtcatctgccgattaatacccatgtcgattacacctctatccccagctatgtcatataatcgacccaaaggcgaccaagagtcaaaccagaaagaggcgagctctccattcccgacttctaccttgcataatgtttttgcagcatctctgaacttgataagtttcctccaaatccaagatcctgcacttgtgttctctttaactgtccaaaaaggctccttcttgagtaagaatcgttctatccatttaacccaaagcgagtctccatgagataggattctccaaatcaacttcaagaagggtcaaagaccagcgaaccgagtcaccatattgtggggatatgactgttgcacttttttccccttatctagggtttgtcccaatgggtttacctagaaaggtttttaacgaggcaacatcaagtcatcaaatttaccaagctaatgattcgaagatatcataagtacatatatctgatgtacttgctaacagaccggttgaactattcgcggaactacttgatgaactaccttctgaagtaccacacgaaatgaagccaaacaaggaaatcttccttattctacacgtggacgcacctcaaagctacatatggaaactaggagaacatctagaccacacaagacatgtaccacacgaactttgatacatcttaccaccaaagaacatgcggagttactacttgccatatatggagccgaaggagatcaatttccaacaactctttccttctttgtttgtgcgcttatgtgagaatcttgagaccctccagaaccttccaagacgtcacaacttcctccccaagttgacaagatacaaggcacacctcacttgccttatttggacatattctacaattaatgtccaatattttctttaatgttttgtttctttttttgaagtcttagaacgttgtactcagctctatataagctgatttctcattcattgtaaagcacccttgatcattttaaagtaatagaaacgttttcttgtcaaagttgagtcctttgtcattttttctgtagttctttgtgagtgagtcactaagtacgtcaggaatctgcggattaagtttgttgagtgattcaacatccttcattcattcattgatcgagtgagtcgattaccccactgattgaacgagtcaatcatccttctatccatcaattccccttgaatcgatcccacacgagagaagcgatcgctatcgtgttagatctccatcatcgaccatcttttcttcacaagagagaagcgaccgctagcttgtgaagccaccatctctatcagatacaaagctcaccaccgagtcttgtatcaggaacacataagacgacagtttacatctagtatccctgttgtggtgattaaagaacaagctaattttgtttctaaacttgctataaaaacaatagattgtgagatcagcatacatatgcctatgacttgcgccatttgtttcgataatagtttcgaagctgagcagatattttcagctggtttatgtggtcatcaattctgcatggaatgcatgaaacgatatagaaaagtgaaggtactcgagggaggtgtaccgagatgtcttgcttcttcttttagagatataataaagaacacaatataaaaaataactctctttatttctttaggaaaataacttaaaacctaaagccctctagatctttcaatctctaaaactattaaggaataccacaccttggtatctctcttttatagagaaagaattagacaatttccttaactaaataggaaaacatacaaataaagattataggcaacttcgtgtaatgtctaatcccaatttcctttttacttgaatagcttcttcttcaaataagcttcaagcttactccaacattctcccctttaagcttgaagccatatttaaccacatcttgaacactaatgagatctctcatctctttgactttcattcttccaagagctttagttaggatgtctaccttcttctcatttcccggaatatggtccacctccacttgtccatttttgacgcattctccgattgtcttttaagcggtgaaaatccactagatttattggtcgaatccttatcggcgatgacttttttcaccggaatcggtggtagacggcggaggcgaagtcggttttctttagattactcatcttccatgtgtttaaagtttgtactggttgacgacatatgtttgggatggagtctcaatgtcaatcctcttcattaggctttggttttgagccatgttgggttttaatgaattcttgtaaaatcatagttgtggggattttatttagggaattggacatgtttacgaacttctacaaacttttattctttttgaggcacttctcacgtacaaggcacttttccttgttttttaaaaataaatggataattatatccccactcatctaaaccaaaaatttacttaaccggttagaaagattttgttttgatttggttcccttctaataaatcaacagttgatatttacagatgagaaaagaaagttaccttcgccgactgaaattatctcacaatatcaatgtcgatggttgttaattcttccgaccaagcaattactatggaaagtctcggaatctccgggtcactgtttcttgaattggttaatattactgtgcaacgatctctctcccttcaaacaaaacctctggaacaatttaaattgtgttgcctccgccttaaccaaggcattgtgacgatgttttttgcagcgaattaaccgccactgtgattggagagatgacgtagaagtcgattaggaatctccccctgattcgggttatcgtttggatctgactctgtttctgcatcgtctcctccggaagaagttttaaaaaggaaacgacctacaaggcatgatataccgattggtgttgatggatttgtagctccgatttcttcatcggccgatgtaactgtgacgtcgagggaggaatgtagagaggttgaaagagaagtgatgattattctgtttattgtaagagaggaagacgagaagctagagaggttgtatcaagttgggctccaatgataatgttagatgagcaaacaaaaaagtgctaattttatcgatctataaacacattcgcagcaaatcaaagacatacttgtccattaatgattgtccaagcagtccagtccatatggtcatcaaatgactcacatggtagtttcatactaatacataagtttatacataaacaataaacgccaatccaaagtacattatccatgtctatttgaccatttatccacatgtgtatagacatgttgagacaattttatcgagttataaacacattcacagcaaatcaaagacagacttgtccattaatgattgtccaaacagtccagtacatatggtcatctaataagtcatatggtagtttcatactaatacataagtttatacatgaacaataaacatcaatccaaagtacattatccatgtttctttgaccatttatccacatgtatatagacatgttgatataattttatcgagctataaacacattcacagcaaatcaaagacagacttgtccattaatgattgtccaaacagtccagtacatatggtcatctaataagtcatatggtagtttcatactaatacataagtttatacatgaacaataaacatcaatccaaagtacattatccatgtttttttgaccatttatccacatgtatatagacagtcagttacgtagacctcagtaggttaaggaacttctccaaatctgccaacatctctacatattttaatgtagacgtaataggttggtttgaggatatgaggacaccgtcaacaatgaggagataagcaagccgaagtctgtggtaagaagataaggtcttgtgattaacatttttgaaatatcacctaacgtagcattcatgtcttcacctattagctcttcaaaatgttggatattataaataaaattagcacacgattgaataattggagcaaataaaatgattggagaagattaataccttacatttgaggaccgagtagaagttactagcacacgccggaaacgacgaatcgattgagagacaagaaaaggaagacgatgacgggagaacaactgttgacgacgacgacggaagaggacgaattaatgtcggccgattgaaagctttgttgacgataacgacgagagagggacgaggaaatgactttgccggtagaaaactcgtcgggatgatcgccggagtcgagatgatgttatcggcgttgtgatgattttaactgcccagataaatgaaactgtaaaatcgtcgtgaaggattgggtgagaaagagaagtttctcacaaattggttttagtttagatattgagattaaaaaattaaacccaaaaaccggctaaatttgttaggttttgttaaaccaacgatttcagggtaaaagggtaattctactgagttaaagtgactaatgcttttaaagtgtctatttatggccaaagtttctaaatagtatctttacggccaaagtttctaaatagtgtctttacgtgtaatattctcttttatttattttagtcaatgtttgttgattcaatttaataaaatcagacacttgtgaaaaaaaaagagacgtattcaaacaaaattatttgtccacattaaaaaaacaaacataaagtattaatataacaaatactacaaaacaacgaaaatattgggcataatcattttaggaccaacctttgtattatacgaaactttaggtttgggatcatggaccacgttttaaaactctgagtttaaaactttaaccttgtaccaaaaaaaaactcggcgtttaaatgtctatgacaataacacaataagtattaaacacagtaattatgttacaaaaaagaaacaaaataaaaaaataaattatgtaactgttcaaattaattgttttccaacaaaccaaccaatttttaaatttttttatgctattacctattattctaaatgtcacatcttttaataaccacagttctagaaaatatatgattaatgaacaagaaaatcaatgtgttaaaacattcttctttagctactattactaaatctatactttttattatatactagaagaaaatccgggctacgcccggtaataatttaacaattgacatttttaggttaattaacttaattttaaatttaattttatttatacaatgaaaagttatattttttttttaacattttactaaatataacctatatgatactattagtatcatactattgatctattcattctaattgttaattacaaattgaatttttttatttttttgtttcttatatagttttttctcatctatatcatctctaatatttataattttttgttaaccatctctaatttaattgtaatcgtctctaagataaaaaaaaattcttgttaaccatctctattagattcaatcatattattctttatttttattttcataaattattcatttcatactttctttcctaactttgtggtcttttttttttttaattttttcttcttccattttgaccttttgtaaaagttgtatgtgtgtgtttaaactcatctaatgtttcatattatattagatttcaaaacataatttagagttacaatatgaaaatcctacgcaatgttatagtctaaacattaacaaaattactttttttttcaggttgacaaaagaaaatcactcgccttaaaaaaggtagttttggatttggcttaaaagatttggattatttttgtgtgtgtttgggcttatagcctatacgtgtttttttcatttttcatttttaagtctattaaaatgttaatgtaaccgagtaattaatgaagcctaataataataagtgtggcgtttgattttgcaaaactgaaattgaatgttcatagaatggctgatgtggcattaaaatttatttatttattattgaaaaatttgaagcttatgtggcatcataagagcaactatgaaaatgctgatgtggacacatgaagaagcctcaatgagcttcttttattagtagtaaattttaattacctaaatcagtcaaaaacatctatatgcaaatcatatattttatatatcaccactcggcacatatatatgatcaaataagattaacgtaaatagcacaaaaaattttgttttcaaaaatagcacctcatttgaaaagtttcataaatatcatccaaaaaattaattaaatattaaatataaataactaatataattaatattaataaagaaaagtatatatttcccgccaaaaaattatccgtcaattttttcgcaaaaaaagatttttatcaacaaatttcggccaaaataaatccgtcaaattcttttttttttttattaattagtcgagcagatgggcgggtctattttagttcaaagataaaaaatcaattacaaaaagtaccacttggattaaaattttgtttgtaaaacaacaccactgagatattttatttggttctcttcagaatcatttcagctttatttggcgcctttagaataacctttttcttaaaatcatccgaagaaaataattatcctaaaaacaaattaaataattttggaatgaaataaaaattaaattatcatcaaccagtccgactcagtggttccgatcatggccgatgatgagtcaagaaccatcctgttggagaagaacgaagactgccctggctgtatcattgatcgaaccaagcaacagcaacgaggcgttccttacttgcacctctccttcatctggctcgtgtcactctgcactggttaataagattttttctccttttgtgcttttgttgtgtgtttcttatactaatgtttcaaagcttttgccaaatttcagctcttccaatatcttcactgtttccatatatttatttcatggtaagctaagttgttgttgcttctaactccattgaattagcttggtttgagtttagagaatgaccaatatgtattgtggcagatcagagacttccatatagcaaaacaagaagaagatattggtttctatgctggttttgttggtaagttttggctctttgtggttgcttgaaaactaatcttggaagattcttgatgttgataacttttgttaggatcatcattcatgattggaagagctttgacatctattttctgggggaaattagctgatcgttatggtcgcaaacctattattctcattgggacattctcagtgttagcttttttactttgttcatcagagtaaagatgtattgatttttcttgtctacagattttttatcagtaggttttttgactcttttcaggatcatattcaataccctctttggtctaagcacaagtttctggcttgcaatttccgttagatttcttcttggctgcttcaattgtttacttggagttataagagtatgtcttagttttgtgaaagaatataccactatatatctttctatattaagtgactgctctagatttgagcaaatgatcaggttttgttttctactttgccatgtttcaggcatatgcttcagaagtcgttagcgaagagtataacgctcttagtctttctgtcgtgaggcttttgtctactctttattttatttcgtcattattgccaatgtttacttcgtctttaggaagaatagttttgttgcattaatgtttcaggtgagtacatcaagaggtataggattgatactaggtcctgctattggaggttatcttgctcaggtactcttgattctaaaaatctgagctagtagcttttatacctttcctgctaggcttgacttggcttctgtttcatgttctgttagcctgcagaaaagtacccaaatatattttcccagagttcagtttttgggaggtagtttattaaactattactatttggctccatccattttcaaatgctagcaaaaattgtttcctcaataggtgctttggtgttgtgcattacaggtttccatattttctgccgagcttagttatatccgtctatgctactgcggttctcatcgcttgctggtggcttcctgtgagtatgttaacataaaatagtgtacttgtacacaaaaaccgtaatcatattttttcatcaacaagttttactatatggtaatatttctttgcaatacttatgatcataaatgagttcttaagaattccagagctattgtgtgtatgacttgatcatattaagatttgaatgaagctaagactgcaaatattaactcacaaatataagcttataatctatataaatatatacaggaaactcttcatacacgttgtagaattgcacaagggagacttaatccaacagagctaaacgatgatgaaagtagaggaggaggacttgatgaacagaaaataattaataagccaagtctcttgaggaatcgtccattgatggctatcatcattgtttattgtgttttttccctccaagagatagcatacaatgaggtaagagtgttacaattcacttgcatacaatcatatgggggtatctttaactgtagcttttcgattgattcttcgatagaggatatgatattttgggtgcccttttctgtaactttgcaagatattctcactctgggctgttagtgaccgaagctatggaggattgagcttctcatctcaagatgttggtgaagttttagctatatcaggtggctgttctatttaccttacattgtttggtggatcggtccagaaaactatgtctacttatttgcaatttctctgtgaaggagctcattgcttaaccagtcgttgtaaaatctatctatttaaaatctttaggcttcacatctttgtggttcatactgatttggttattgttttgtatacagtcgttgttttcaactctgtttctttagtttcttgatgtattgtctatccatctcccccttggatgtttatcatgatttgagttacaattctttcaggacttgggcttctggtgtttcaacttttggtatacccgccattggagaaatccgtgggactccttgcggttatacgtctttctgcggtaaatcttctttattttgaatgatgttatgtgctttgatatattaggaatggtgtaacaccccggtttgaagaatatggtaattcagacggagaggtttaaaagaattgatttgaccacctatgtcaccaaagtgctcttattttttcggagtaggaatgggttgtccaataatcccatcctgttcatttctttacattttgttgttcaggtattgctgataccgctgctttcgtgttacccctatatagctttgctttctggggtgactctccatttggtgataaattgtgcatccatcataaaaaacgctttgtctgtgagttcttgttataaccctgatgcttttcataataagcaagattctaaatatgtttccgtgtaatgtgcagatctcacttgtcacaggactgtttatcatgttgaacaaagctgtggtatagttctttggctagtgtatctctatcttttacatcggtaacttcctctgccatggctcatactctcacttttctttaatataacattgtagcctcagaatcagagaggtgctgctaatggcatttctatgaccgcgatgtctgttttcaaatcatttggccctgccggtggaggggtcttgtaagtattgtcaaatgcactcacattcttgcaaaaactattagcaagtacaagatgtagacaagcttcacattgctaattcaccttttatccatgttttgttaactctacagattctcatgggcgcaaaagagacaagacgctacattccttccaggtcaaatttttgcaccatgtacatgttaaactaattttttagccgtggtttaaaaactgcgaatcatcatcaaaaattttatgtgaaagacagtgttttaattactttatgaaaactacacatacaggtgatgagatggtgttcttggtgttgaatttggtacagctcgtaggattgatactaacgttcataccttacatttcccaaatccagtaaaaggtaaaatccattactctttctccttatagtgaggaatcaatgggaaactatgattctctatgattccagtaaaaggtagaatccagttgaagtgattgtgtttctctatgattcggcaccaaaagactgactaataatgttcatatatttttgtatgtaatactatcatttactaatttgttcactcaaagtcaaggtgttatatctttctggtcaaaacatataagtcattttgtaggtaacggatctactaatacatttaattcaagccaataattttagggaaaaatgtcgcaaaaaatcgaaaactttcaaatttgagacgaaaaatatgaatttttgaaatgtcatttaaattttaaagtttggtttgactttataattaaaatggttatattttgttgactgaatcattttagacatgcctttaaatttttcttaactaaagaatgacagagttaactttctgtagtatttgggtttaaaatgatacattttaatgacatttctaaagttaatgttttttcgtcttaaattcgaaagttcgtaactttatttttatatttttctcaataattttatatattgtcagaattgttttttggtctgtgtacagctcagttttgagaaaatgagtcacataaagcaactgcattattttcttagaaaagctaataatgattgcacgagataagctgataaaggagaaaacgaaagaaggcaaaaaagaaaacaatattataaagaagaacattgacttataagcaagtaaggtccatagaagctagttcgttttggtctaccatacattatatactgtatttggtcttgtttatgtccttcattcaattaactcgtagttgctacaagttttttctttcaaagattatttaataatctgtttcatttcttgattattttttcatgcttcagtaatcagtagtatatttcttttaaaacatttcattttggtagaagcagatacaagagttgtcacgacgcacgattgggacgcggaccacatgcaccgttttggtagaagtaaatgcaagagtggtcacggctcaccactgggacttgaaccacatgccccaaaacataactgacatgggctattataagtttaattaactatttcttctgtttttttttgtttgattgtttaggaaaaacacatatattaaggtaaatatattacatttggttttaaatgtattagtgtttgtgttttacaatttcctatgattttaagccaataaaattcaattatttctactaaagtttacaattcattaataagaactaataaatatggcatagaaaacttaaaaaatcaatctttttgaaacaatttttttttttagaaaataaaaaaaaggaatagagggagtattatacaagaaaagcatagagaaattaatttgttttttgttttctttggagtcatttaaaagtttattatcctagaagaaaaaaaaaatagtagggcaacattaaaatatataaatatttttaaacgatacgcctataattagccaaattctagtaaatggttttaagtaaacaattataaatttggaagttttttcttcttataatttatgagaaattaatcaaaatgataaacagcaatggaaaaaaatattgattgatttatttttctgaattgtagcagttcaacgttgtcgtatttcacttgcaacattgtttatcaacaacatatatatgtcttgaaaatattgctttttctttcatataacgccgattataaatggacaagtcactacagttaaaaacagaaaagaaaaaaaagaaccacttgcgactcatgacgtatcaaacgaagttatctataatctattggattaaacaacattacctcacatgcatcacaaaaaaaatattaaatcataatcattattgatccacctttatatgattattattttttatattttttgtcaactgcccttataagttaagagccataaaagggctttgatctccaccaagttcatttcaccaaaagaaaagtcattgaaaaccaaaaaaaaagaagaagatcaaaaaaaaaaggatgtcagaagaagaagtggtggtgttgaacttctggccaagcatgttcggagcaagagtgatcatggcattagaggagaaagagatcaagttcgagtacaaggaagaagatgtgtttggtcagaagaccgatctattgctccaaagcaacccggttaacaagaaaattccggttctcatccacaacggtaaaccggtatgcgagtccaatatcatagtcgaatacatcgatgaggtctggaaagacgataagactctccgtctactaccttctgatccttatcagaagtcacagtgtagattttgggctgatttgattgacaaaaaggtactactagactttcttaaaacgttacatttttggacgatacttaagaataacaaatacaatctactaaatacttcataatattaaatgttatggtgtgtatataaaaagttcaacgaaaggagactaaaagttcaatttcattgtgattcatatacaaaaatataaacaggtttttgacgctggaagaagaacgtggacaaagaggggcaaagaacaagaagaagcgaaacaagagttcatagagatattgaaagtgttagaaagagagcttggagataaggtctacttcggaggaaacgacaacgtttcgatggtggacttggttctcatctcctactacccttggttccacacatgggagactattggtggttttagtgtcgaggaccacactcccaagctaatggactggatccgtaaatgcttaacccgacccgctatctcgaaatctttacctgacccgctgaagatatttgatcgagtcactcagatcataaaggtccatgagtttttctatggttattgatagtctaaatcatatgctctatttatgtaagttaaccaaaataataagaaatgttgtaatgcttaaggaagtagttggtgtgaaaaaatttatttttcatttgatattataattgaaataaaatgggtttgttgttcttgatatatcataagttatttttattattattatcctatgttgatggaaaacttttagaaattcctatgttattcaattatataacaatgtcgatatttggtaaagaattcaattatatatcttactatagtttaacttaattcttgatgtagtttcttgtggaatggtatataaacaccattactctcgatctttattttgccatatcgtctttcgatgcgaaggaaatgggaacataatccaatacatcatcaccaacacactgattctcgtaatgaagacttgtccagtctttttctagttttaaacaaaaaaccattcaagaataataaaatctacaatatggagtagcagcaatagtatattaagtcttggtcactaagtgttgagcaataaaatcttccatgacagtaaagatgatgttgatattacatgcgagtgacttacgagatattatcatgacattatatatggttaaacattttgatagattttaactcatttgtttttctacttttatctctcagttgttacaagactgtttagtgtgttatagtttttgtttctttaatttttttaacctttttctttgagtttgtttagaaaacagtacatttccgtaacttaattggagaagtagtacaattactatttataattactaaaatattcgaaaaagtttttgtttggtgagagagaaagagaggtgtaacagatttaaataaagagaaagagagcatttgagagggagacgtgggtcaaaaaaaattttctaatttttttttcttttctttattacatttcattctctcaaagtttaataattaaaatacttgtttgtaaattttatttttctaaaattgatcatagaaaaaaaaatctatgtttatcgtttaattgttaacatttcggcggttggagacactactggttttgtttatcgtttatcgtttacaagatgaatataaatctataaaactgttaaaattctaaattcctagagataaacttggtaacttaattttttttcttaggactaaactaaatggtttgaatccaagtacataattgttagtcctctaccagcggctcgcatggtaatccaccaaccaatcttttctttatgccattacgtagcctatatacaaggttattattatgttttttaaacaatccctcgatatatgcaagttatctactattagctttcactattcttcgtcttcattgttttaagttagttcttgatcagcaagtacagtgagctatagaatcgagcaagaatgagagcggtggcagaggagattcaaacggctaggaacgcgatgtgactcgggctgtgaggggttatgctggatcaattctttctcattccttttagcatttttggtcttcttctttttctttttcttcttcttcttcttccttttctttatcaatttacttgcgcattcccaaacatgactgagaacaagaaacaataaaaaccgagtagttggttccttctttctttggggtttagaaatgaagaagataatagaattaactgtaaaatgtcaattcttttttgtttcttagttcgtcacaaaaaaaaaaaaaagagaagagagatatatgaactgaattgcataaaaagagtcttacatattactaaagaaaacttaatgagcttgaatgttaaattgacaataactaaattagaaaaactctataaaaacaaacttatagtttatacgggccgaccggatcagtcgataagatttattaaaaaaacaaaaaacaaacaaatttatggttctattagtatatagttgatactaatactagaactatgagtctatgactagtatagtggaaattataataattgttataaatataactttaatgactaacttgtaaatactaaaagttgattttgcataaaataaaatataattcaattttaatatagaaaaaaattaaacaattgaggaaaatttatatctataattaaataaacatataaaataaaattaaataaaaaacatatagaacaaactattatatacgtttatgtgtattataaatccaaatatcaaattcaaattagagctaatgttatagtaagaaaaatgtctatacgtagataaattagttttttttcaaatataatctaggggagaaccacacaagatggagtagtttgacagtactattactcacaagataggccttcatcagctaataaaccctcacaaccttaacagccttatcaaccataccattgggccttaagtgggtatttgaaatagaaaatgtttgatcccaagaacttttactactactttgttcttgcaaagacactaaattttaaacaattacagtgcacgtttttgcaactagtaagcaattatttctccacgtaatggatataattagtcgatctcaataaactgcaatattttagagaaaagagaaaataacatcatcaagtggtcatgactcgagagactaaagcaaattatgagttcaaacgtcacggacaataacaaaaccaaaaggcaaagaagaagcaacgttaccaaaaaatcacgatcaacaaaacaaacaaggaagcaaatctctctgtttcttttggttcaataaattacttttctcagttttaaagatgtaaaagaaaaacatgcttaggatttcgagggataagaagaatctcactttgccatcatgactttgacgaactcttcatagttgatctgaccatcaccatcgacgtcagcctctcggatcatctcatcgacttcctcatccgtcaacttctccccaagatttgtcatcacgtgacgaagctcagccgccgagatgaaaccgttctggtccttgtcaaaaaccctgaaggcttccttaagctcttcctctgaatcagtgtctttcatcttacgtgccattaggttcaggaactctgggaaatctattgtcccgttcccgtctgcatccacttcgttgatcatgtcctggagctcggcttctgtcgggttctgcccaagtgatctcatcacagtcccaagctcctttgtggtgatacaacctgcaatcaaaccaaaattggacacaacttcagattttgtaacgcaagagttccgagtataactttatgaacactaatattgtcaacaagatcaggaagatatataaaccaattatcttaaacacaagtaatatgtcaagttttcaaatgcaagaaagctcaaaaatgctcttagtaaaatatccttacactactaaccccaatcatagtatatctcatttaaaaggacgacgattcgacaagtaaaactgattgttcggaaatcatctaccaagttaacaaagaaacttcttgcacacaaaccaccaagcaacatttaaagcctctttctaatcaaaggccaggaaatgcacaatgttctaaatatgatggtattctcttagtaatcaaaggccaggaaatgcacaatgttctaaatatgatgttattctcttagtaatcaaaggccaggaaatgcacctattctcacaagaaagctcaaaaatgctcttagtaaaatactcttaaaccccaatcatagtatacgacaagtaaaactgattgttcgggaaacatctaccaagttaacaaagaaactttttgcacacaaaccaccaagcaacatttaaagcctctttctaatcaaaggccaggaaatgcacaatgttctaaatatgatggtattgccaataagcatcacaaaatgcacaccgttgcaagttctcaactattgtaaagaagaacaacagagatgatattatcaacttctttctctatttttctatttggcaacatcacacaataaaccaaatttcgttttttagattttgagtataaacatctgcagataaatctacatgttacaattgaatcttaaaaccacaatgccactaaattttgtgagaacgtacaaatccgcatgattataatcacaggatttgttcagaatcatagtaaatcacagagaaacaactagattccaatgtacgattccaatgtaggatctagaatatgatgaataacctaattaaacaagattccataactacaaatcttagtaatcatcaacgaatatactaaaggagattctacatattctagatccttctatagaagcaaaaatcaaccctaaacactctggagatgtgagcaagactgaacgaatcaaaacgagatcgttcttcaaatcacatgaaacaataaacgaaatgtgcagagattcacgatcaccgcgaagaaatctaaaaaaaaaacgacaagagaaagagatctgagagaagaagaagaagaagaagaagaagaagagaccatctccgtctttgtcgaataggctaaaagcttccttgaactcggagatctggtcatcggttagctgatccgccattttttttgtcttcttcggattttctcgagaaaatttttgctgtgatattttcttgtttctggagaaagttgaagcgcgtgagagtgaatgttccttctcctttataaaatgagatctcaccagctacaggtaaaatgaggtatttttgaattgacgattttgccctcctaaacgtctttctcttttaatttctcagaccaaaaaattaagaaattctagttttgggagaaatttgttttttaggtttgcaacttagtttttactattttaggctaatctactaactacttatgtccagatcatgaactttctgctaatagttttgaatttgatatttttgtattattgttatggtatcttggtatgatatatattgatgtaacctgatattatacattgatatccaaacattggtgtaggcaatttgataaaattcattttctatttgctaagtttattttagggtaatattagataaccaaataaaacatacaaattaagaaactagtagagagaaagttttttgttacaaaataaccatggacccatgttgtcggaagaaatgaaataacaaagctacctttcatttgttgtaagatgaactgtaaacgaaacacattcgtgtaatttttcaaaataacatgtaacattaaaatttcacatgttatatttagttttaaaacatgctatttaaaaaaacgtcatgaatttttaagaaaaaacattattatgaaattttcttacatgaacataatccttaaaaaaaatttatatgtgattttaataaaaccgtgtattactaaaaaataagaatatatttttaaagaaatcacgtgtgatcttaataaaaaatgtgtattactacaaaatatcatgataaaaagagatattaaactgaatagaatgttttttccataaaataccatgtgctttttataaatactatgtaataagagaaaataacaagataaaaagagatattatgttatcgcatgtatttcggaaaaaaaacatgttacaaaggatatttatgtaattacatgtgttctccaatatgtttccgacaagctactgtgactcaaggttagtttgtacattcttttcaaatctataatcatttattataaattctctttattttatcacatttcaaaattataacacaagaaagaaaatggttagacaataaatattagtagacgattgagaatgattttacggtttttccgtaatttagtagaaaatttttgtagaaaaatttcccgccaattgcgttgattttacgatttttaaaaaatttatataattgtcatcaattatttttatagtttacaattattattaagtagcactataccacaaaatattttttgattttatataatcttttctaatcagactgatttgataagtggtgctaaaaataataaattaaagatttaacccgtattccaaaaaataaaaaaattctagttttgtgacaaatttgttttttaggtttgtaacttaatttttactaacttaggctaatctactaactacttatgtccagatcatgaattttctgctaatagtaaagcaaaaatcagattttcatattgaatttgatatttctgtattattgttatggtatcttgatatttcatattgaatttgatacattgatgtaacctgatattctatattgatgtccaaacgttggtctaggcgattttaacgttagtatatattaaggtttacaacttgtatctatttaaagaaaaattatattttatagtttataattgttattaagtaacggtataacacgaattcacaagacaattgttaataaacagtgcagttatatgtttccctttgtattctgacttcttattgttggaggcttctctgacttttttttatgtttgtgatggtagctctttttgaataggtatgtgtgaaatgcgagaaatgcagaggaattttgacttgccggatatatagctttgatctattgtttgttcccgttattgttttgatggtagattattgcgttgaggttaaggtgtttgctttttcttagtattatatcatagagcttctttttggtatggatcattctgttctttttgttatgattgacttcccttcgttataggtatgttgaaggtataaagggttttttagtcgaaggatggctttgatctatccttattattgtctaacgatttcatgtgaatcaatttgttctttcttaatgggtggataatttataacgctggataaataaaaatcaccaaagatcatacatttctggccataatgaccttatggtggttccagaaggatgaaaaagaaatttaattttagcttgtttaagtatacaaagtaacatgacttgtaaaagcttttagtcaattaaccaattcagtagcaatttactacttaagtgggtacctgtctgaccaaacctgtggcgtatcttcaccacggttctggtacatcaaaagccctccagcccatttctctgaccggttataccgagtcacctatatttaaaccaaaaactttcatcgattatacatcaagtttgttgaacctgtcaaaccaaccgagcttaaaccgagttcctgattgtttgtgaaagcccctctaatatgtggcggatcatcattatcgagtaaacttgcagcattaccactaggtaagagcttgtaaccggccaagttccttaactaagactgccggttagggttcacaagatggaactcgtaagggtcgtacaggctcaactttatctgagcatctttatcagtcctgcaggctacatatttcttgaccttcaagtaactctttctccttgattttccaggtggaagtctctgcttctctagatgaatcttaacggagttcttagctggcccgtcaatgtccatgtctagatgaaatgatcgtggaccactcctataacgtttttttagatcaaaagtccagaattagcgtctttctcacccaagtcttgtacgtttgtgtacatttgagtttgaggctgcgacctaattaataacgtttttcattatgagaactattcagaaaaaatttgaatggatgagcatacataatgtaatcataccataacgcgaatcaagccatccatttgaaactcccaatcaaaaatataatcatagtatcacatcgtttaaagaacataataataataatagtgttgtgtaatagaacatgccattctagctaccagtatcacctttgcccttgactctcttatctgtcgatatccaaattacattttcataattaagtatcacatcgtttaaagaacataataatagtgttgtgcaatagaacattacatctgtaccagggagacgaatctcatagtgtcaccagcgtatcgttcgaacatacttatttatattactgtataccaatattttccaaccaaaaccgtaaaccgacgttttttcaccaaaacctaaaatttgtatttgtcgctaaagttttgttttgcaaaaacaaattcactcacaaaatgatatttgctgccaaaatcgtaaagtaatatcaacattcacagtaatataataatttatcaatatttaatagaataatctgtaaattttaaataactattgattatattatgttgttaaaaacaatgttatatgggtctaaatgggttaagaatattttaaataggtttaaatgaggattattgggacaacattatatatcctcatgatatattgagataaggttatagagcctatattttagggatttgagtttatcaaagctaagatctaccaaaacataagaaatttactctctttcgtattttcaatcaagtgtgttcgattcggttaagttttcttctctttggttaagagtctcgtattttcgtgtgaggaaaacatgtctctcgttgatgatggctcgtctgccagaaacggtgaaagtttcaccttatatgttatctagctccgacactcctggagctatgatctcgtcagtttacttatctagtgacaattacaactcttgtgcaacagatatggtgaacgcactccaagccaagcgtaaaacagggttcatcaatggttcaattccaaaaccacaatttattgatccaaactttgaaaattggaaaacagtcaacttaatgattgttggttggattcgaacttccattgaaccgaaagtaaagtctacgatgacgtacatctccggcgctcaccagttgtggatggacttagagcaacgtttctctgtgggaaacaaggttcagattcataaactgattggtcaacttgctgcgtgtaaacaagatgggcaatcagttcttgatatggtcgtttgtgtaatctttgggaggaatatcaaatcttcaagccagtcacagtgtgttcttgtgggttgtgtatttgtggtgctactagcaaaccaacaaaagaaagagaagacgagaagattcacttgtttgttttgggtctcgacgactctcggtttggtggtttaagcacaatgcttatcgcaatggatctgtttcctactcctggtgaaatatacccttgcgttatcagggaagaacaacgccttgcttcagtcaggattcgtgagcagagacaagaagtggttggcttcgcaacacatggcgatcaaagtagtttgacatctttgcgacaagagatacgcgtggaggacgatcagactcctctatcactaagcctcggtccatgatgtgttccaattgtggtcgttcgggtcacgagaaaaaggattgttggcaaattgtcggttttctcgagttggattgaacgtaatggcggggtcgtggttctaacacccgtggcagaggaggtcacagttctggtcgtggctgaggacaaccggtgacagctcacgcaacgagctctaatccatctaccttattagaattttcgcaagaccaattgcaagttctcgcatagatgatcaagggacaaatgggcaatccaagttatgataaactgtccggtaagacaaaatttggcaatgttattctcgatattggagcatctcatcacatgactgggcagctctctcttttgactaacattgttcctatacccccctactcgatgggatttgcggccggtagcaaaacctttgctttgaatatgggtgtgttccctctttcaaataaagtcgccctaactaatgttcttcatgtgcccaagttgatgtgtactttgatctccgtctcaaaaattgtgaaacaaaaaactgtattgccacttttaccaatacaatttgcgttttgcaggaccattttcgacgactttgattggaagcggtgaagagcgtgatggggtttattatcctacggatgtcgctaccgcaaagattcatacaacgaacgtctcttctgatcaagctctatggcatcagtttaggaaatcctagtttttcggtgctttcttctttaccggtgttttctagttcttctagttagacgtgtgttttagagctaaacaaacaagagaatttttcctcttagtatcaataaatcgatagagtgtttctctttgattcattgtgatgtttggggtctatatcgcatcccgtcatcttgtggtgcagtttatttcgtattgtacttactaatttcttggcatatacagaaaaacaatttgggaagtctctcaaagtggttcttagtgacaataggacatagtttatgcttatatcttactttagggaacatgggattattcaccaaactttgtgtgtcgtgactccacaacagaatagtcgtgtaaaacgtaaataccgacatatacttcatgtttctagggcgattttgtttcaagctagtctcccgattatattttggggtgaagcagttcttataactgcattcttaatcaatcgctctccttcatcgattcataatgggctttctccttacaaatttattcataactccaagccaaattatgatcagctgcgagtttttggttcagcttgttacgttcgtcgtgtctctcgtgataaagataagtttggggagcgaagtcgcctatgtattttcgtaggttatccttttcccaagaaaggttggaaactgtttgatattgggaagaatgagttcctagtctctcgtgatgtttttttccgagaagatgtttttccttttgcgactacagacactaatcccgctcatgtgtcttcggctcctcttgttgtcgatgaagattggatggtttctacgactaatccggacagggggagctccattgttgtgtttgataataacacatactctgattctattttagctgaggactctgtttctaaactggattatgtaattgaaccgaactctgtgattgaaccagattttgtgaatgaaccgaatactgcttctgaaccggtttctgtttctacaccggtcgaagtatcccctatttttgatactccatctactccgaacaagggctctgtctccggtgataatacagtgtctaccaacgtctctcctattgtcacaactctggatcgtaatccccaacccttggtaggtgttgaaagttcggttgttgaaatcacacctccacgtcaaggaaagcgacccattaaacaatctatttgaactacgtgctttataatgccacaagctctccaataaaccctcacgctctctccgactttcttgatcagtcctcgtcaacggtccaaggtacttcctcttatcctctaaccaattatatctccgatgagtgttttttcccaggtgatcaagcttttctccctgccatcacgactaacgtcgaacctaaacattttaaagaagttgttcagatcaaggtttggaatgatgaaatgtttaaggaggttgatgctctagagattaataagacataggatattgtcgatttgccgctaggaaagtcgctattagaagtcaatgggtctataagactaagtataatgtcgacggaacagtggaatgatacaaagctcgtctagtagttcaaggaaacaaacaagttgaaggagaagattacaaataaacttttgcaccatttgtgcgaatgactacggttcgtactcttctttgttttgctgctgcaaatcaatggaaggtttataagatggatgttcataacgcttctttatggtgaccttgaggaggaagtctacatgaagctccctcctgggtttcgtcactctcatcccgacaaagtttgtcgtcttcgtacgtcattgtacggcttgaaataagctttgcattgttggtttaaaaaattgtcagattctcttttgcgttttggatttgttcaatcctatgaagattactcactcttttcataagcacgtaatggcattgaacttcgcgtgttgatctatgtcgatgacctcttgatctgcggtaacgatgggtacatgcttcagaaattcaaggagtttctcgggcgttgtttctccatgaaagatttggggaagttgaaatattttcttggtattgaagtgaatcatggatctgaaggtatgtttttatctcagcgcaagtacgctctcgacatcatttctgacagtggtaaccttggctctcgcccagccctaactctgttagaacaaaaccatcaactcgcttccgatgatggtccattgcttcaggattgtaaactataccgtcgactagttggtcgtttgctctatcttcttcatactcggcctcaattgagttattatgttcatgtcttatcccagtttatgcaaactcctaggaaagctcatttcaaggctgcattgcgtgttgttcaaatttttaaaggctccccaggtcaaggtattttgttgaaagatgataaagatttgaccctcgaagtttattatgattcggattttcaaacatgccctttgactcgtcggtctcttagtgcttacgttgtgttgctggaggctcacctatttcatggaagactaagaaacaaaagaatgtgtctcactcttctacagaagccgaatatagggcaatatatgctgctctctgtgagattaaatggttccgtaagttgttgaaataattagatattgaacaaactgcgcctactcgtttgtattgtaatagtaaagctgctattatattgctgctaatcctgtttttcatgaccgtactagacattttgagtccgattgtcactgcgtccgcgatgcagtacgagatagcattatcaaacgcatcatgttcgtactacggaataactagctgatatattcactaaggcacttggtcgcaatcagtttctttatcttatgtccaggttaggcattcaggatcttcacactccaacgtgagggggagtattgggataatatcatatattatcatgatatattgagataaggttatagagcctatattttatggatttgagtttatcatatacgatggctctcttgtataaatactcatgttcataagttaataaagttgacatattttgatatctgattctacaggagtgatgaatagatgtaaacttaaatgggatcaaatggatttagaataattgggatatgttttaaatggggtgggttagtttacaataacatccctagcggcaacaaggctaaagaacaagataaaatgaaatctatagactttctcgtttctcaagactaacgctttgaatagttccaggcggatggaacaaacaaaactatttatgggttgagacttgagatgttgtttaccatttatgggttgacattgtaaatggttgtgctacacaaggaaaacgactaaacgaatcttgatacaaaaaaaaaaaagaaaatttaaagagaagagattatttatgtagtctagtatagaaatttgtctttaaatcataaaacaagattcgaaataaaaataaaaaatgaaactttttgtctttaattatgttcctatttctcttttcccgccctttcgagaatctaactaaactcatccatggtgtgtttttggactttggttgctcttttttcgacgacgtaaagtctcgcagattgcccttcagctagttgctgctctagcgtcatctttgtttctctcatcagcgtagtctccacctaagcatacagaccatgttactataactgaataaaacattgtaacaaatactcatgaataactcttccacatacggtttaccattgtgttgcttttgcaaccaactcaacaagtgcaagaagcttctgaacttgctcaaccttcttgagcttattcttggtcttgttatcaaacaacccacatagctcaagaatttcctacaaccttacaattcaaaatcagataataataatactatgcaatcttcattatacatctaaaattttcataacaaggggtaaaacataaaactaaaagcactcacgttaaggaattgttgacattattgagtcaaataatcctccaacgtctcttcgttctcttccaattcatcgccacccgtaaagacaattattatatagttagtgatttactaatccaaaagttgttaaaaattaaaatagaatataaatgaaaatgactacatgaaaggataaaataaaaaaaaaggtagttttggaaggacattcttaataattattcaaagtaaaaattaaaaatacgataatgtgtcgtacaaaatagaaatttttttttaattaaaagtgcaaaaataaaagagagaaaaaatatgaaaacaaaaagagggtaaataataataataataatcttattttattctatatttctattattaacgagacaatgtacctaactacaatgtctaactaatttttacatggacattgtacgtaactatatatatatatatatatatagaaaacaactgaattgcgagaaaacattgtgacgaaaataatctttcgcaaatttgctaggaatttgctatgaccgtagtgtccttcgcaaaatccttgcaatttgcgagtacttagcgacacgtatatttctctagcaaaatttgcgatggctttactacttgctgatgaattagatgggcatgtttttaatgaatataacaacttatttgataagtgagaattcattgtaaatccctagcaaaatatatgatctcgagcaagtctaaggcaaatattcatagcacttccctagcaaaaacaaattatttgcctataaatatcaaacgtaagaaaaccatacatcataactcaaacatacacaaaaaaaaaatctacttacaaaaaaaaacagtttacaataatgtcttttggaggagaacgtgaaatctacacattgcggagatggatgtacaaccatagagatccgtcgaccagtgatgtgacgagagagtttgttgatgaattgcgtggttttatgtatcaagtaggcctgggcattcggttaaccattcggtttcggttcggttgcgcatggtttcgattatttcggttatagtaatacaagaaccatttggatatttgaggaattttggttcggttcggttcggatattaaacttggtaaccataaataaaccaaaaccgaaataaccgactaaaaaccgaaacaaccaaaaaatttgaccaataaccgatatagaacgtacgtaaaaaagacatattcacaactcacaaagatgcaaatatggtccattcacaactcacgaaattcaacttgcaaactaataaagagaagaacatagttaagtgtcaatacatacaatatatatgatatattatctatcatacatatatgctttggttatcctttggttatcggttactaacctaaccaaaaccgaaaccgaaatctaagacatataatatccagccggttattttaagctattcaaacccgaaccgaaccatgtttttcggttcggttcggttcggttaatcggtcagcggtttttttgcccaggcgtagtatcaagcaacaaacgaatcatttgctcgtgagaatggtacaatattctgtccatgtcgtaagtacctcaatgataaatatttggattttaatttggtgaagaagcatttatataatagaggatttatggcaaactactatgtatggttacgtcattgggaaggttgtagagatagcgcaagaagtattagtatgaaaattataaacatctaacatatcataaaagcgttgtgcatctacgttgggttcttcattaatatttttagcaaatgcagcagtagtttcatgaaatatatttgtaaccatactatgatatctattttcctggttataccgataactagaatgaccagattatttatgaccataattcatatcattataattactaggttgatagagacaccattattcctattactatttcttgcgctatctctacaaccttccccatgacgtaaccatacatagtagtttgctataaatcctctattatataaatgcttactcaccaaattaaaatccaaatatttattattgaggcacttacgacatgggcagaatattataccgttctcacgagcaaatgattcgtttgttgcttgatacatgaaactatgcaatccatcaacaaactctctcgtcacatcactgatcgatggatctctatggttgtacatccatctctgcaatgtgtagatttcatgttctcctccaaaagacatttttaaactgttttttttaagtaaatttttttatttttgtgtttgagttatgatgtatggttttcttaagtttgatatttataggcaaataattctttttagctagggaagtgctatgaatatttgccttagatttgctaggggtttacaatgaattctcacctaccaaataagttgttatattcattgaaaacgtgcccacctaatttatcagcaacagcaaagccatcgcaaattttgcgaaagaaatatacatgtcgctaagtactcgcaaattgcaaggattttgcgagggacacttcggtcatagcaaattccatgcaaattcctcgcaattttgcgagggattatttccgtcgcaatgtttcctcgcaattcagttgttttcttgtatccattttaagcttctacgtttcctttttatagtttgacgacggacttaactactctaaggtctccgactcacgcatccaaccttttcatagggctcgcgttatcgagctccaaggcggtcagggaaggcattgggatatgaatatgagactaacacttcttattacatcattctcgaatgggtgcgtttgatgccaaacacaactccattagtgcgatttattgaaaaccactattaataacgggtttcaaaaacaaactaacggtcttttaatattttttgaaaatcaagaataaaaaaatatatcactgcatgtaaacaacaccatagtgaccccaagcttgagtcacactattcctcaacttcatcctcaccaacgttcggttatgtatcttcctaatctcttgcagccaacacttgtctcttaggggatgctgaaaattgtttctcattccacttaaccttcctgcttcccatcaaaaggcattctacagtctctagctatgtgtccggctacaccacacctgtaacaggtcacttcctgacatcttctcttactatgcccggtttggccatatgatcccatcgcttccttttcttgagcgatcctcttataccgagcctcttcttcaagtcctatctccagcgaagctgccttctcaaccaagtcaatcatgttgtcgaagtcccgaacatggcaacacaagcgtatatccactctcagccccgagatgaatttatgaatcaactcatgctctcctctttttcttctctcaaatctttcgagactgtgaaactccttctcatattttcttactgtcttggtaccttgttgaagtcttaaaaacttcatttcaagatcatctatggtctcctctgggagatatcttctagtgaattcctctttgaaaaaagaccattgatccacacatccaacttgttctctctgcttcacacgttcccaccactcttgtgcttcacctcttaggtagcaagaggctagatccctccaaaactcaactgggcacctcattgacttgaatttgcactccaacatatttctccagttatatgctttaaccgggtctgtcccaccattgaaagtctctatatctaaatctctcatgaacctcaacatctcccaataactaggtatttccattggtactggcttgactaccgcgactccttcgggatcactaaccacaaaattattttgaatgatttcttcaaacaagtctcgaatcccttgcaacacggctgcgcttactgtcgtacgatctcctacttgaggaacaccaactaccagttgcaccaatacttgtgtatgctcatttccactaacatactttactgtttgttctccatttcttgcactctcggctgaggtggttggaacctccactctctgtttggcagcacttctctgagctctcgtaggtcccattctgatcacacacaagacaaaattcacaaccaaaactataaaccataaactaagacacgttttcaaaatattttgaaaaaaaaaagaaacaatttataaaccgaccattcatgtaagattgtgggcttaacaaaggttttgatacttattatgttcctcacttcagatagaagctggcggtcgtcagatcatcatagcatgattagcatcatcaaccatactatgacattctagatcttttcatgattagcatcatcatactatatcttatattgtaatcacatcatctaaatagcgtatcaacacatcacatgtcgtcacatgcataacacacatagatcaatccatatgttaaatgaaacatggaaagtgagaagataaatcgagtattgtgaatccacatatcactcgctcacctttaatttgcaatgacgtggctgaaatgctaggggtttgtgaagatatcttcttactctcttctcggaggatccttttttctctgtcggaggagctctctgcgtgtatctgcgttctccttttctgtttttgtttctttttgttttctaaaggtttcgagagacctagctagctttagggttttggacttaaagagacaaaaatatgggcctagcccgaattgttgggttttgttcgttacatataaagtctaatatattgatctcctcttgctttcgagtatatctattggtgttaattattctccaactgacatcgagcgagcatcaataaggactgaggagataagaggaacaaatcatagtgattattattgtttaattaatatgaattaaagtttttatatcgcctctggttttcgtgacactaggcacagttctcgtactacttggaatactttcctatgaccgtaaatgcaatgaatggtctaatataataaaataaggtttttacaacactcaagcaagattagtatctctccttttgatatgtgtcttttttttaaaacctaaatacattagtatctattttagttagcattattcacataattatatttataagttacatacaaaaaacatttagtagttaaatatttttcgaataagggtgtaaaaataggtagcccaactaaactcaacttaaatttagggttaaatgaattatgggttgacccatttaaataataatttatttaataattattataaaacaagaataaataattatcatcatcaataatttattatcatcaaatttgggatatttacggattcataattttttacgggtttacgttttttgacggaaaaattatgggtttcgtttctattggcgaaaaattcacgggtaatcgttttttggcgggaaaatactggtttacgtttttttggcgagaaaattacggggttacgtttttttgaggaaatcataggtttatgtttttatggtggaaaaatcacgaatttacgtttttgcaaaaaatcacaggttcatgtttttggcgcaaaaattacggtttacgttttctgacaataaaactaatgcattgtaacattatccggtcaacaaaacttttagttaaaaaacttcactttattacaacaactcacgattacaagaatgtctaaattttcattcatgagttttgaacaaaacacaagtgagaacctcactctcactctcacaatcgaataacaatcgtctcttccttgtcaataaaattgtatctcgatattggtttagatgtgttggttaaacttaaattgactttggtttagaaattttaattggtttaattcaattttacaaaacttaatgggttaattgggtaaaccattaaaaccattaaccattacaactcaactcattttattcatcaaaccaattgacccactagctcatttgatccatcaactcatttgagtcaaaaaatttaactcattagggttcatgggttgagttgagttgagttgacccatgaatcttgacccattttgaactcctagatgtactaatatctattttaattaacgttattcacatagttatatttataagctatatacaagaatatatttagtaggtacatatttttctgtatgaataatttatcaatatttttaaataattaccataatattttctatagaaaaaatcatcattttttgtttaccctcttttgttcaatatctcaaatttattctataacttctacttttatctttctttttattgttgcttatagaacaatatgcttatgttttgcttatgttatgcttatgtttttcttatttttgttcgattattttatttttcttagtttattagtcaggacacatcaaaaaattgctaccatattgtgacaatctaatgaacacatcagaaagccaaagaaactggagaaataagtgtgtgttgggcataaaaaaagaatagagatttggtgttgatatggtttaagactcatgaattcatacgacatgaccctccataaaatatgtaactaccccaatcctttctaaacatgactctggtgttgtagaacttatgatcgtctacttttactactacgtcttgaacgggcttgattatgttgttatatacgatctccaagttgcgaaagtagctaactttgtcaaagccttcatcggagaagtgaccagatcccatctgtgtaattgtgtgtcagccaaaactttgcgaattcacaacctcaccaccccattgcacgtcgtatatataagctaaatttggaaatttgcagttaaccaatatccaaccaatgaatggttggatcccaaacttagccaccagttcccagactcttgatcctatataattgtttatcaacgatgatatttaacttttaaattagaaatgtaaaattcattaactaaaacaaaagatacaatctcaaatatttttcctcggatgtagagacggagtaatggtgcctccaacaacaatgttgttacttgtttgtatgaaaccaggacattgaaggttgtagcatccggttacattgtaagtgtcactttgaatataattttatagtatttttataagtaaacttatcttcttttttgtgtgtgcaccaaatcatgagaattaacttagaaggatacatgacgacaaaaaaaaaaaaaaacttagaaggatacatgaagataaggcttatccggacatactcgaatagaagagttgagaatcaaatcataaccggattattatcaattttgatatagatataaatatcaattttgatagcatctattaatttccggtttgacaataatctataatttaaatatacaaaattattttcgtagcttatttgatttgatttatttaagtgtatttaatataattgatttagtattcaaatataataccataactgttattgtatatcaaatatgttattatacttcctaaatcaatactattatttgagaaatacgtttagtgaggtggacaaaaagtgggaaaaaatatcaagtttaccattggattaaaaaatttatgtcataaaaagttcgtttagaaaaacgcagatccttttgacccgggttttaaatataacgggtcataacttctaattttagccatctattacaattaatagaagtcgttgcttttttccagtaaaaataaaatcctacagcaagattttaaggagaaaatctttatttatttctaagtaatttattcacttattcaataccattcataattacgtgtgtttcaaattaaaaaactaataatacacatatatcctaggaatttataatattcattatatgcttaaatattactaattcaattagataattttaaaaatctttcctaattaaatataacaaatctgttttatttatatatatatatataacattataaatatcaaattaatatgtttgaatttgaaattggtttaaatattctaaatttatttaaataactgtaaaaacagttaattagaccatcttctatgtttgatagttaaaatatataaatatgtctaaaatatttaaaataaaattaattacattttttgtttgatattaatttttgttaactaaattaaatgaatttaaattttgatagcaattatgtatttaaatatcatttttgatagtatctattaatttccggtttgaattatcaaacataaattctttttttagcaaccaaatcatattaatttaaaatattcaatgtgtatattcttttgtagaattcgaatatatcacttctccataattaaaggtagtcaaatatttagttgaatattctttttttatttaacataaaatttcttaacaattttcataattaaataactacttattcgataatagctaacaatctcctgtaattatgttattcatcataatcacttaatttgaattctacgatttaatattttgtgcatatttttaaattattttaaaaatcaaatatggtctcaacctttgaagtataagttcatgccatcaaaacgagaagaatatgccaaccgttgtgagagatttgtaattcaagaagattggaaagttatggagaactgtggattgagtcatgagacctttttttatacaatcaacatactcgtgagactaaaggttctcctatattgtgttgatgatttatgaagttagaagacttttatgtttattaaataaagtttattgatagaaagatgagttgaatctatttctaatgatgtatccattatatttattgtattcatagaggcaaagtcagaatatccccttatattttgtttgtttaatgatggactattttctgttttttttaaatgcacttttttataggttgtatttatttaacttttttaatcccgttatattttgattatctttttctaaatgaccaaattgaaatctatttctttcaagagtatttttaaaatggatattgattgatatgaaaatagatattctgtatttaataatatttgtttcaatttccaagtcataaaaaagatttgttggtatccgaaaacctctcacatattaattgagatttttttcactttacatactaaatcaattgaacaaaaaagaattcacaatttaacattaaaattagaaattttaattatcaataacattaataaaacttaaaacaataatcattataagtactttaattgatgaacattgtaacttgataccatagggctataaagttgaatatcgtaacgggacgacaacgggtaatttgaaacatagaaagaatatttttataggtttttaaagaaaccagaggttaacaattaaaaaatacattgtcgtttatttaattcttattgagcaacaatggttgtaaaaaaatcactggtcaacaatagaaatacactttagtgtttattccatctttcgtattgagcaacatgtctcttgacattttggtatttaattcatctttattgactaacaattcttgtaagtttttattaataattcttttaagtttttttttctatatttctgattttgataaaagttatgtttgtcttattaatttgtcaaatttgataattaattatgtatacaactacatatacaaaatatacaattatgtacacaaagggacacatcaattctataataaattcaatagtatccatgttaaatgataccaataataaattaagaaacttttaaaatttataaattatacaagtaaatatttatagacaaacaaaatattaactatattagtaatatataaagaagcaaaatgtataaaaatttagcatgaataccatgcgatgcatgggtactgacctagttttcaagtattttcagatattttagtattttttgataatttttcgagtatattttggtatttcgggtatttttagttattcaatttatttttttaaaaagataaggttgtagtttgttttttcggtttcaattccggtttaaaacttccggtttggttattatgcccaagcctagactgaatcatacaaaacggtttggcaaactatatcatgagagtatattttgttaaagctttcaacacaccgtatgtaactccacataaaacacatatcttcatgaagaaaacatacttagaaaaaatagaaaatgaaaacaaaatacctatgacattattataaaatatcttacacattatttaaaagtatttaaagaacaaaaaaagcaacatttacatggaagataaacaaaatttataaaaaagtaaaaatggtctcttctattaaccaattaaaattttctatatcactcataaataatgtatatgtataatagttttttttttataattatatataatagtttgctataaagctttacaatataaattagttcgtaaaactaaaaagttcatgtaatacaacaagaaagttaaaaaatcaaaaacattataaaagaatcactttatatttatccagatttaaaattgaaaacataattataatcattaaaaattaaaaaatattgcatacaaaagtttagaaaaaaagaaagaaacaaacatacccatagtcaaccttttggacactcctttgaatacacaaatacacataccttaaacacattttttaaacatataggccctccatacttggatctcatcattggataatgtcaagaataaatctagttcaagtgtctatttttaaatttttcattataaaaattataaaacttatttggatctcattgttgtagaagctctaagagacatgcatccctagagttaataaacttattttaatgatttatttttaacaatctcaaaaacctctcaaatatatatggcgcatttgcaaaaatatattttttcaaaaataccacagtctattttcaaaaatatctttttcatatacaaaatgactaaattacctttaatgagaaaatgaaactattatgccaaacaaaattggagccaaaaagtttttagtaacggaaaacaattatccgcgaaaagttgagtttaaaaatccttgtaaatatttcaaacccttttaagatccttgtatatattttaaaattcctcttattaaatccttgtaaatctttttaaatcttttaaaactcatataaagtctttaaaagtacttgtgaatctttttaaaactcttgtaaagtcttaaaatacttttaaaaggatttacaagaatttttgaagggttttaagacgattttcaaatattttaaaacccttataaatccttttaaaagctttttaaaacccttgtatattctttaaaaaatcttttcaaatattttttaaattcttgtaaatcattgaaaatctatatccagcaaaaacttctagaatcatgttcacgccaaaattttacaagatcatttttcctgtcaaaaaaaggcaaaaaagtttgggcaggaaatttttttgtcagaaaatattttggcgagaattttttttgtcagaatttgttattgtctgatatagtttgagggaaaattcattcactcattttggacttaattatttttcaagtaggggtaattgatcactaaatattaaaagagggcatgaatgaaaatagactacataggatggtagtattgaaaaagaatgtcaatagaagggcattcctttgcggaggtcatcctagagaagttctctctcatacacgcttttcgaggcgctgttagtttttttcttagagatagtttttcttcacatgcgaagttcctccggcttgcccctctcctaatcgacgacggctctcactctttcaggtcattctcatcagttaccggagttcattccggggtgttttccagcttttctccggagtgcttccgcttctagtggtgtggttcttttttctgttcaaatggctcgatctctgactacggcttctctgcgaccttctccttcgtttccaaaggatctctgtgcttttttaactctgaggcgtccaccggcatcgactttgtcaattattccgccttctccaccagatccgctagaacctccagaccctcttgatcccttgctagtacggaatttcgccggtgtggtctcgtggcctttgttgatttgtttcgtttcctctctgtctccggcaagtcagatttctaaatttttagatctgagctcaatccctttggtggcttcgttgagtgccttatcacctatcgttgggtcttcttggggtgctctttttgcctttaggcactcccttattgcagtatgcaggctatattccggttttgatccagctcacgtccctaccaggtttgattctgggtttttaagctctatctctacattctatttgatttgttggttagataatgaaatcattagccttactcgatgtatttgtgtccatgttttggtcaccctttcctttatgaatgtgatggtagtatataaggcttctatggttagattgccttggttgtggtttgacattctttgtcatgtttactcctttatgcatatatatatgtcctctcaaatgccccttttggtggaaagatttattgtagggaagaagatcttctgcggtgaagctaggctcactttcgcatctctatgtgatatggattggtggttctcgatcgtcattgaagttccccttttcgatggaattgtctgtcgtaatgtcgcattcgcattgctagcgaaagaacgtagcttgaaggcctccttggaagcaaaggatggtgctagaatcggttgtcttggtttagttgtttctcggattaagcttgttagctcccctctatcattatttctctctttgagttattgattttgcttaagctttttcaattgctcgactaacgtattagtcgttagtttgatttgtttggctcttagtagccttttgtatcctcttctcatagagacaaaactcttatagtttgaatgaaattccagtgatcaccaaaacaaagaaggacattcctaatagtttctcaatatacaataaggaagattggaaaagaaggtgttatctaacgagcaaggccaccataagtgttgaagttatatatttgtagatttacttgttccttttaaacttcttgtttttggagattataaattttagtggacttattattcaggtgaaaagtgtcatattcatggaattgagaaagctctgattccttacacaccagttgcaaaggagtgagtcatttacctcatgagatgatatatatctatcatttatgtattgaatttgtatagttgttgagaaaaattatgagttcatatggttttgataatcaatgatttctattagcaggaaaaaaaagtcagttatgatcctagtaaagtgcctagaactaaggtataggtagcatgacacacgtatgcggacaggagatgtgtgaggccataatttgctcatcctattgtaagagttaccaagttcttattaagtgttttgttgttaaatttataattatgaattttctcactagatcaagtttatagtatttctagtattactagtggaaaattcggggtacgtctggtataatttaaactattaatattttaaaatttattttatgatttttactgtttttagttttttttttttatatatatagaatttgctatgtataaatataagaatagtttgagatgcttgtatatttacatactacctatctatttacgatctttgaaattaaattaaattagtttttaaaacaaattacagtttgtcaatttatgtaattatggttgttgatgtattcttgcgttgttaatggtgtcactactacctctaatacaacaccatgggacggacgagaaaatatgatagctaacaaatattagattttataagctgaataccacaagagatatacagtagaacacgcatcacgagaataaaacaaaaaaaaaaaagattgatacaatagattaatcgagaaatgcaaactaaggcatttgaatgtacctttgacctttcgtgcataattatttttctataaatgtctatgtacactcctaatcgggagacagttagaaaaattaaagatagaaagacagtaacttcactcacaattactaccaccgttggtcctttcctattgctatttgctaattggcagctttaggctttctacctgccattcgtttatccacacctataatcatgcaataccggcacaaagaaaccagatttactgaacaaagtgatgttgtcctgtggaaatgaactatataaacgctaaaagagctatgttagacattcggacatgtcataagggtgacagataggtacttatgtggtagtaaaacataattaaattttaaatccatcaacctcagaataccatctccctaatggtctttttcttatcttgcttattgaggtgtgaggattaatccccatctttgcaaaacctaaaatatatcgtgatatataaaggagaggtctataaactatgattaataatataaagtctaagtacctcatatgaaaatcttttacggctttcatctgcatcaccaataggtgggtttaaatttagggcttatcacatattcctcatatttctacattttcccaactctttgcagtgttgttaagaaaacttgtcaatctaaaacataatattaagtaattttttgtttttgaaacaatgtatgaagtagtgtacaatagatatactacgtgtttgtagataattaacatcatgaattagtggatgtgtttgcttctttatcattgtcatcgtcttcatattcctgacctctttttttattagacctatttcaaaaacgtgggaattaagaggcaaaggttaatggtctaatctttggacgattgaatttctaaaattattggattcattctttgttcagtcgagggatctaacacctatttgataaacctaaaaaaggtacttagcttgtataataagaagacaggtggagctacactaaaagcagtaacgacggttcgccctaattgtctctcccaggcacagaaaccaaggagccgcttcccttggagatatgagcttcttcctccgacgttacttctccggtagcttccttgtctgatcggtgctagctgctaatgcgagatctctcaggcggacctttttttttggcgatgctgctgtttttccggtgagacttttcacctgagatgacttttttgcatttgttttctagccactctcatcgttttctgatgtcttcggttgctttccttgatctgaggcctcctcctgctccaccaccggagtcttcttctccgcggactccaccagaaccacctgacccccctgaccctcagatctgcctctcctttaatgtatctcttactcagtcgccctcgacgacgagaaaccctcttcttcctgcaaagccacgcaatagttttggagtgctgcttctcgacgagtccctctttgcaaactggtttggagagatgttctcccaggtttgcttgtccttctcgttctctaattcttctaatatgggaaggaatttgaagttcgttgaatgtgtggttctggttttgtggaactcgtggttaactcaatcgatttcgatggatttagatacttttgtgtttacgtttttgctctcctctagcacccttatcgccttgttgcgatcgcttactgtagtatgcagattctctctcgatttagctcggcttgaaattgtctcatggcaacttagacatagttctttgtttcagtttaaccggccagctgcccgtaacttattggtttttgaaaataggagtatcactgaagctaacactttgtctaaggctctctatgttgcgaagctgacttgtcaggctcctaaacgtggcatacctacaactctacctcttattgaggcggctcccctatctttaccttgtattgaggttctttccaccagcattcctcggtctgaggctctttctcttgtcttacctcagtgtgaggatattacttgtttcacggacgcggcttgaaacgcgttctctggctcctgcggtatgggatagatttttaagactcaacaccaaagagttatccatcagggctcgtcttctcgacttcatacaccttcggccttagctgccgaagcccttgcgattaaatcggcgctgactgcagcgttgcgaatggaattcacctccatcacagtttgctcagactctcaagtcctcacatctttgctcaatacagagaccacatcgaatgagcttcaggggatacttcatgatattacatgtttgtgtcgttcactcctatcttttaaattctgctttatttcacgtttagctaatgtttcagctgatgcaacagccaaagaggctttgttttctttggatttccctgttgtatgaaccttttaagattacttaaatgaagattacaatttaaccaaaaaaaataaaaatagaagattacttaaatgaagattacaattccaccaatttgttttcaccacaccacaaaccatgaatgaagttctccgaaaatctgttcaggatctcgatttgggaattgatgatatcccaattgctttgtcaccggaatttgtttctcaagcggccgctgtcaaccgcttctcgctaattgtcaccacggtgaacccaaggaagcaaaacctaagagcgttaattggtcagatgccaaaggtttggggttttgcagaccattgtgttggtcggattgttggtcaagggaaagtccaattcaagtttcaatcagaggaatccatgaatctggttctgcgtcgtggtccctggtctttcaatgactggatgttgtctgtgcatcgttggtatccaaacatcacagagaatgagatgaagatcatacccttttgggtccaaatcagaggtattccgcttctctacttgactaatgcaatggctagagtgatagggaatagattgggacatgtctcagatgtggacttagatgagaacacaaaccaaacgggcttcattagggttaaagtggcttggaacttcaacaatccgttgcgcttccagaggaacattcagtttgatatgaatgataataccatcatcaagttcagatttgagagactcaggaatttatgtactaagtgtggttccctcaagcacgacgtgaaggaatgcgctctagccttcgaggaaaatggccctgacaatgaggatgagggatataatgatgatcatcacaaccaggatcatgatgcacagaagatgtcggatgaggactgacttcctagcattgatccaacaactctaattctgggacttcagagaaactctcaaacttctttcaaccagggatcgccctcagactcagtcctatctgatctggcaagtgcattcgaggacacaaattaacagcggaacgactcaggtacctccatgccaaacatctgcgtgagtctttgatgaaacaaagggaaacatgccttcttgaagaagtctttgacaatgctacaaatgagtttgcttttgtgaagcgtaagcgggtcagttttgaaacattgtacaaccacgcggaggctgcagaggaatcagcagtactaggtcatcttcgtaagaaagacaggagagtaagctttgctgcatctgtgacatctccaatctcaatggacggaggcgcgggggacccggtacccccacagcccccatgaggatcggttcctggaactgtcagggtttcagagcgccgctgactcaatcgcgtcttactaatctatgtaaattacttaagtttgatgttttattcctcatttaaactctaaattagtgtgatgttataagtactctagcaagtatattaggatttcccaatgtaataacacaacccctcaaggtcatagtggtggcttggccttgttgtggaaggataatgtgtgtttatccaagatttctcaggatgaacgccatatcgatgtaaatctctctatcaataatatcaacttctatttgtcttgtgtgtatggtcatccatgtcaaagtgaaaggcattatttgtggacacactttgaaactttatcacttacacgcaatgatccttggatattgataggagattttaatgagatactgtcaaatgctgaaaagattgaaggaccaccaagagatgattggactttcagagattttagaagaatgcttgcaacttgtgatatggaggacataaggtcaacaagtgacaaattcacttgggtgggtgaacgccataatcatacagtgaaatgttgtttggatagagccatcatcaacacggaaggagcggctacattcccctatgcagagcttgaatttctggactttacagggtcagaccacataccattactattgactctagagaagctagaaacaccaaaaataagacctttccgctttgataaaaggtagctagaggttccggatttcaaaacgtgtgttcgtaatggttggaatgaagaaacttctaaacagagtactcaaatctttgatcaagtgcgaacctgtagaagagcaatggctactctgaaacacaagtctaatatgaactcacgtattaggattgatcatttacaagcgtcgttgagcaaagctatgtccagtgtgattcgagtagaacggttacttataccacgtatacagagcgatctcaccaaagcattttatgatgaagagaaatattggcagcaaaagagtaggaacaattggatgaaggacggtgatcgtaatacaagcttcttccatgcttgtacaaagacaagattcttcgtaaatcgaataacaactataaaagatgcagaagggaggatccgcagaggcgataaggagataggaatacatgctcaacaatttttcatcaatgtctacacaagcaacagacgacctgtttctcaaattgatttcgccgatttcaaatcattagtcacaaaccatatgaacgatgatctcacaaaagacttcacggacacataaattttcaacgcggtgtgtcaaattggagatgataaagctcctggtccagatgggttaacagctagattctacaagtcttgttgggatatagtgggacaggatgttatcaaggaggtaaaatattgttttcaaacatcatacatgaaacatccattgaatcacacaaacatatgtatgatacctaaaataaccaatcctgaaacactgtcggattatcgtccaattgcactttgcaatgttctatacaagatcatttctaagtgtttggagggtcggctcagaagtcatcttaataacatagtctttgatgctcaagcggctttcatcccgggaagacttgttaatgataacgtaatgattgcccacgaaatgatgcatgctctaaaatcaagaaaaagggtctcacaatcttatatggccgtgaagacggatgtaagcaaggcctacgatagagtcgaatggaatttcttggagactacaatgcatttgtttggttttagtgagaaatggataaggtggattatgggtacagtacgatcgattcattactcagttttaataaatggggttcctcacggcatgatcaaaccccaaagaggcattaggcaaggggactctttgtcccctatctttttatattgtgtgctgatgtcctcagccatcttattaaagctagagtctctgagggtgatatccggggaataagaattggaaatggtgtactaggggttactcacttacaatttgcggacgattctctcttcttctgccaagctaatgtccgtaactgccaagctctcaaaaatgtttttgatatctatgagtattattcaggccaaaaaataaatctggctaaatcaatgataacttttggatcaaaaatgcatagagttgttcaagaccgccttaaaaaggtactgagcatccaaattcatggagggggaggtaagtacttggggctcccagagcagtttggtcggaagaaaggagaaatgttcgagtacatcattgaaagggtaaagaaaagaacatcgagttggagtgcgaaacatttgtcacctgcgggaaaagaaatcatgctaaaatcggtagatatggcaatgcatgtgtatgccatgtcttgtttcaagctacctttaggtattatttctgaaaaattgaatctcttcttatgaatttctggtgggagaagaatgctaaaaaaggggaattccatggattgcttggaagaggcttcaatattcaaaaagggaaggtggtctaggtttcaaagacttagcgaagtttaacgatgctttacttgcaaaacaagcatggaggattatccaaaacgtgcaatctttgtttgcccgtaatatgaaagcaaggtacttcaaagatgattctattctggatgcaaaaccaagaaaatatcagtcttatggatgggcatccatgcttgcgggacgagatgtgataaagaaaggaagtagatatttgattggagatggaacatcaatacgtatcggccatgataatatagttgcgtcacatccacctcgaccattacacctcattaatttggggtcaaatgatacaatggattctttaatcgccacaaaaggaacataccgttattagaatgagaacttgatctcccaaacagttagtctgtctgttcatacacacctacacaactattatctctctcgggaacgtactccagacaggctgatatggaattatactactacaggtgattacacggtgaaatcaggctattggcttctatcacatgatccaacagatacccaagtcaaacctattgtgccttgtggtttggttgagcgaaaaaataagatttggaaactttcattaattccaataatcaaatacatgttatagagaaccatttccaaagctttgcctacttgcacaagattaaccactagaggcatgaatattgctacaacttgtccttgatgccttgctgaagaggaaacgatacgtcatgctctgtttaatatttctcactccaaaaggatttgatgccttttgaatattccgacattactaggacaccagttcacaaatgatgctgaagaaaatttatcatttcttgttgatactttttcaaaccatactctcacaattcgacagaaattaattcttctatggctcatttggagaatctggaaggacagaaataatttgtcttcaacaaatttagagagaatccctcaaaggtggtcttacaaacagaggcagaggttaatgaatgggtgaacaacatgaggaattcgtggaacacttcacgaccgtcgggatcaacatcaacatcacaaacttcttggacaaaaccaattgctccatacgtcaaatgcaactttgatgcaggttttcaccctcgcagtacgagtagctctggtagttggatcatacgggatcacgaaggctcagcaaaaataaaggattcatcattattggagcgggctaacacaactttggaggcggagacgatggctttgatagtggctatgcaacaagcttgggttcgggggtacaggagagtacaatttgaaggtgattgcgaaattctcatcaacacgatcaatggtttgaccactcgcatggatatttctaatctacttcgggacatagatttttgggcttctaaatttctctcaattatgttcacatttacccatcgttcttgtaataatgtagcacatcatttgggcacttctatgtacacatctagaatgtttcaatcagatataggaaatcagccacaatgactaagaaacctttacagataacatcattaatataaattcagtttgcaattaaaaaaaaaatctttgacaaaaaaaagaagaaaagagagattatgtcttacgaggaagctgattcgtttgatcgttcgtaacgtatctaaccaccgtcttcatttattacgaaaatagcactaatagaaaaatattaaaagagtgctacgtgagttatattgatgatgtggtatcgagagagtattttataaaagttgatgtggatgatttgagaggccttaatgagtaacttttattagtggtagatttaattattaattattaataataactattataagtatgcattaaatgaacattgtaaatcatttttaattttattgtaaaagatattgttgtttaggtggacactttaagagaagaaattagtagccctcatatatattgattatgattattattactacttcaaaaattagtagccattttgaattttaaaaaaaaatagtttttgttagtttaaataaatttaatgtaacaaataataataatcatttttaacgaaacatttaatatatatgttatagaaaaagtagtatatcatcattttaagtagggtattatcattatctatagttggaaaactccaaaattaagtcttcgaatttttaactgtttccaataatatctgctgagtataatgacacatgtgcctctatattgtgtcagacggcaacataatatttttagatttttttttttggttctgatccaacatctgttatacgttaacttaaatattaacatatactaaatatttcttgttaaccatactcccgaagaaactattaccgttgtacactaacatttagatgctaaccattttaataaaccatttatttttaatactgttccttttgaatttctctttcgaatagatgactatttttgttccgattcaaggaactgttattcgttaatttacatattaacgtaatcgcattagtagatgctaactctgattcagaacacatgaattcaacattctaataaccttgtctgtttgggtggatttgatcaataaataacatttattcgataacttaattttagcatatactaaatatttgttgctaactctgctccaaaagaaattgttaccattgtacgttaacatttagatgctaattatttaataaaccattcgtttgttttatattgttatctttgatttttcctcgttaagtagatgctaactattattgttccgattcaagtaactgttatacgttaatgtatgtattaacctaaatacattagtagatgctaactctgattcataacacatgcatttaactatctaatacccatttatgtttgtgtggatctgaggaataaattaccattatgtgttaccgtccatattaaagtaagagaaaacttagcaactaacataaatattatgtaaacccttctaatatccttttgtgtttggggatggaaccttttgttgttctgttataagcatatattatcctttaacatatatattttctttcactaatgattagatactaacattaccaaaaaactctattcactcgccaaaaaaacgtcttcttatcccagctaaggaccctataaatttttaatttgttgttaattaattttattttttaaaagagttgttaatgaataacacttttattatcgtgatgggtcctctgtatgttgtcttatttagtagggttttgtctctacatttaatgggaatattaaatttgcatgtttctctgagcaataggattataatgggaatattagatttacatgttttattacacctaaatataaaaatgtcatgtatactttcttaattaatttatccttcatatatatatatatatttaactaacccttttaagtatcttcgtattactatacagatatctaatataaaaaatttaaatgaatttcagtagatgttgactaataaaaataagaagaattttaatagatgtaaaaaatatcgtaaatttaaatgagtaaaaaaggaaaatacaacctattcaaaaacatagtaatttaaaaaaggaaataaattaggatatcaaatcctactaaagtggtgcctcgcttctagacttctaatactcttttcactctatgtatcttaacgatttcattctctctcttaatttttctgtaagaaaaacaaaaagaaaaaccctaagaatgtggaaaatctattcaaggattttaacaacgaaaaccttgaggttccacttcaagatcattcctcaaccaacgaagaagacgagtttatgatcgatatcagtgaatacttaagcgaagaagcaatggaatggactctgtttttgttactttatagcttaaacactagttaattaggggcttttttgaactctaaattgatctgtttcattaggtaattaccatttgtgtctttgtgtttgtaacgatctctagtagattcatgttgtttattgttttctatcagattttgtgttgttaaaattgagaatagagtttcttgatgaaagaacttataggcccattaaaagcccaacttataactaataatcaaatcctttcgacgaattgcatcaaatttccagttttgttttgttttgtaagaatgtgttagtgaatttggattttatgaatctcaaaatcaacagttttgagtattcaatttcgaagggacaagcgtaccttgtttgttttctcattggcttctgattctggtggggttttgcttctgagttacaatgtcggttttgatgatgatggttatggctgtggttagtgagactaattgtgttgtaaagtttgtaactttgcctaattttctgtcagcttttaagtaagttttgatatctggttcatgtgaacaaaaaggtttgaaatttcttcttataatcatcattttgttgcaaatctgattcaaaagcatggcactttaagtttcaatttcagaactgttctgttttggatttgagactgttttagttatcagatatgaggttaaaaagtctgcgaatttgcccatctggttactctttggttttgtggtatggttcactctcttatttgcaagatccactaatggaatgctttgtttctaaaggttgtttggattctgaaaatttgtcttttttcttttgtaggctgctaatctgacatacgcggctggagaaacgcaccgttggtatctcgcaaagtttgagaattatccggctaatcggcatgccattttcccttatgtctactaaatggttaagagttagaacacaacttagccaaaatatggaacattctgtgggaattctcattatctccatatgtatggaacatatagttataaaaaagtcctgcaatagtctaggttgtgaacttgccgtagtagtttgatagtgttatttctgttatgttgtttgtgttgagattctacagtttgttttttacttatgtatagcagagcactttaaaagtttgatactacatcgctgatgggataaaatcctccagaaccggtccaaaaggtatatccagttctttttttcttcgttttcgtcagcgcggcttgctttgattctcggtattggtcggatggatgtgaatagtagtgattagaggctcttctcttgttgaaaatgtatgttgtttttgatgcaatctttagtagacatttgtgtagaaaagaacaatgttgcagtggctagggatgatataacattttggcaaaactagaagaattatgaatttggcaacaatacagtttcatgacttcttgtatgttgtagattaatgtaaggaggaagttggaacattagggtccattgactttgtagttcgagtggaaaagcatccatatacacaccttgttgatttgctgtttcaacgtggtacatgcaatggatgcaaaattgatcttgtagagttgatgatctctctttgtctgagttagtctttgtgagtgaaaactctgcaacattggttcattgcatgatttgtattttctttctcaggtgaatatggagaaagtttgatctggtgaagatggaatcaagtaaaggttcaatgattggatcttacgatttgggatgtgactttggattaatgttgtatgcattttgcccaatggtacacaagtgtaacacttagtgttactttggctcgaatcgtgaaaccaaatgatgaacaaagttcgtttttagatcatacattagcacatgctaaaaatgaaaagcagtggccataaaaagaagaagagttactacatctttattaaccttatagacttaaagaatatgatgaaaatgttaaacagacacaaaatgaagaagtatctgattcctaagaatagttatgttaatgttgcgtggctcactagaaacatatattaatgtttgaaccaaactgctctattcacacaaagcttctcttccaaacaaaacatctgagttctcagttcaattccctcagccaatttcttgcaaacttaatcagtccttcccaagaaatacagagaagtgttgagaaacaaacaacaagaagatttaggaacacaaggatctctcgacttcttgatggaaataggatcaaggtttacattatccaggaagttttcggccatcagcttgtcaatactagccatgctttcaccgctctacgtagaaagttcaacagaagacgatcaagaacctgaagacgaacccttgagctttttctttacgctcttcttgcttctgctattgttgatcttggccattgccttgtctttatactgtgaccagagcttgaccaggtttgattcacaggctttgtggctcctttggtggccttcttgtgatcctcatccgtctcgcttttgtcttgaaatgtaaaagcttctgcttagaacataacacaaagtgattctagaggacacttaaaactttcagatttattataaaaaaaatgttaacattgttaaaacgaacgcatcaagtttagactaaacttatcctctcatttgaaatataatcaaatcaaaatcaactatatttgttatagatagaaaacaaaacaaggttataattatatcttcaactgatctgtttctttcataagttatttacttatttttgtaatattttcataattttatatcaaaacatcggttatatgaatgttaaaaacattacctattcgaacttattatatatattcacatttaatttatatgaaaactaaaataatttagtcccaataactaaaaagattgagataatttataatttacaattctagtaatctaataaaaaaaaattcttaatgaaagagggtctaatttttatttgacaaaacctagtttatctctttggttacttgttcatatgttacacataacacatttctaagactgaggaggtccctatcaccttaattatgttgacttgataataaatgatttgtttagagaaaactttgaaaaatttaattaggttgacctatataataaatgatatatgtaaagaaaactttaaaataatcgtaactgtcggggcttgagcagagcacacgctttggagtatgacagaaacaaaaaaaaaaaaaaaaaaaaaaaaaaaaaaaaaaaaaaacttacataattttcttgggtcaacatttaaagatttagtcatgtacactacataattataaatgatttgctaataaataattgtaaacacattttggataggaaaaaaaaagagataaaagtgttgaaaatctttaagaaaaaataaagttgaaaatttcacacacaaaaagtgatatattcaaaagtaacaattacttcttaacataattaaatctgagatgtaacatcaatgtaaaaattccaaaaataaattcctcaataacagaaagaaaataaaaaaggtctaacaaataatattatggatgttccttcccgccgccgtctggaaacaccgcggcgaatcaacaacgggaacacaattaccaaaactcccttttctcagcctcggcgtaagagtcttatgatgctgccttagagtcggaagagaatcatcaccggaggaagaagagtctccttctcgttgactcatcgctaaaacactcttgaatggcttctttgagatcccaccacgactacatatccggtgactgagaagattcctcctccgacgactataaagattctccggtttcgtcaagtccttcaccggcaaagatgaagtttccgataagctcatgaacgactttgacttccctttgtaaaactttgatatagctctcctaaaatgaagtcaatattcagacattaaaacgtgttccacgttcagacattaaccctagaaacaatcagacaaaaacaatgacacttacttgatgggcaaggcttcttcaagagattccatcatatcaagaggaccattgtaagaagactcaatctcattctctccaccttcatcgtcgtcactgttctccccgatcgaatcagaagacgtcgacgacgataagcaagcaaattcttgatccaccgtgaaagtccgatcaatcttgtcaatggcagtaaacatttttttagagagaaaaggtgaaaaatctttgtcaatccatagagaaatagaagataatgagatcttatagatttgagtttctgtttccgtttctatgtgctcttcttgttttctccataaaggaaaataaagatataaaaatctttattattattacaaaagagagaacaagataagaattgaaaatatattagctcttatcctaagccaactcactccttccttgatgtatgcatttttgttttgccataaaatcttatacccatttgcgggatgggatctatgaggcccattcaggtgtaaaaaattgtaatattttttagcgggaaaaagaacgataaatacaaaataatagatagcgataaagacaaatggtggtatcattttttctgtattactaaattatttcggtgtttttttgtttatgattgctaaacatgaaagttatatacatcttgtagttgcgaaaaagtgttactaatcaatcaaacccaaaaatggaggtatagttatttaaaggataatatagctatctataccgagatgaatcaaaaattatgattataccaatgttttctatataattagttctctctctataatttatgtaagttagacaaaaacgcccttattgcatatatcaaattatttagcaatgtaataaaatagttatcgatatttttgtcatcaatttcttcaagaataatatattatgaattagatgattatctatatgataataatatatatatgcctgtaaataataaaaatttatgttaaaacatatgatatcgcgataagaagaatgttaaggagatatacaattagtaatgtgttaaatttatttttaacatactaaattatacaatatattatataaacttgtcaatatattttaatctttcattcatcatgacataaaagtacggtaaaaataactgtaacgtactaatgtttcatttagcaaagtatctaacgtaataatatagcaaaaaagtcttaatcctcttttattgtgctgaatatacatacataaaaatacagatttataattttaaatcgataaatatttttcaacaaaggatttgtaaacttatcgcgatatcatagtttttagcacgttaaacaaatagttatatacttatcatcaatatattacgattatttttattcaatggcatttttgtaattaatttaaaagaaaaggatatttttggtttatatattatttctcctttatacttacctaaataactaatagttatgcatagattcttaatttcttcatcttctatgcatagatattaatatagcccttatttaaaagagatataattagagataacattactttgaatcttttttcttcccgctaattctttttgcttgtttaattggtatgtcagcggaggcacacgcgtaagtacttgaggaggaaacaatttagctcaatcgtcccctgatttccggcttttgagctgaggtcatatgtatgcacaataaaattgaacctcactatctcattctcagccttactcacaaaacaaattctagactattgatcaaatacagatgaatatgaaacaaacaaaatgtgaaagagtgaagaaagcaccaaagtttttacgagttatgactcgataggtataatcgaatctacgtctaaaccagattaattcaacaatccactatacgaaaatattacacatgtaggcatgtagctcgtacaacaagaacagagctcgcaacagcaagcggaatcaattgatgaagttaaacggagaagatagcaaactgagtacttatactcttatcatactaaatgataaaccctctatgagatttgaagaacttcctttgttttccttcaagaataccttttgcggttagaatctttcttcaactttccccgttaacacatccagctcacagcctaattgaacctcgcgatcttttccttactcacaaatgaaactcaaaataattcatcaaacacaaataaacatgaaacaccgaaatataaaagaatgaacaacactaaggattacacttgaatctagatttgggaaatctaaatatccaacatatgatagtgttacaacaagaaccgagctcaaaattcaaaagatgaagttaatcggagaagatagcaaagcgtaattatactctatcacatactaaatagaaaaaactatgaaatatttagagacttctcatatgttttccgtttagcatagtctctttgattagagtctttctttaaccttataactcaaccgaaccaagaaacttaagtttccgctgcacgattataataaacttaagttaaattgggttatatatttttttatttaatttttttgaatactcagaagatttgatcatgaactactgaaacaacgtttttggccaagaaataagaatttctacatcaaatttgtccatatagatcttatgatcattttcacaaacaaggtttcaatgcttttgggtacgttgaactttttccacggacgttgtaataccgtgtgaagttttattcatgtcctcttgttttttccaacgaaatactaagttacgtctaaccatccaaagaggaacaatgtatgatctaaattaattgaaaattcgaagaatccaatcacctttttttaggatcttaaaaattagaaagaaaaaaaacaagacagaaaaaactagtgaccgatggatgtgaatctctaagtcaagattagtaaacctaaacttaaccttctacgaaaaattctattataagttcccactaatcgtcccgccattttaaaaagatataaaaccgtggggagaagtagaaataaaaacaataaaacaattaacaaaacaagaaaaaacgaaaagcatgcaattgtttttcgttttttgttgaaacaaaaaacaaacttaacttcaccaaaaaaactacagaaaaaaaaagattcagtttccttttctttgtctccacttcttatataagagttgggcatttttattacaaacataacttttgaaatcatggctaattataaaggaagaggaaatgttatgatacggagcatgttattgggtctctatggcatcataaacattgtgtgtgtcaatggtactttcataaactacaaagatgctttaaccaaatccctcatcttcttggaggctcaaagatcaggcaaactccctcctaataatagggttccatggagaggtgactctgctctcgacgatggcaaactcgtaaatgtaagtttaggttatattacaaataatgtttattcataaatcagattttaaggttacaaaagataatgagataattatgtatgtataggtggacttgtctggagggtactatgacgcaggagacaatgtgaagtatggtcttccaatggcgttcacgatcacaacgcttgcttggtccacaattacctacgagaaagaacttcgagccacgggagagctcgaaaacgctcgtgctgctatccgttggggtacggattatttcctcaaatgtgcttctcgcaagaaccgcctctatgttcaggtttcaaacgaataatcaaatttgtgtgtttgcaattacgttatgctagaaacatgaacgtaccgttttattacttaaaatggttgtgcctatgaatatgatcaaataggttggtgatccaaacgcggaccaccagtgctgggcgagacctgagaacatgaagacaccaaggacggtgttggagataagcgataaagttccaggaaccgagatcgcggcggaagccgctgctgcattcgccgcttcctccatcgttttccgccatgtcgaccacaaatatgcacgccggcttctcaacaaagccaaattggtatgcttatcaatctatgcatctttttatacataaatactatattgtttaaaactcttttgttaatgtttaaaacaaagactattttgttgatttttggtagaaaatgtgatatattttttttagagttcctttaatcaataaaagaaataaagatctgatcaaaatctcaatttcagcttttcaagctagccaaaagccacaagggtacatacgatggagaatgccccttctattgttctaactccggttacaatgtaaatctcatctctatcttccaaatcattttttccttcaaataaatacactttttgttgtctttgttcatgttgtaattgatattaattttgacaaataatgtgaaggacgagttgatatgggcggcaacatggctatacaaggcgacaaggaatcatctataccttagctacctcaaattcgaagccataagcgcttacgttgccgaattcagctgggatctcaagtacgctggtgcgcagatcctcatcaccaaggtacataacacatcaaaatttaacttctttttttcaaaaccaatttatgtattaaaatatatgtaaatgcatgcagttgatcttcgaaggccacaaaggacttgatctatacaaacaacaagccgatagttttgtatgctctaacctccctggcagtccttaccaccaagtcttcactaccccaggttttgcctccatgaaataacatatatacatatttgtaaaacttaatgtatacagtatgattgatcatatatagtgtgatcttcttgcttaaaggtggtatgattcacttgagggatggtgccaacagtcaatatgtcaccgccaccgccttcttgttctcggcctacgctgatatactacagaaacacaaccaaaagatctcttgcggtagccaccaattcgattcaacacacctcatggctttcgctaaaaaacaggtattatatatttttccataagaatgcaaaccaaacatacacaaaatatttgtgttccttatttttcacatatgagttatgaagttatatataatgtgttagatatatacctaatgtgttatcattatatgcatgttacagattgactacatactagggcataacccacaaggaagatcgtacatggttgggttcggaccaaacccaccaaagcaagcccatcacagaggagcctcagtgcccatgcatgaagccaacgcgccgctaagctgcccattgagcttcgtgaaatggtacaacaagaacgtacctaacgctaacgagctcaccggagccattttgggaggacctgaccgtcaagacaaattccaggatctccgatggacctccgtgtacacagagccttgtacttacatcaactctatcgccgttggtgttctcgctaagctcgctgcggcttagagccttttgtaccacattcgagactactttgatgaaaagtattcttctagggtttcccttacctactataattgcatacacctttgtggcaatgcaatgtaattctatttttcatttttttttgcctttgtaggtagctttttggaatcatgttttctccaaaatataaaattgcatgggcataataataagctctagtgatttgaaacaataattaagcgaaattaatgaatagccggaatgataattctcattccgtttcacgtagattgttgttttaaactctatcttttgtttcatgtagaatgatgtgtttttgttgatttccgcgtaatttgcataacattttctaatctatttttcatttcaaataattgttttcagttctaatatgtgtctttaaaaacactataataattgttgtcaaaggaaaaaacaatattttacgacgaagtgagagtgactaatgaaggaaagaatataatcaggtcttagaagaatcttgcgagcagaaacttgctcagaatatttagaatatatatagcacatattcaacttcccatgtaatagttgactcaacaaaaaattaagtgggtgaaaaatgttacaaggaagaattgggcactccaaaccattttgccactttaaacattttgtataggttaaaagtttaacttatatattttcttggcactccaaaagagtttgaagacgaaatctttggcttgtatcactttagaaagagcaaaacaggcgtaaccatctccgatgacatcattacacggccattgataaatccatacgttctaggatctcttcactgcaatacctagcatatagaaaatatgcaagccttctggaccattggagtcaaactcaccaaaacaaaagctttttgcttaggtttttcctcttgatacaagatctgtttttgtgtggctctgacgcacaagttacaaccttctcttcaagatacttggaatgtagttcaaaattgtgtttcttggcttgaattcattatatctactcttgtgattgctgcaacagtaaatgatacacttaaaatgatcagcagaaattaaaggtgtgaaaaactttatttttttttctgtctattctattctaaatgtgaagattaacacaccacaaaccaaaaacgtttagagctttgagaaccaactttgactttgaaccaaaaacagaacctttgtaatgagaaatgcagaacagaacacacacacaatggtaacccagttcacaccaatggtgctacgtctgggccgggaactctctcccagaatccactatatcaacctttagaaatttacaaagagatttcttaccctctcagccccttacaaagctaactaagattcactctctttcactcactgtttccccaagaacacccaatacaagtttactcttgattaagtgcctctatgtttcttaacctttatctctctacaatgtccctcttctccttctggatccttctcggttcctctcctcaatacgctcctctgcagtagcctccaagctt

SEQ ID NO: 1349 - DNA, 114656 bp, Arabidopsis thaliana
aagctttttgcttaggtttttcctcttgatacaagatctgtttttgtgtggctctgacgcacaagttacaaccttctcttcaagatacttggaatgtagttcaaaattgtgtttcttggcttgaattcattatatctactcttgtgattgctgcaacagtaaatgatacacttaaaatgatcagcagaaattaaaggtgtgaaaaactttatttttttttctgtctattctattctaaatgtgaagattaacacaccacaaaccaaaaacgtttagagctttgagaaccaactttgactttgaaccaaaaacagaacctttgtaatgagaaatgcagaacagaacacacacacaatggtaacccagttcacaccaatggtgctacgtctgggccgggaactctctcccagaatccactatatcaacctttagaaatttacaaagagatttcttaccctctcagccccttacaaagctaactaagattcactctctttcactcactgtttccccaagaacacccaatacaagtttactcttgattaagtgcctctatgtttcttaacctttatctctctacaatgtccctcttctccttctggatccttctcggttcctctcctcaatacgctcctctgcagtagcctccaagcttgtcttgtagcctgctttggttcaggcttaacggctcttctgccttcccacacaagacaagagttgtttcctccatacaccattgctttagcggacaagcaaaacatgtactctttgtcttgtggtcctgcatctccacgcatatcaagctgagttggcattgttctccttttctcacttcaattgatgtgttcttctttactaaatcctaacacatctccacctagtaagtaagaacaaacaacaataacgactgaagcagtgataccttccttgagataggttgatcatgatatagctttatgattccgttcccggacttgagcttgattactaagtcttgacccttagcaagttcaatgctgcctgaaacttgctaactggaacaatcttggtgaaaatatctgcaggattactcagtgtagatatcttcacaacctccacaactttatccgcaatgacttcctggatcttgtggtacttgatgtcaatgtgtgataataggtttttcagtcaattatcccaaaacaccaatcatgtcgttgtagtattttaggttgtcaatccaaatgggtgtgatgctaacaatcaagatgtgatcagaagtcactaagtcaagccaagcaataacaggttttggtgtgttctagcaatcctaagtgaacaagcaggaaacagaaaataaaacagaaacagtaaaacactcgaccaacacagctctttgcagagccctgggtgaggtcgagtgacaggtcgagttacagaaaatgaaacaaagatactcgactgcacagtctgttgccagacaactggatggtcgagtatcaggtcgagtaacagtaaagaattgcagaaactaagcaacaggtgacaggatgcagtaaacagcagtagagtaaacaataaaatcaatcagacaaagaattcctaaggatggggtaattgagtagtttcgtttcctcagtttacaggtgattgacatgctcaacaaattaaccctagacaacaagttcgttaaccaaatctaagtgccaccgcaacagagactctcaagctaacctagtcccagactcaatcaccattgacgagagctaacctaacaggcattacgaatcaacaagttaaagccaaaacgctccctgcaaccaataccttggtacagggtcacgaatctctggaattagtggttcaggcatttcatcgaacaccttttgggcgcggaaatgtctgggctcaaattccagttgatcagaaagcaataggcattaagaacaactaatccagaagggatctatcaatcaatactcaatcacctagcatactgagaattctacactactctaacccatcctcagaaacctattcactactcagacatcatcacagaaagcataaacgttgaacaggttgaagacatgataacagcagtatgataacagaatgaataacagtaaacaaaaatcaagaacagaaactgaatattgaatactgaatagataaagagaaatccggattacaaaaagtctagaacacaaggtctgcggaaataaaaactaggtaaaaaccaacttgtctgcgaaaatgagaagtacatgctacttatagccaaatatcccgaaaccctaatactcaaaacgacgaagtatttggacgggttaagaactgtactcgacccacgtggtcgagtgagagctcgagtgaatagctggagtcttcttttcttccttgtgctcgagtgtctggatgagtgcggaatgaagaaggctctgaagcttgtcatcgagtatgcagtcgagtggtgtgatggagatactcgacctctgggtagagtgaggaggtcgagtgattgtctgatgatggaggtgaaggcactcgacctcgaggtcgagtgaagtgatcgagtgaccgtctggtgatggagatgatggcactcgaccacggggtcgagtggttaggtgaagtggtgatgtgctctactcgacctggttgtcgagtggtctcttgagatcttgaagctcctactcgacctcttggtcgagtggtttgtcataatcaggtctgcttcttccagatagctcgtcaacagctccaaatcacctgaaatcaacgcaaatatgcaacatgcatgcaaaactatcctaaacatgcaaagtgatgacaaatgatgtgaaatggtataaaacagtgatgatatgatgctaaagtgatgacaaatggatgctcaaaacatgcaaaatacacacttatcaactcccccaaacttagtctttgcttgccctcaagcaaacaatcaagaacaagctggaggtgaggtttgaaagcggggactcagagccaaagcactagataaaccagatgaaatcaatgtccaagttgaaagttctaagctgcaagatcgaattctacttaaaaacgttagccatgcctcattaatcaatcaatccgactcatatgctcgacctacataagttttcaaatccaccaatccctttaacattcattagttctggaacgtgaatcaagcaatgcatcatcaaagaactcatttggctaaggtaaaaggtcaagagacaaagatggtcccttacagaataggctttagtaacaggggatctctcaaaaaaaaaaaaaaaaaaatgattaagctttagtagaatgctaaaggtaagtcccaatctatgcatacagagataagatcccatctacccagagtacatcaaatgaagctctaatggtaatcctatctccaatcccaatacaagaactaaactctaccctttgcgttcatgaatcttttaagccctttttctaatcattcttttctcttctcttaactctaggcgaagcttcaacaccttgatatatctagcggatttggatttctttaacaactaaggttcctgtttttaacattttaaaaccaagggcttttgcccatcttcaatagctaacaagaactctttcttttctttacaaatcccaaaacctttactagactttttctgcttttttagcttacttcacctagagtcctttaccttttctcatcaattaatcaacctccccttttttttttcttttaaacacatcccaacccaaagtataagcacccacctagtcctatctagtccggaaaatgcgaactagaactacatgagacactatctctgtcgttacgaacctaacactttctaccaagcttaatcggaataagacctcacaaacactcacaagtgatatagggcttgaaagaaagtctaggtttgggtttgggttaactgctctaataaggagagtcagctacttggattaacaagagtgatcaaaatgaataagagaatccaagtattttagggtatccatgagttcaaatttgatgcagacatgataattaaagatcagattcaggttcaaattgatagggaatggtatcagatcatgacagtgtggtcgagtgagagcaatctaggcatggttcagttttatttcaaattcatcgactatgcaacagactactagcaacgagggcactgagtttatccggtgaatcaaaatgcttacaaggctatctcatcatcatcccctatgcatatgcaacaatcctaaatgaaacactctagactcgatcctaaatgtgatgcaactacatgaacattctttttttttttatgaaatcattttctgaaatttttcaaatttttttggttttttctatgccttagatgagtgcagactcaaaattatacacaatgcaacacacacttcctgagccctcccccaaacttaaatcacacagtccactgtgtgaataaacttggaagagagtactcaggacaaatccaatcacagaaacaaaaaatgaagaaacaaatcacaacagacggtataatacaacggtgaagtgaggcgcttacctcagtcgaagaatgaacgtagttgctcgtcaatggctgcctgcgattgctcccaggccatagacgaacctccttgttctgtatcagctccagcagatgggtactcgacctcatcagctctgtggcggccagcaccactctgaggaaactcgacctctctccttctgctgcggccagcaccgcggtcgcgtaaactacgagactgcagaagtcgtccgctcctactgctagatcgagtgagtgtggtcctcctcttcctcccagattcacgaggctcgaatgatgaatgcctcgcagggacatgcgggatctcctgctctctaggctcaggcctgcgccgacttggctcgggcgcgtcatatctcctcgaaggcatgtcctgagggagatgtccttgcggaatagctgtagtggaagaggagcagctgagcttgtccttcagaaacttgatagcccttaagcacttggcgagtaacttgtcctgtttcttgcaccacttctgcagcttgctgttgttcctgtgagcttcactcaaactcttgcttttcctcgcaggaggtatatgctcactgaaatgatacatgctcgtgtcaaactccgcttcatctatatcatccgtctcatcaacatcttctgttgtagctccttcggtgtgactaaactcctcggttggcggactgccctcgaaataaagatcttcaagcgcaggcttgaagtcaatgttcctgccctcaagaatcctagtagcgtcaatgcaggggagaagaatgttggcgattctaatcgatgaatgctcgaacctgtagcggtgaaagtcgccagccatgtcaaactccaagaactcacatctgcgcaaatgatccaagtccatcatcctcggtgctaaacctggttccttgagcgggactccacaagcttccagaattggcgtcacaacgccacctacgcatagtgctcctctcaccttcttcttccggtttgtcaacgcccacttcctatatccacacagatgcatcaacagaggcattactggtggtgcgttgttgagatcacctctcaagacattcttcccctttgtccggcggagaatccctgtaagcgcataatctatcatctccatgtccgtgttagacacggtgcctgtagactccctggagtaaaaaacgttggcgaccgatcgctggaagtagcggatcacaggacttcggatttggttgctcttggaccgcgccgagtttagcggtagattgttccctatagtggcccataaatccttaagctcctttctgtcaaatctgggtttggttccctttccactagggaaaccaaacagttcttctaacttcttgatcgaaagctgataccgctgttcattcactgagaacgtcaagaagcctaatcccatggtatccagctcaaagtctgtgagtgcttcatacatctccacttgcagcgtggagagaaactcgattgtctcctccttataggaatggtaagggtaagacatgagtgtctccagatgacacttctcgaacaaatgctgtacgtcctccagtaaccccagctgggctaaagtctcataacacggatacctcgttccccagaagtcattcatcttgaagaatctgatatactcctccactgtaacctcgtcgggtttgttcagcagcttcgtctccctgcgccatgactctggctcatactcagtctcgatatcctcatcaatcagctcatacctacttgacatcgccctctttcctctggcgatttcagctcttctctgattatgtcagtctgtagagcgttcgagttcgtccctgaaactctggtaaacatgttgctctctcggtctagcggaccaggactcagcttcatccacgttgtaatcagggtccatagatgattctccactatagttactcatgatgaaaccttgaaacaaatgtaactcaaaaataaacgttaatacgttagttccaacaaaactaaaaacacaaaccaatagagtaaaccggtcgagtgtaccaaaaattcttaaaaaattttttttttattttttttttttttattcggttttgtgaacacgtggtcgagtgatcccttggttgtgcttggcgatcgagtgaccgtgagaggcgagagatggttaagcggtttgaaagacgtcgagtttggttgcttaatcgagtgaagcggcgatgacgagctttcgtggggatgagagcagcggcgatggaaacgatggggaggcgttgagaagcggcgagatcgagtgactgtgcaaggtcgagtatgttgagagatggtggtgagagcgatgaagttgtgaaggagcagcgatcgagtagctagtgggtttgagacgagctgcggtcgagtgaacttgaactcgcggaagagaagaaacggtggtgttaacgagtgatggctggatttgagagatgagagaatgatggcaccttggtcgagtgatgagagacggtggtgaagaggcgagtgagaagcggtcgagtgcgtggggaagaaagatggtgaggtcgagtgacggagaagaaaggataaggtgaagagtgttggtcgagtgtttgagagaagagtgtttgaggataagaagtggcgaggtcgagtatttgtggagagaggggcgatgggatagagtgaattgataagatgaggtcgagtggtggggataaggtgcgttgaggtcgagtggtgaggagaagaagaagatagattcttgtcttttggtggtgtgcatgggagacatgggcgtcagcggcggatcccacagtgtcttcttgtctcttctctgttcactagaaaacctccgggaaatcccacaatcttctgtaaacttgataaacttcctagaagactctgtaggttctgttggtcgagtaaagtgatgattaaaattttttaggtttttaaacatcactcatactcgaccaatatactcgatctctaggccatcagtagagtaaaagttttgaatttttactctaccttcacgttactttttttttttttcctgagaaccacaaacacaaccaaaacaaatcaaaaataacaagaaagtaaaaattatttacaaggatagtcatggaacttcctcccaagtgagcttgttttaagtctctagcttgactcctcacacttatcaagaagaaaatgaactgtagagagggtcagcataatcctctctgataccatcatcatattcagcgtcctccctggaaaggtctgcagcagaatactcaatccccctttcttcaaaataggcttccttctcttctggaggataatctgtatcttgagaccatcttgaagtgaattcttttctcgggatagtgttaatcccacctttaggttgagcttccttctgcatctgattcagcttactcctaagttcctcaatggtgttggctagcttctctatagtttcattctgcttatcagacctctttctaagctctttcactctttcagtctcatatccttctcttgagatcgctctatcatttccagaggttcttccatcttcggttgacccttgtggagttttgttgatgccaaactgcaacttgatatgctttccaaggttgagactaattttcccttccctgacatctatcactgctcccactgacgctaaaaagggtcttcccagtattaagggatccttatgctctacttccatatccagcaccacaaagtctgtaggcacttctacgccattaatcatgactggtaagtctttcagcatgccgaacggttttctagaagacctatccgcaaggatcaaagtcaggtcacaaggtttatattgaatgaactctaaccttcttgctacagagagtggcatcaagctaacagaggctccgagatcgcacagacaatcgccgaaagcaaattccccaatggaacatggtagagtgaaagatccaggatcttctaacttctcttgaacaatcctcttatcagcagctcgagatggagtggcatcactttcatcatccgaatcgtgatacatcttgatcctttccagtatcaaatttctcacatctttgtgaggatcaggaatcaggttaagaacttccattactggcatcactgcttcaatctcgtccaactgcttcgctgcaatagacttgtatctctccatccatgctttcctgaatgtccacggaagagcacgtgagggtagtggagtgggtttgaatcgttttaccattctctcgattatggcggccttctcttctgaggtggattgagtgagatggcgagaacaagcagaatggttgaattcaacaacagagacttcaacctgagtagaagcctccccttcttgaacatcactgtccccagtgatgaaatcagggacaggtcgagttggcagctctcgatcctggcagatggtgatggcgtgagcggttgcatactcttttggattctgtatggacttccctggaagtcctgtaacttttggtgcagaggtagatgctgattggccttccaagtatctgactttggtattcaatgcctccactttggcattcaggtcattgtagctgcagtccagcttatggtgcaattcagataatttcttagccatttccattgagctagatgcttgtccctgtagcagctgttggaccatctgtttcatatcagcgtcaggagcagcaggaccttggtgttgctgaggtgcaaacccaggtggttgttgctggtagttcccctggaattgctgcttaggaatgaaaccttggttgtagggaacaaaaggtttgttctgactttgttgttgctgtggaggatacacctgatcctgagggttagcaacgttggtgctgcggtaggaaaggttggggttgttggttttgaagttgttgtatcctttgtagccaccctggttgttgttgatgtagcttacttcttccaactggttaccctccccatcttggacttgatattgctcgtcatcaacaaggaagtgcacatgcttctgctggctaagaagaatcctgtccagcttgtcattcagcgctttgatctctttcctgtgtttgtcatcagagtcagctgttcctctgacggtcctatcacagtcttcgttgtaatttccatctgattgagcaaggttctcaaccaattcccagccttcttcaacatccttgttctgaaaattcccattgctggcggtatccagaagcattctgatgcgtggtaggactcctctgtaaagagtgctgagcagagaggccttagtaaaaccatgatgagggcattggttggtgtaacccttgaaacgctcccatgcttcacagaagctttcaccagtcttctgtgagaaaccagaaatctcatttctgagtcttgcagttctggcattggagaagaactttgacagaaaagccttcttacaatcatccgaggtggtgattgagtcatggggcagattcttctcccagatatgtgctttgtcacccaaggaaaatgggaacaaacggagcttgaatccgtcttcactgacaccattgatcttcgttaggttgcagagcctatcgaattcatcaaggtggtcgagtggatcctccattggcaaaccatggaatttgttcccctgaatcatcgagatgagaccactcttaatctcgaagttgttattctggatagcaggaggtgcgattcccttcctctgacgatgatcacgtggtgcatctccggcaccaatgttggcatggccattttgctgattctgttcttcagccataacgagtggttgctgaggtacagggttgactgtggttctcctttttctgatttcgcgggctgtgcggttgatattgtcgttgaaaaggaggttctggttgcctgttgatcgagttcgcatacagtagaggtgtacctggatcaagaagacaacaagaaaaacacacagttagtaactaaaaagaaaattgaaaaagaacttgatctaagcaagtctgaaatctcaaatgtaacaaacaaacacccaattggcaacggcgccaaattgataataggtttttcagtcaattatcccaaaacaccaatcatgtcgttgtagtattttaggttgtcaatccaaatgggtgtgatgctaacaatcaagatgtgatcagaagtcactaagtcaagccaagcaataacaggttttggtgtgttctagcaatcctaagtgaacaagcaggaaacagaaaataaaacagaaacagtaaaacactcgaccaacacagctctttgcagagccctgggtgaggtcgagtgacaggtcgagtaacagacagaaaatgaaacaaagatactcgactgcacagtctgttgccagacaactgggtggtcgagtattaggtcgagtaacagtaaagaattacagaaactaagcaacaggtgacaggatgcagtaaacagcagtagagtaaacaataaaatcaatcagacaaagaattcctaaggatggggtaattgagtagtttcgtttcctcagtttacaggtgattgacatgctcaacaaattaaccctagacaacaagttcgttaaccaaatctaagtgccaccgcaacagagactctcaagctaacctagtcccagactcaatcaccattgacgagagctaacctaacaggcattacgaatcaacaagttaaagccaaaacgctccctgcaaccaataccttggtacagggtcacgaatctctggaattagtggttcaggcatttcatcgaacaccttttgggcgcggaaatgtctgagctcaaattccagttgatcagaaagcaataggcattaagaacaactaatccagaagggatctatcaatcaatactcaatcacctagcatactgagaattctacactactctaacccatcctcagaaacctattcactactcagacatcatcacagaaagcataaacgttgaacaggttgaagacatgataacagcagtatgataacagaatgaataacagtaaacgaaaatcaagaacagaaactgaatattgaatactgaatagataaagagaaatccggattacaaaaagtctagaacacaaggtctgcggaaataaaaactaggtaaaaaccaactagtctgcgaaaatgagaagtacatgctacttatagccaaatatcccgaaaccctaatactcaaaacgacgaagtatttggacgggttaagaactgtactcgacccacgtggtcgagtgagagctcgagtgaatagctggagtcttcttttcttccttgtgctcgagtgtctggatgagtgcggaatgaagaaggctctgaagcttgtcatcgagtatgcagtcgagtggtgtgatggagatactcgacctctgggtagagtgaggaggtcaagtgattgtctgatgatggaggtgaaggcactcgacctcgaggtcgagtgaagtgatcgagtgaccgtctggtgatggagatgatggcactcgaccacggggtcgagtggttaggtgaagtggtgatgtgctctactcgacctggttgtcgagtggtctcttgagatcttgaagctcctactcgacctcttggtcgagtggtttgtcataatcaggtctgcttcttccagatagctcgtcaacagctccaaatcacctgaaatcaacgcaaatatgcaacatgcatgcaaaactatcctaaacatgcaaagtgatgacaaatgatgtgaaatggtataaaacagtgatgatatgatgctaaagtgatgacaaatggatgctcaaaacatgcaaaatacacacttatcaatgtgcttcgttcgatcatgatgcacattgttctttgacaatgctatggcgctttgggagtcacagaaaatctccacagtctcttgctcatagccaaagtccttgagcagccctctaagctatattgcccctttaacagcttctgtgagagacatatattcagcttctgtagaggacatagctactaccttctgtagacacgacctccaactaatggtgctgctaccaagtgtaaacaccattccacttattgaccttctgttgtcaacattagcagcttgatctgagtcacagtatcctctaagaatgaagtctaatccccttttgtaacacaacttcatcttgagtgttcctcttatgtatctcagcacccacttaactcccaaccaatgttccttaattggtaaactcatgaagcgactgatgataccaaccggataagctagatcgggtcttgttccgatcatagagtacattatacttcccaccgcattagaataaggtactgacttcatgtactcttcatcatccaggagttgctgctctgaagcagcctgcatcttaaggtgaacaccaagacgagtcatcaccggcttgcattgctccattttataaagctccaataccttatttagataatcttcttgagacagtgttaaggttcctttacttctttctcttgtgatctccataccaagaattttctttgcagctccaaggtctttcatttcaaatctctcacttaacttctgcttcaattctgaaatgaccttcatgtcttttgtagccaccaacatgtcatctacatagatgagtaagtagatctttgaaccatcctccagtgactttatgtaagcacaactatcacgaggactcttctcaaaaccaatctctagcatgtagctatcgaacttctggttccatctttttggtgactgtttcagaccatatagggatttgtttaacagacacacttgatctgacttaaactgatcttcgaaacctttaggagcttccatatagatcttctcttccaattctccatgaagaaatgtaattttaacatcaagttgctccagttcatagtcctcctctgcaacaatggcaagcagaatccttatggaaacgtgtttcaccataggagagaaaacttcagtgtaatctatcccttctcgttgtgcatatcccttagcaacgagtcttgctttaaatcttgccatctctacacctggaattccaggcttacgcttgaaaatccatttgcagccgatcactctctgttctttaggctttgtgactacagtccatgtatcatttctcaacagtgaatccatctcttcatctatgccttccttccacagaacccaatcatcatctttcagtgcttcttgataacttgcaggttcgatggtatctccatcaaaagtggtgacaagggcttcagcatttaatgattcctcatcatctgcagactcactgtaatagccttccacatcaaagcgcctaggagctcttacctcccttctttctctatctctgaccaaatggtaactgtcaagagtattagtcaccacttcattgttctctgaatcatcatcttagagattgacctgagtttgtgaaggacctcccagggatcctgtttcttccaagaggtctccacctaaactcaaatctccaaggccttctagataaatgtcgaaagaatctcttgatgtttcagcttgatcttgatcatctttgtttttttttttgcatcaaatccttgtaaacagcattttcctgaaatgctacattcctgctaactgtgcacttcttttcatccaacacccagactttgtatccctttacccctgcaggatagcctagaaagatgcacttctttgctctaggcaccagtttgccttcaccggcatgaacaaaagcaacacagccaaatctttttagatagctataaaccggagacttacctgaccagcacttatcaggaatctcaaaatcgattgtagatgacggtgtcttgttgaagagggtgactgcagtgttcgtagcttcagcctagaacgtctttggtaagccagactcgcttaacatgcttctgaccttctccataatcgttatgttcatcctctctacaacgctgttttgttgaggagtataggcacatgttcgaggtctgactatgcctctatccttgcaaaactcattgaactgattattacagaattctagaccattgtcggttcttagaatcttaatctttctatccgtttggttttcaaccataacacaccactcagcaaatgttccaaatgcctcatctttatgcttgagaaagtaaacccacgtttttcttgagtagtcatctatgaatgagatgaaatactgacactttcccagaaataaaggaaccgatggtgctccccataagtcagagtggatatagcttaacttatcttcagttccatgagttgcgttcacaaaaattaaccttcttgctttaacatagatacattcttcacacatttcaagtcttgagactctctttcggtctaggtaccctttcttgaccaagatatccatattcttttgacttatatggcctaatcttctgtgacataagactgtatcatctttccttctctccacagtcattgaattacttatctcaggctttccttggagtaagtaaagcttctcatgtttgttacctatcagtacagccctagttccttccttaaccactaagactcctttacttgactcaaaactataaccttgttcatctaaggttcccatagatggtaaattatgatccatgtcaggaatgtaccttacaagggtgagtaagaaagatgttccatccttgttttggattctaacccttccaatgcctttgacctttgaggttgtcttgttcccaattcttacagatcctcctacatcttcactcaaatcctcaaaccattacttcttgtgagtcatgtggtaactgcaacctttgtccatgatccactcattctccagatttacgtcagttgaatgtaatgcctctgacacatagtatcctaagccctcaaatgtgttctttgtaaccaaaggagcttcgcccttgctgttgttcccttggtctttccctttgttatgtggctttcccttgtttggacatgacgccttgaaatgtccctcttctccatagatccaacaacctttcctagttttagacttagatctagatctagaacagttgttcttgttgtcattttccctctgctctggtctacctcttgtctcgttcttctctttgacatacagaccctcagcttgtcctcgtatactcttcttatttgagccaagttccagctcctttgagtaaatagctccaactacttcatcgactgagagagttgttcttcctgagctatacttaagagtatctttcagttgatcaaactgcttcggtaaggacatgagcagcagaatagcttgatcttcatctgagattaacacgtttgtgttttccagatcagctattaggcggagaaactcattaatgtttgcctcaacagataagttctcttgcatcttgaaactgtatagtctttgtttcagataaatgcagtttggaagagccttagacatgtacagtctgtctaaagcatccaacatagaagctacagtcttctctttcttgatcttccttagcacttggtctgaaacgcttaatactattgtgctccttgctttctgccttttctcctccattatggcttctttctcaggttctcttccttcttctaacgtctttgaatctgagaccatatgtgattctttgagagctatggttaggcccaacagatccatgtgagccattagcttctccttccacatcgtgtagtctcctcgttcgtcaaacttctccatttcaacccttgctgacgacatggcttctttgttttgtaaggactttactgaaccaccaatacaaagaaccttcgctctgataccactttgtgaaaattaacacaccacaaaccaagaacgtttagcactttgagaaccaacttcgactttgaaccaaaaacagaacctttgtaatgagaaatgcagaacagaacacacacacaatggtaacccagttcacaccaatggtgctacgtctgggccgggaactctctcccggaatccactatataaccctttagagatttacaaagagatttcttaccctctcagccccttacaaagctaactaagattcactctctttcactcactgtttccccaagaacacccaatacaagtttactctctattaagtgcctctatgtttcttaacctttctctctctacaatgctcagcttatatagacttagaggttttaacttagtctccttctggatccttctcggttcttctccttaatacgctcctctgcagtagcctccaagcttgtcttgtagcctgctttggttcaggcttaacggctcttttgccttcacacacaagacaagagttgtttcctccgtacaccattactttagcggacaagcaaaacgggtactctttgtcttgtggtgtaacacccgaaacccaatcccttgaacccaccctatttgttttgttaaaaacaaaagtccatggaacccattgaagccaaagtgaagcaagtcacaaaataataagggttttgttacatgtgtatgtatatatgcttatatcgtcatcttcccgcagccttctcacgtcatcatctacagcaactcattactaacctaagaacatcaaatcaacttgatcccaagccaccatcaccattgatgttgagatcggagttgttggagcgtgtggttttgtttttgatcacgtacaagtgtggagtgaaagcgaatgtcacggatcatcactatcaaacaacgacttgattggatatatcaagttagcttttgggtttttgtgtgaatatgtgaaagaaggaaacagttcaagtggtggaattggtgatccgtttcccatcacgtccgaaggagtttgggcgatttcttaacgttctgaatagatctcgttcccaagttttcagaacagtttttcgatccaaaatcagaggtaagatcaatcggaaaattgcgtttagagttggtgaatagtcacagttttcagagcgcagttttttctaaagtatctgagaaacattgtagtttcaggtagaggttttcaggatcaatttcccgctgaatcagagagaatcaagtgtggcgtgaggtgtcattgcaataatcataatgttaagaatccatggccgctgacagagatagaatcgagattatattaaagaagttatgagtatttccttctgggcaagtaactgtagaagctgtccaaatctgtgctaagtataaatccagaacagtgtgtgactattggttttgcgatgcgttttcccgatggaccaaaaggaattagatcacgatcaagacgtctatggaaagatcttgcttcaaggaatttagagtagctgacatcttgaccatcggatttaagctccatccgtatttgactttgaaaggttgcccagaatcatctcaagttgcagaaacctagatatcagttctgatgcatcatattcagaagaacgtgggagattcatgtgaggtctgatcgagatgaaacgtcgtggacttattcgtgatactactggctatatattaaacggtgggatcacgtttctaacggttagttctcgacttatgagtatgttactgagacagttttgtatagagtaaaccatgacaaggttttattgtttgaatgggaaacgggttcggttggagctgaagctttgcagaagcctttaggactcatggagtaaggttttggttgatggagaagcaaggtggagctcaagagtatgcagttaaagctcctatagtatgttggtttaaaaggagagaaaggagaatagagatgttcttcatcttcaactaggctaaggtgagggtggtatttgcggaacatggtatcattttcttttgttatgcttcttgacgcatgatatgtaggcttagatatgattgtataggataagattacatgatgatatgattttatgattgttgagtatgatgtttgataatgtgatgttatgtatgatattataagtatgtgtatgttaagtatgattatgagtatgtatgtatgatgaatgtaagattggggagaatcgagctatgggccgtggtctccctagtgatgtggacagtgatggaccgacgggttaacagctggtcaagaacggctgacgagcccggaatgggagtgtctgagccacgagggccagcctccacctatgaggttctagtcgtcacgaggatgactggacctaacgatgtgtatgtttacattaatataaataagatgattgttatgaatttgttattagaagttaaagcatgttagattgattgcttgtgtctaagtttatatgttatgatgatggttgtatagctttagaaagtgttttatgtttcagtgggcagagttgattcctctccctgagtattctttactcacccccttttcttcctttttcctcaggttagtaagcgtgaggagttgtgtgcaatattttgttcgagtatgaagtttaaagaaaacttttttggcaagatcagatgaataacatgccgtcttaatctatattgcggggcgggtgttacatgtggtcctgcatctccacacgtaataacactaaatttggataatctctagctaattatatacattaattgtaacaagttatagttgttggtcgtaattgagtttctaatgtttgtaatgtagttagttattaattaagtgtcgtgtctgttaagtaagttagttatgtttgttgtgtcacaagaaagaggagttagaactcttgactttcatgtctgttggtttatatttaagttcgttgttgtaaaccttgtaaaacagttgttgtgtttcaccttttctacaatagaaagagaagttcttctatttattgttctgttgacgatcaaaacaattgtgagacaaagtctgattctctttctttgttcttaactgtgttctgtttctagaaagaggtttcagtttccaacaatagtgtctataataaaactctttcatcactcccttctcaaagtaaaaattagatcatgaatcttaggttttgattaaaaggccaaccaattcttgtatatacggactctaaccatgagcctgatctatgagattgatttttctacactaaaaattattttctaatcaaacatatgattcatgttggtagtagattcttcactagctagctattagaatatgtcccacatcgagactttgataaattgtggagcaatatataagtatgtggtaaacctccactcattgaggtagcttttgggtatgagttaggcccatactaatattgtatcagagccaagtttcaatgtgtctcgattgtgtaccacccgttgatgtccagtcccacaaacttcacgcttcaaatgttcaatcctgagcgtgagggggtgtattagaatatgtcccacatctagactttgataaattgtggagcaatatataagtatgtagtaaatatttaatttttcttggatttattttttcattaatttgttaataataacctgttatttgacttcataaaatgttcatcacatatgtgtcagcacaagccaatgttatcatatatatgactctgcacaaaatgggcaagcaaacttctcttggaaatcatggtctccgtttatttcttcaaggggaggagatcatttagcataatacagggaaaggtttagtaacatattatctaatcctcataaactttaggatctaaactaaaaaaaaaattctcaattagagagggtagaaaagaaaatacaaactaaacaatacccaaaatcctaaacaaaaccggcctataaggacatatattgcaactttatttcaacatcctgagaaaaaacaacctcaattgtaaattgaactgcaaagaaacaagctaacactaataagtgaatatcatacttcctctactctgtatatatatgctaagaacatttatgaagattcttaaaagaatcttggtataataagatatgaattatataaaagtccagcacatagatatgattttacaattttggcgagaaaacatgattttacgattttggcgggaaacatgtttttacggttttggcggaaaatatgattttacggttttgagagaaaaatatgattttgcagttttagcggaaaaacatgattttacggtgttgtcgggaaaatatgattttgcgattttggtggaaaaattgaatacaattttgacgtaaaataatagtccgtgatttcccaatttatacatttttttggtgcaatatgtaattttaaaaaatattaaataaaattttatagaaaattagtattattgcaaaggttatatttgtcatttattcattttgactaaaccatctccatccaaatagtcaaatcaagtttatccaaatgagttttaaaagtttgcctaaacttacaaagtcattcagatggatcatccaagtgattcattcaaaatatctgttaaattgtcaaaaacaaacatcattttttatctctatctaaatgatccatttggatgaagaaacaaacagggccgtagtgaaaaaaaaaaaaaaaaattggatttcactgtcttttctcataataaaattcacaagcaatagatttataacagcttcataaacacaacctctatataacatacaaaactagagccggaataaactcaaaagagagcagaaactattatatgactcagacatttatttcacatgtttaactcacaaaacatcaacgtacgaatattaatttaacttatacatctgaattctcttaagaagaagaatctggcattcatctcacttgatacatgcaaataaccgactaatcactaacttattctctaattttcattcattcattagtgtcaaatgtcgattatttaggaaactttctatgtactttttttttttaactcaagcttttctatatacttataattttttttttgatttgatttgtacccacaagtaaaaattatttggtgaaaaataaaaaaaaatatatagtatatatagcaaataatatgtatgtatatataaatatatattatatatatattgagccctctatgttttttctttaataatttctagtatttctttctttcgctctagagtttcacaaaatagtcgtgatgaagaaaagacgcgaaagagacctcaccatccccgacacaacttggtcacggtggaatctccacaagagacatcaatattcctatcgatctaatagtggagatactaaaaaaactccccgcaatctagtgaagttccaatgcgtctcgaagcaatggttatcaattatcaggagatgtagagacttcatagattcgatcgtgactcggtctttgactcagcctcctcatgatgcccatctcatcttcgagcataattcaggccccctcaacgaatggttcttagtgttctcgtctaatacgtatacaagaagatacgctatttttaacagacaaaatcgtcgaaataacgttagaaatagccgttttcgattatataaattggtcgatttgatctcatcggaaatctgaatgtcgtcgcaaacgtgttacaaattatcaacaggtttccgatgaggtattttccgataatttttctacgcttttctaacaataacattagttgggaaaccagttggaagtggaacatagttggaaatgatcgtcggatcctcattgaaaatattttctgacaatttttctacgcttttctgacaatacattgattgagaaaccggttggaacatagtcggaaatgatcgtcagatcctcgtcggaaatattttccgacaattttctaacgaatattaatgacatgcattgcatcagaactttattgaaaatcggtcggtatcttcttctgatggtttcccgacaacgttattcccgatggtatacttataagattaacatataatatgtatatcattctatatgtatcattctgtacagtagtatctatctgtacagtggtctttatctgtacagtggtctatatcacgtaatattctcttttttgggaatgttccactattaggcatttttagataatgtttttctgtttgaggcactttatagagaatatgcactttttcaactaattctttttttttaagacttttttaccctcaattcaatatttatgtttttaattctcaatttctctttcttgttattcctcttccacgatccttacccaaaataaataaaatctctctctctctctctctctctctctctctctctctctctctctctctctctctctctctctctctctctctctctctctctctctctctctctctctccacgtctccataacttttggagaagtttcgtaaacaattcgatctcaattatcttaggaatttggtaaaagttctatgtccataaggtcttggaggtggaggtgtctgcaaactgtaagaaaaatcaacaaacaattttttggtgtccataataatgagtccatttaaatatatccattcagaaaactttttactgattcatattcattctaaataccttttttttttttttttttttttgatcaaagattcattctaaataccatgtccataataacaggagattcgattaaccgtggtttataaagaaaccaaagttccatgtccataaggtcttggaagtggaggtctcttctaactgaaagaaaaattaacaaacaattttttggtgtccataataacaagtcaatttaaatatatccattcagaaacctttctactgatctatatacattctatataccatgtcaatgataacctttttactgctctatatccattatgtataccatgtccataataacaggaaattcgattaaccggaatctcgatgctacatagatgaaacgagtttgacacatgagagagaacaaaaatcaaatcaagccgccattgttgaagaagaagagtttcttagataactgaatctcaaatttatctcaaaacaaatatttaaattgcaaaagaaattacaatcttaaagaaaccaaaacctcgtattctccaattagtccaaagagaagagaaagccatcgtgtagagtggatttggagattaattgcagatttggaattgaagatcttctagaaaatattttttttcttcgataaagtgaaaaaaaaaaaaaaaaaagagagaagagatgggaaaaggagagataagagatggccgatggaaaaaatgtagttaaaaggtaaataaataaaataatttatctaaagtgccttctccatttaaagtacctaattaggaactaactttcaaaaaagtgtctaatcacgtaatattcccttttttatatcccttacacacctctctctctttctcatcaaacaaaaacgtttttttaactactttactaattataaatagtaaccaaactacttctccaatttttttatagtttgctacaacaaccacaaatgtatagtttttctcactaaacataataactataaaccatcttataacaaaaaaggtttcttacaataatctagaatgagtagaattaattcaaataccatatttttagaagttcttaaacaaaaattattaattttaagtgtaattgaattataaattaaaatttggtttagtaagatttggttatgcatgaagtcagctgactgaggaaacaaagagagcacacaagaggacttgttggatatgtctaaagatgacaggttctttagcatggatgaattgttcgataatgcggaagaacatgatattgtcgttacttaacatcagctaagtacaccggttctttgttctgggcaaggtcactatctcgatactcaacggcaacaacaacaacaacagcaaatagtatcaggatccgggatggtgacgagcaacgacaaccacttccaagaagactggtcggatgtatttaatgcgagtactttgacatggatgcaatattgaatgatatgaagacagagcaagacgtccgtctacctgagaatgtataataatatagtggattttccggggtaccaatttctggtgagatgtagggtttccacattagagacatgaactcgttaattttttttgtcgttagctttctttattacaaaagagagatcgatatcaaaagtgagatgaatttagcattgtcatctatgtttggatattagggtcatgaatctaatcttgtgtgttcttctatcaatgatacaaattcacgttacaaaatcatgaaactcgttgctataaatatattgttgaaggtttatggtggaaaacataaataaatctgaaataaaacacaaaaatacataaataaaagtgtaaataaacataaataaaatgcttactattgtaattcttaatcaaaaattaaaatggtaagcatttttctttctgatggaaaattaaaacacacaaaaatcaaatcaaactccatagatacgttgagatcaactgcttttattttctttctttcattccttccttcacgatgtcttctagtaaaccggtattgtttgacactcttgaaaatgaatcagaaataaaagagtaatctatgatggaatcactaacactctgcgtttttggttgtggaggatagaaaattgccgacagttcatcaaatggagatgaacgaggaagattttgttgtcgtttcttcttctgcacccgaccatgatttgattgtttttgtaagtttttttcatgtgagaaacatttacccttagaagtcggttttttgtgaactaaatatgattctagcatgcgcggtgaattttctgacaaatggttgatgatctactcattgtccgttcttcttgcatgtttactccattttgtagcttcaatcataaaactgccaatgttcttgcatgtttacgaatggttgacgatttactcaaagtccttcgtcttttgtctattccgttatagtattgacaattatttttttcgtttgtgtatgttcatggcatttttccttatgaatagttgtctaattaaatgtttgtaagtattgaattctctgtattcgtccttcttttttaataactaggtgagttgccacgctacgcgtggattgttgttttgaaaattgtttaaaaataattatgtttaactatttttattgctaattttggttattttgtgtatgttattatgtaaataaagttgtatattcattttatgtaacttttttttgtatagttagattcacttttgattcaaatatcaattctattttttcatgtataaatcttcttatctatatacccaagattctaatcttttttaactatcataattacatcaacaatatatgatacaatggtatacaattatgttacttattttgtttgaaagttgcttaacttgattctaagcaaacaatttgttattacatgcattctctcctaatctagtattacaatcacatcatgataagctcatggctaagtattggagtgacataatttaaatagcaaatgtataactaactattcatttgttttaaaagttttcacatgaaagagaaaaaagaatgcaaaaattaaatagtctttttggtcaacacttttaggtttctcttttttcatttgcatatagccatattgaagagagtgtcgttgtggtgagatcccaaatctgtgtagttgtggtgctatataaaacttcttaggaggacacatgtcgtttacccaatcttcttttgtatcgttttcttcttcaacaataaattcttcaattgtaaatgtgtacaacattttttttggttctcttccatgttgaattatttcagcttcttttatagcttattgtaacatcggacgtgttttgcttacttagaaaaacgctaatttgatagattgtgtaataaattatatgagtgatattttgtctgcctagtgccaaatttactataagagaagaacaatcaagtctgaaattaatcacagaggttctcattttcaaaggttagatatcttaactgtttctttcccttactacattaagtaataattatttgggtttaaagaaatgattagagttggatatcaaattctcttttcgtgttttgttttttagaatcatttagtttaactaaataaaattagtcaaaatcaataataataataataataatttatagtaaatatacagaaagacgtgtcatcgtcttttttatataataacataagatgtcataattgtattgtaacataggaaatgttttaaactttgaatcatgagttgcatataaaaataagagaaagtacgtaaatatgtactttattcattatctcttttatgtatattccgtaaataattttgttttaagtaataaacaattttttttttgaaattacagaatgtgaatattgaatatattgttcaaaatggttgacggcaccactatttcatataccgtcagtgttgacgaacctttaagggatgcatgtgggcattcaattattataatcgcaaaattatactctactctaggagcacaaccagtacaatttcaacgatgatatttgtgagcaacaagcaattcaaaattcttttgattcatggaatctcataccaagacatgctactcaagattcaattaattttttgcaactgattatcttcatgtcaaaccaaagcaacgtagaagaaaacaacacaatgtgtgttatctgtcaagaagagtttgttaatgaacaaattcttttcgaattgccatgccactacaagaaatatctacattattagctagagaaaaaagctattaaatgtcatcaatagcattttcataaacgctgtcttatgtccctgttatggtaaaccctccatatacgatagcgttttttcgtatgctacggtaaagtattctaccatagcattagtaagacgctttcatatatcgacttataatagcgatatatagacgctatgatctataatttttatgatgctataatattcagtgctataactctacttttatgcgattgttttcaaaatatctaatatatatatataataaaaaacatccaaaaaatatacatcatttcataaaccaaaaaataatgtacataacacaagtctcaatccaatacttaaactaatatcctaacttctatatacaaaatccttacttcgttcattacttctaaagtctcaatccaatacttaaactaatatcctaacttctatgtactacttttgctaaggcagttatttatgagatcatgcaaaatccttacttcgttttctagatattgaactcggttctttaaggaagttagctcagcttcataggttgttgtagtctcttcctttcttttatgttttcagaaaatactctaccttttctcttaggttttccccaaatactgcagtcttcatctatctcactttcttcaacgacgagattcataatatcttctgttagaacaagaaataaaacaagttaaattcagtttattattgagtcatgaccacaaacttgaaatacaaaatccttacttcgttttctagaaatacaacaaataaaacatgaaataaaactgtcttgaccacaaacttattgagtcactttattagtaaagaaaactctttatacacctgaaaactcaacttgcgactgagacatatctttagcctcagaagagactaattccatttcctttgtacctttaatttctccaagaaaagcaaactcaagaccattgcttgtatccatcatcggtgactcatagacataactcgaacaccacttacttagatcataaacttctgagaattctgaaaatagaagtgaagaaccacataagtgaaataaatgtagctagtctaactaaccactaacaatccacaaaataatgtgtttgatgcagaacgccttgaaaaatggtttgagacaaatcataaatgtccatgttgtcgatttgagttaccttctatagtatattagattattttaaattgattattgtaatgcttgacattttaggtttagatattttaagaaaaattctttctaatgcccttttcatgatgcctcttttcaactctacccttttgttttattcattttcatttctaccctctttaaatttttaatgaccattttacccctatttggaaattatcttatgttaacaaaaatgtaacattaatatttttttgcctaaaatattccaaaacaaatttcctgcccaaatttttccgccaaaatatttcccgcaaaaattattttttcaaaaaacaatttcccgtcaaaaacaattttttggcgggaaatagatttacaatggattttaaaaggattttaaaagatttacatgggattttaaaatagttttaaagtatttacaaggaattttaaaaggaaaatttacaagagattttaaaagatttacaagagatttttaaaaggtttaaatggagtttaaaggatgtacaagggtttttaaaagatttttgaaaaatttacaagaacactctttaaaaactcttgtaaatctttttaaaaccttttaaaatcccttgtaaatattttaaaacccttttaaaatcccttgtaaatattttaaaacccttttaaaatcccttgtaaatattttaaaatcctttaaaaatctcttgtaaatcttttaaaaccctttgaaaatcccttgtaaatctatttccgcccaaaaaaaatttacaaggatttttaaaagccttttttggctgagaaaaaatctgttacgaaaacaaaattggcgggaaatttttttttggcaggaatttttttttggcggaaaaaaagtttggcagaattttgttttggcggaaaaaataaattttgacgccagaaatttggcgggaaaatttcagtttcaaattacatgttccaattagatgagggtactttggtcatttttggcaagggaaggggtatttttaaaaatggacaacataaaaaggtattgttgcaaaagggtagtaaaaaagggtagttttgcaaatctcccatgttttaaatacaacgttcttattatatttgagatgctatatttattataaaatatttattgtagtttaaagcaatttattcatattttaagtaggactaaataaaatgtgcaaagtatatcataaccactttaatagtgggtttatttattctgtatataatagaactaacacatccaaataataatatttttaaaaaataatattaaaactcgtaatcagtcttcttctgaacaatatattcataacactatacattattacattaaagtacccatataaaacttaatcataaaatacaaatttataaaataagctccaacgcgatatcgggcgggttcatttcctagttaaattaatgaaaataatatttaacaaaaaaaactttaaaacgtaattttttattcatgttgaagcaagacacgttaaatcatatatatgaaagttggtcaactctctctgtatgagtgacacatcaacacctaaaagaatgtcacatgtccaaatagaatttaaagctaaaaagttaaaattaagttttaccttccaataatcaatgacttttatatacttcttcaatttaagattatcatcaacccttaaacttctcctctatcattttaaagcatcgactcttcataaaactatcattttcatggctaaagtaggttttagactccatcacctcatagctagctttatatgcatcaaatagtttaaagctaagttatcaagaagtttgtaaggttattttaaatgtttatatctacattgcttttactaatattaataccgttctagcacttaactgagtaaaatgcacaaaaaaaagaagaaaacatgaatataataaatggtagcacacaaagtcaatcatttttgttcttacaccttcttatccatacaaatacaaattttgtgtatattgttgtaaggtaaattgaacaaagtgaatgattgtaggttctatgtggcaaatagtagtttgatgaattggcttgcgtacatgaagccgagtttttggatttagagacaaagttagcagaatgtttaatagaaacataacccatgaccattattattattctttctggttgtagatgagattcaaattattttggtgtaagagaaaactcgtgatgttgattttatgatttacctcaatctaaagcgtacactaaaaaaaaacaaattcttctgtgacttgatacacaatattaccaacatgataataaccatgcatctcacagtgatgactttgttatagtgaattctcttatttctctcacaaacttaataactctattgtcatctatagtttagatttattaattttacaaaatttattagttatatgatactatgaaatttaatagttccatatgaaaataatttcaaaaaactacaagttcttagaacgaatgaacaagtaaagataatataaaaaatcaaagctaaacataagcccacgcgtagcgtgggtactcacctagaatagaaaaaaacatggtcgcaatcaaataaatcaaaatcacacatcaaatataaaaagctcgaaaacaacatatataataaaattaggaatagaaacaagcttcagagcaataatattcattacggaggcagctttcattccatgtttccaagatgactggaaatatgcaacgagacttgcattgtttgcaaagtggtcgagacatactgttgttgcgaaccaccttaacatacatttcgaagtcgtcgatgtacatcgattcttcgctttctggcttgagacctcgaaaatcgccgagcacacagtctgtatgcaaagtaagctcacaatccttagaggtgtaaaaccatgtttttggatccatttctttctcacaaatatcacaccaatgtttaccacttgcattttcttcaccatagcacaaagagagaaaatgttggtcgacactatgctttacctcatatggtaatagagcgcacttatagtccatgatgtattcacaaccatcttcaacgcatctgagcacatgaagatgatctttcttgcaaatactgcagattccttgtggcgatgtgtaaaataagggatgaggatgagttttatggaaaaatggctcagtagttgaagcacatcgcaaatccaatgaagtttgcgttgtttcgtatctaaaaccattggaaagcaatctacaagccgaacatctaataaaatagtcccaatatttatactcatgtcgttcgttgcttaccacatgtcgtttccatagaggcagataggcgcaactctcgtgaagaatgaaactacaactcatgcagctatagaaggagtggtgatagataggataaacacatgcctcacaaatcctctcctcaataaaaataccagacttgtcaagtcttaggttatgctctttatggctgacatgttttattgtgttttcatcgattatcgtgaatggttgaatagcttcctcttcttcaggttcgtctttcatttctttgccgtcccaaacatcttctctagtagcgcatttggtatgaaacacatagctcgaacacttctgacaagaataacccccacaactccaatccattttcttgcgacaaattccacatactgaattcaccacaccaataagggaagtgcgagaaacacgatgatcatggcggttgatgtttatgacccatggatatccagagcaatcattgtggcttgtaaaatcgcaaggaagacatacgtatgggctccgatctccatttagcccgcaagtggtacaggtaaaagagatggattttggcataagagtgagtggatggtcatggatgtttaggtcgtgaggattttgttttggtggatgaaaaacacattggagatctaagctaaagttacaagcggagcaatgataaaagacttcaaaattagcaagtttttctccacacaaacgacattttccatcagtgtaagcaggtggttcccccttgaagagttttagagggtgtaagaagtgggaaaaatgggttacctctgccggatacttttcgcaattcacatgaaacgtcaaattacattcctgacatttgtacgaatatccgtcaccatcttttccacaagcagcacaagtgaagctgcttatcaccatctctagcttgagtttatggtcatggtgctgaggaacatcaataacctccgaaggtgggtatttagcacagttgaaatggaaatatgaagaaccaccaaatctgcttccttttcttctaggttttaaaacacagtcgttacatacaaaaaataaggaatcgtagatcttttctccacattttgcacatctccacttgccgctatcaaaattcactgtatgataaagaatgatgccacacgcttgagaagggtgggcgatattcttatcgttggcgcatgtcttgtggaataaaggagtgaaacaggaatcacattggtagccatcagatatgtgtatgaatttgattccacaccaatcacacttcgactccattttcacaggcgttaatggatgctcgtggaacggtaggttaaccttcaaatcgtccataacgtacgtaagtatttcaaggattgcgtacgtagattatagaaacgagtgaaggaatgaaagaaaaagaaaagagtgaagacaaaaaaaagggaagaaaaaagactgaatataatctgatcaagtaatggcttttgtctcttttcctataaaatttcgagcttaggtttctctaatctcaagtaataatgtgttatataacaattaactttttaattatcaatcattagctgtttaaaaataaacttcagatctaacagggtaaccactaaccatctaccattttatataatcctaaagtcaacgaggcacgatttacatgataaactgttatttttaatagagtgttgatgttcaattagcagtttttaaattattgatatcaaaataattcaacttgaaacattagtatacactacttatagatctgacagatacctactaacaacccaccattattatgtatcgtgataaagataatagagagtaatttttaatatttataaccttgccacttgagttctatatggccaaaatattttgtaagacttgctctaacagggtaaccacggaaccatctaccattttatataatcctaaagtcatcgacgcacaatttacatggcaaaattattacttttaatagagttttgatgttttgtttttcttggtcactagaattttattaatcaaaccaaatatgtttacgaagccagataaatcggaaacttagccaaagactttaataggaaatagagcttgactttaatgggaagtaaagccggcgaacaacaagatgttcctggaaacaaaagcttaaacgagaaaaacatagtctaaacaagagagatatagtcttaaggtacaagaagacaacatacaaccaaaacaatttagctcaacaagaaaagtctacgaccaatgcactaaacatgaccacatgttccaaaaaaaaccctaccaaatattcttatagaaactgtaaacgccagatagtagcaggaagaccggagagtttgatgttcaattgatagtttttacataattgatatcaaaaataatttaatatgaaacattagtatactactatttttagatctgaaatataccgattaacaaccaaccattattatgtattgtgcttaagataattaacagtttcttaatattaaaccttgccacttgagttctttttttttctttttcttttttttttgtaatttgtaaacgccacttgagttttatatgaccaaagtatttgtctgttggttaagacttcatataatatttacttgacttagcaagttagtatattttgttgagtcattatatattggtttaaattatttatcctacaaatataattattatcttaaacgttttgcaaattaacaattttaaaatatatatatatatatatatatatatatcatttttagtgggtaatcgaaatgaaagaataatccgctctcgcttttactacttgctttatgggattagaataaaacaatctagcgagttaatatcggatgtgcaattcaaacaatcaaaagtaatatagacacttcaaaaaggttcaattgcattgattagatttcatataaaaaaaaaatgatactaatttaaaattagttatttataatcggtacaacaattagaaattaacgttagttgcaataattgatgtcagtataatcacatcattaaattatatcactttcataatatatatattcatttcatttaaaaatgattgaaaatttaaatcaataataactgatgtttaattaaagattaagcatcagttgtaaaaagggaaaatcacgtttttaacttttaaagtagcaataagtagcatttttaaccttagcatatttttactagcactataaacctccaaattaattttactaatactttaaacctccaaattgagttttctgtttatgtagtcctaaaacatagcagaacagtttctccggttgatataaaacctccaaagtaaaacaaatcttttttttaacgaaatagtttttagtttttgacttgaagtagtatttgtgtgtcccgtcaatcaaaattttttacttttgacattaaaaatgatatagttttattttttgacgttaaaaatgatatatttttacattttgacgttaaatagttttttttgtctcgtcattcgaaatagttttacttattgacgttaaaaaattatgaaacaagttactataaactctcaaacttatttactaatcttgtaaacctcaaaataatttttatgtttagatctccttaaaagataacaaaacagtaactcccgtcaacataaaagtaaaatgtgttctattttttattttttttacgtcaaaagtttaaactatttgtaagaattaaattatttttaacgtcaaaaataaaattatatttttaatgtcaaaagtaaaaattaaaagttaaaactatttgtaaaattaaattatttttaacgtcaaaaagtaaaattatatttttaatgtcaaaagtaaaaatattttgacagacgggacacataaatactatttaacctcaaaaagtaaaattatttcgttaaaaaaaaaatactttttccattgacggaaattacgattccattatcttttaaggcgaaacagatagaaatcttatttggaggtttaaagtgttagtgaaattagtttagaggtttatagtactagtgaaaatatgtcaaggtttaaagtgttactcagtaccactttgaaggttaaaaatgtgattttcccgttgttagatcgaacctcatcagacaaggagtaatcaaaccagagagcagagcctattctctcatatcccaaattttcttactcataatagtcgattttgtcatatctgaaacgatcttgctgcgccaatttatgttgataaacaaagcaatggaagaggaaaaagaagtaagttcttaatctttcgtttgagtaaatatatagacttttgggagacgtaagttcttgttgtttatctctcatcaaacctacatttttagggtccgaatgatgactgcgttttgcggtgcggttcaaatagtaacgaaaatacatagatacatatgtatatgtagagattttgatactgttacagcactgttgcggtgcggttttgagtgtggtctatgtcaccattcatagccaagactccaatgaatctatgattgattgtacaaaaaagttgtggacattggttggttacatgatacataatggtttgtttagttctacgtttgtggttcattgttacaaactttgtatgaattcgaatgtgagttggttaattagttttgtacttacgttccttacttccatgattcttgtagagtataactaagggcaatgactttctcctctaagctcaaatctttctgttctcgatatttctcctcacatgagaaggacaaatataaggctttaatgaagcaaaaattgttgaatcctctctcttcttcttcaccaaactacgacgagatgattcaagagaattttaagccacattggatcattgggattgaccctaacttatccggagctttggctgtgctgaaatttgatgacaagggatcttgttctgctcaggtgaatccctactaattaatttccaaaataaaaatattcagtactatattaaaaacataaaaacaaacgaatagagaagatgatttcaaatgggttcctaaagtgattagtagggatagagatcttgccaaggatagagatattcgccaaggattgtcaagaacccagatcttcaattggtaattatttccaattttatatttaagttttgttttcactgaattttgtcaccaaataggaatttgattaacaaaactataatctagatgaaaatctaaatctaagcctaattctttcttataatagtttggttataattttagcactcattaattttgtttctatatagatttctatttattacaaacataatgatgttgacaaaagaagaggatgaacaaagataagttttatgaatccattattacaaaacaatagatctttaaatatatatatatatatatatatatatatatatatatatatatatatatatatatatatatatatatatgtaaacctgatgctacaaagtatattgtattcagggcaagaatcatttatgagtaacattcttatggaggaggcagatttgatgttgcctttggagctattcataaatcttaaagtaaaggttagcgagataataaatgataacacttttgttaattagagaagcatatatatctactgttattcattttgaactagatgaataaatatagaaaacattgttttgccatcgtcgaagcaacatcattccttgtcttcaatttttctttttttaacaccaactcctgatcacgttaaacccaactttgtcatataaacccgaaaagaaaaaaaagagtgttatagtagaacatagttagttaaaaacataaaccatactgaacaaccaagacgggctcaatattttccctgtccctgtacaaattttcaaatttggccctttttatactaaatgttttgagtttggtccttaaatttagttaaaattttactttggtcctcagatttagtcaaaattatctttttatccctcatatttaataatgttttttattttacccattaattttgatcaaaacttttttggaccctatgcaattgctcctcttgcactaccccaacgccacccctgagaacaacattagttgttacctcttgtaatcaaatattttttacatcaaacatatgccaaataataactttgaccaagatttccagttatagttaacttgaactttaacttgaataattacgaaaagttttaaagagtagcgagtggaagaaaacggatagtcgacttgaatatttataggaaaagaaggtcggctagctgattttttaaggttaaactttttcatatctaaataatatatttgtgaatccaagttttggataaagttttaaggtatatactcaatttgaaaggagtagaatatatttggatatctttctaactaatttttgttacctttactattcgaaacatttaacatgacaaaaacaattttttatccttatttacaattcgaaattaatgggataggtttaaggtatatactcaatttgaaagggagtataatatattttaattgtaacttttggtaaatgtattgaaaacaaccatcagaattggatacttttctaactagtttttattacctttactattcaaaacatttaatattacaaaaacaattttttgttcttatttacatttcgaaactaatgggatacgtttgttatataaatatctttaaatgataactgtcatttttggtttgacattagttttgttttgtttaaattgcaggagtatggcaaagattcccaaaatcccaaccagccatccaatcgaatgatccacatgtttataacaatattgccatattagatttttatccgcggtctaccgtgggattatataattttttttaaaaataaaacatttaatttgtttagtagattaaaaatatatatgatttaatgttttttattttctaactatacaattcttatatctataactttttagtgtaaaattactctattagattttgtttaaaaatatgggaacaataacatacagttcattatgttaaaatctaaactataacaataattaaaattgaaattatattttttgttaatattgtttcttttgtatagtgtttaaaataatataattgtattttgattgttatatctagaatttcacccgtgatataccgtctcaatttactattgaccaaacccgtcctaccatctaatgaatttcacccatggtataccgtctcgtattactatcgacccaaactcgtcctatcatctaaccccgtgcagtgaaattaaacattatcttattatttttgtttaagtaatattttaatttaaaagatatatacaattcaaatcaatttaaaagatatataattcaacagatatcgtagagtagaaatctcggaaaatgtatgttgggagtaattagttgatgaaaaaaatctcagattatagatatgtgaataaacccgtgtagaaagttttgaagagatttttggaaacgtttgttgagcgcaatataaaatttttaaattttcaaatctgaataattaataccaattagatatattgagagatttttggcaactattattgaatagaatatttcgtatttaattagcaaaataaaatatttaatgccactggcatgccattgtaaataagtgtcaagtacatgatttatttgctaaaatggttgcaaaaatgtaggtgtagattccaaccggccggatcgcgtgttatccgaatttgactggatatagatccgacccatatatccagaatccgtgtgtcagaatgtgttaaattgcccattttaccccttgacgaaatctcttagtttgccttagtttgagaacattttatgtaatattttaccctttatatagttatttatttttgagtaatttccaattaatattatagatcaaactgtttctaactattaagttagtgcgttttgttatctattcctaaccttaagttaaataagacatgctttgtacactgttttcttggtgaatagagaggaaaattcactttagcattttgatatatatggatttagttttgtgtgttaaatctatgaaggtatatgatactcctgtggaggtgtggaaaactttgttatcttttctgtcgattctattctaaatttggataatctctagctaatgtacattaattgcaacaagttctagtgtctataataaactctttcatcactccctctctaagtaaaaattagattatgaatcttaggtttggttaaaaggccaaccaattcttgtatatagggactctaaccatgtgtctgatctatgtgattgatttttctccactaaaaatcattttctaatcaaacatatgattcatggtggtagtagattcttcactagctagcgtagcttcttcttatgtgttgaattttgtctcccaactgagttggtcattctccgtttttttatatttatctaattatttttaagttggattgttaatgaaattttattttatgttgataatgtcgttcagctgagtcatgttggaaaggtaaaacgtaatatctctctgggatgtacaattatgtacttgtttagttaaataaatatttaaacttttttggatttatttttgcattaaacaaaacaaaaaaaaaaaacctaaaacgtaatagacgactaatttgaacattaaatagtgactcgtttcgttgcttcagataatatttggtagatcacaccagattgcagagcatattctctcatatcccaaattttcttacttccaatagtcgatttcgtcgtatctaaaacgatttagctgcgcaaatttatgttgaataaacaaagcagtggaagaggaaaaagaagttagttctaattaatctttcgtttaagtaaatatatagatctttgggagacgtaagtttttattgtttatctcttatataacctacacttttaggctccaatgaatctatgacttattgtacaagaaagttatggacatgggttggttacatgattacataatggtttgtttagttctacgtttgtggtccattgttacaaactttgtatgaacgtacgtgagtaggttaattagttttgtacttacgttccttacttccctgattcttgtaggtataactaagggcaacgactttctcctctaagctcaaatctttccgttctcgatatttctccttacatgagaaggacaaagataaggctttaatgaagcaaaaatcgttgaatcctctctcttcttcttcaccaaactacgacgagatgattcaagagaattttaagccacattggatcattgggattgaccctaacttatccggagctttggctgtgctgaaattcgacgacaagggatcttgttttgctcaggtgaatcgctactaattaattttcgaaaagaatattgtttttcttctgaaaccctagaactgtgaaactacaagattctagggtttgtgaagtaaattaagatattccattgggtaatctcaggacatgcacttggttagtcataaattatatatacaaggttcgatatttcattgggtaatctcaggcagatggacttggtttatcataatttatatatacaaggttcgattgttatctataggaattatatgaatgaaattaatattggatgatagaagatttacaactaattaacctgtttgtaactattgagttagtgagttttgttatctatcccttaagttaaataagacatgctttgtaaactgttctcttggtgaatacagtggaaaattcactttagtcattttgatatggattaagttttgtgtgttaaatctgtgtgaaggtatatgatactcctcagttggaagttgtagttcaaaacatccgaacacgtagtttcaacgaaaaatcaatgctagaactgattcgtagtctagatgttccatccggtaagaacgatatttcactgtgtttttgttgtggcgtgttctttgcgttatgtttaaaatcaatttggtctcttcactgttgtaggaaccaaggcatttgtagcgaaatatattcatcctgaaaacgctattgtaaaaattactcatctctttttttttttacttcagtacgtttatgatatggattcgatacactgaaacatgattgtgtctttatatcttagactgcctacaatgatggacttggatgtggattatggacacttctcacatctagcatttctgttatttacgttactccttctacatgggacaaacattttaatcttagtatttggagtttggtgatgaatcttaactctcaaacttttatgatttcatgtctatcctcacatcaattgcaataaaaatatttgcttttctcttcgtaggatggtggcaggaaactcgcactggaaatgtttccatcacttaaattgacaacgaaaattgacgacaatgctcgagctaatgcactactcattgctgcatatggtcatgctacaagtgatacaagatattactcattttctcaaattaagtgacatatctaacatgtaaaaatgagtaatgttttggtgatttcacttatatattgcatctctttctctgctcctttggctttcagaaaattcttcactaattagaaaaaaatattttgtttattctttttccgtattcaaaatctctcaaaatttggtcatttttcgatttctatatttatctaattttcaaggtgagagttgttaatgtagtttggttatgatttaacccgaccgaaatcctcatgacctaacaaattataaataatctctgacaaaacaaggtaaattgtctcgggttgaaagagacattagaattagatgatattaacataagtcagcccctcttctacatttttagctttcttttagtcgaaaatcattccaaactcggaacatacattgtggtgtttatttgggaagaagtccacgctaaagtattttagtacatttctaccagattacccggataaataaaaaaagcgaagttacttacaacatgaaacagcttgcacattgaagaaaagtaatcaatcagcagtatatccaatgaatctatgcatcttgtcaggtccattgggccttagaggcctaaatatttgaagaaagagtaaaatcaaaaataaagtatcgaaaaaaggtaacccaaaaattaatatagtttgactaattttgttgcagtttttttttctagttaaaaattcaacattcgaaactcatgttctgacctcatttatacacttgcccagtggtcagtgcagaaaaagagaaaaagaatcacctttttgttttaatctcaaagtcgaaattcgaaattcctctactcttcccgttaagtgtgttcctttttatccgttcgtcatgcattcgtcgttggagccggagaaaatggaggaaggtgggggaagcaattcgcttaagagaaaattctctgaaatcgatggagatcaaaatcttgattctgtctcttctcctatgatgactgactctaatgggtatcatcatcttcctctctttgtacttgattttgggtcttatgggtttttagtctttttcactaaagtttactttttttttggcagtagttatgaattgaaagtgtacgaggttgctaagaacaggaacataattgctgttttggggacagggattgataagtcagagatcactaagaggcttatcaaagctatgggttcttctgatacagacaaaagattgataattttcttggccccaactgtgaatcttgttaaacaggcaagtctcttgtttgattgtaaaaagaaaaactgtttcatttggattttaatcattttgagttgatgatgttggctaatgagtcgccttgggagcttatttttgaatgttttattggtgtgtgtggttttagcaatgctgtgagatcagagcacttgtgaatttgaaagttgaagagtactttggagctaaaggagttgataaatggacatctcagcgctgggatgaggaatttagcaagcacgatgtaagtttctgtttctttttgtgtatatttggctagttatacgccaacaaagtgacttgcttgtagttttggtgattttatatcaaaatttctttgtgtggttagtgaaactttggcagaatgttgtaatccactttgaccagctcattgttgtattttgagtcatgaatgttctctgagttagttaaaagcccattccaatttgttacttttggggttggttcttcttccaatgctgattatttcttaattattttgtttgaacttgtttgcttgagcccttgacgtagatttgtgactgcattgatctcactaacagaatcacatacttctcttttgttgccgaatccacgtgagtctattatctgcaatgaaattatgttttgtatggttcaggttttagttatgactcctcaaatattattggatgtccttagaagtgcattcctgaaactagagatggtatgtcttctaataatagatgaatgccaccataccactggcaatcatccctatgcgaagttaatgaaggtgtgttttctcagtaatgataagctctattagttttttcataatagagtttccataacttgtcaacgaactagattctttcttgttttcatgaaggaattctatcacgaatccactagcaaaccgaagatatttggattgactgcgtcagccgtcattagaaaaggcatgctatttaaaagtttcttatttcctctgtatgccaaaccaaagatcctgcttcctgtaactactttttaatgtttgaacttcatgtaaggaacataaactcatactacaagtgtttcctctccctctaactatgcagctcaagtatcagaacttgagagactcatggactcaaaggtactttgtttttgtgtaacaaggaaacagatatagtttacaaattaatgctatgcaatcttactttgaattcagatttttaatcctgaagagcgtgaaggagtggaaaagtttgctacaacggttaaagaaggtccaatattgtataacccatcaccatcctgtagtttggaattgaaagaaaagttagaaacttcacacctcaaggtatataatatatgctcactgaatatgatccagaacatgactctttcctattatgtttcagagtgcttgaaaaatattctgttttttttcgtacagtttgatgcttctcttagaaggcttcaagagttgggaaaagacagttttctgaatatggataataagtttgagacatatcaaaagagattgtctatcgactacagagagattttgcattgccttgataatcttggcctgatttgcgcacacttggtatttttctaccagtttagtttttattaccagttcttcatttgcttactcattgttacttttttctcccgctagcatacctgttgtgctgattatttttcttttttttttcatcttgctttcgcgataggcggctgaagtctgcttggagaaaatctcagatacgaaagaggaaagtgaaacttataaagaatgctcaatggtgtgcaaggaatttcttgaggatattttatccaccattggggtgtatttgccgcaaggtaatgtattcaaagctctatattgcattgagtcctcttctagtcactaatttttacactgtttatcatttgtgttatttaacagatgataagagtctggtagatttgcagcaaaaccatctgtcagcagtaatttctgggcatgtatctccaaagctaaaagaactcttccatctattggattcctttaggtaaatttaaattgtttatccaactcccaaaattgcaccaagatctccatctgttctgacaatttcaatttgcttgcagaggtgacaagcaaaagcagtgccttattttagttgagagaattataactgcgaaagtgatcgaaagattcgttaagaaagaagcctctttggcttaccttaatgtcttgtatttaaccgaaaacaacccctccaccaatgtatcggcacagaaaatgcaaattgaaatccctgatttatttcaacatggcaaggttacctgttcttcatcacagtcagatgttttatagattgagaaatgtttttattttgtcttctctgaaagctttttaatgcatgtaggtgaatcttttattcatcacagatgtggttgaagagggatttcaggttccagattgctcatgcatggtttgttttgacctgcccaaaacaatgtgtagttactcgcagtctcaaaaacatgccaaacagagtaattctaagtctatcatgtttcttgaaaggtaggaagcaatatttatttaacacaaaatgtttaccaaattccagtttttgtagcttatttctgaatactaattattgtagagggaacccgaagcaaagagaccatctgcatgaccttatgcgaagagaagtcctaattcaagatccagaagctccaaacttgaaatcgtgtccacctccagtgaaaaatggacacggtgtgaaggagattggatccatggttatcccagattctaacataactgtatctgaggaagcagcttccacacaaactatgagtgatcctcctagcagaaatgagcagttaccaccgtgtaaaaagttacgcttggataacaatctcttacaatccaacggcaaagagaaggttgcctcttctaaaagtaaatcatcttcatcggctgcaggtatgttttctaatttattaattcgtcaattagctggtgtcgctgattttagtctttagttcctctatcagccgctgttgtatcacacacatacacgcacacatcagcagttgcatatcatatgtctatgtctaaggtcatggagcttgtcttaatttgtttatttatgtatacatttctttttcttttcgctgaacaggttcaaaaaaacgtaaggagttgcacggaacaacctgtgcaaacgcattgtcaggaacctggggagaaaatattgatggcgccacctttcaggcttataagtttgacttctgttgtaatatttctggcgaagtatactcgagtttctctcttttgcttgagtcaactctcgccgaggatgttggtaaagttgagatggacctttacttggtcaggaagcttgtcaaggcttctgtctcaccttgtggccagatacgtttgagtcaagaggaggtacataactctgatccctagttataaacagtttcttgtttcatggtttgaacttgatgtcttcttctttgtgttttggatgcagctggtcaaagcaaaatattttcagcagtttttctttaatggcatgtttggaaagttgtttgttggatctaagtcacagggaacaaagagagaatttttgcttcaaactgacactagttctctttggcaccctgcctttatgtttctactgctaccagttgaaacaaatgatctagcttcgagtgcgacaattgattggtcagctatcaactcctgtgcctcaatagttgagttcttgaagaaaaattctcttcttgatcttcgggatagtgatgggaatcagtgcaatacctcatccggtcaggaagtcttactagacgataaaatggaagaaacgaatctgattcattttgccaatgcttcgtctgataaaaatagtctcgaagaacttgtggtcattgcaattcatactggacggatatactctatagttgaagccgtaagcgattcttctgctatgagcccctttgaggtggatgcctcatcaggctatgctacttatgcagaatattttaacaaaaagtaagtgatattctagctttggctgttctttcaatctacttatcataactctctagttaatgttattcccttttaatcaggtatgggattgttttagcgcacccgaaccagccgttgatgaagttgaagcagagtcaccatgcgcacaaccttttagtcgacttcaatgaagagagtaagttgattcttgagaatttctccaacatatggaatcattgtgtatgttctcatgatattgtagtgtgtgagctctaagatgttgtttccaatgtaaatggacagtggttgtgaagacagaaccaaaagctggcaatgttaggaaaagaaaaccgaatatccatgcgcatttgcctccagagcttttggctagaattgatgtaccgcgtgctgtgctaaaatcaatctacttgctgccttcagtgatgcaccgcctagagtctctaatgttggccagccagcttagggaagagattgattgtagcatagataacttcagtatatcaagtacatcggtatggtttttgaaaactatctgtcatttagagatgaaactagatatcttgattgtcattaaactcttgtcttggttcaataaatcagattcttgaagcagttacaacacttacatgccccgaatcattttcaatggagcggttggaactgctcggggattcagtcttgaagtatgttgcgagctgtcatctattccttaagtatcctgacaaagatgaggggcaactatcacggcagagacaatcgattatatctaactcaaatcttcaccgcttgacaaccagtcgcaaactacaggtatcttctaacatttgcaagtaatgtcttacatcagtcagaacaccaaagaaatatctttccatggggattggtttgatagggatacataagaaatggcgcttttgaaccgcgtcgctggactgcacctggtcaattttctctttttcctgttccttgcaagtgtgggattgatactagagaagtaccattggacccaaaattcttcacagaaaacatgactatcaaaataggcaagtcttgcgacatgggtcatagatgggtagtttcaaaatctgtatcagattgcgctgaggccctgattggtgcctattatgtaagcggtggattgtctgcttctctccatatgatgaaatggctcggtattgacgtcgattttgacccaaacctagtcgttgaagccatcaatagagtttctctacggtgttacattcctaaagaagatgagctcatagagttggagagaaagatccaacatgaattctctgcaaagtttcttttaaaagaggctatcacacactcctctcttcgtgaatcctattcatacgaggtatgacttcatcattttcaacccctgcattatttggctgacttattcccaggtttccaacctcatgctatcatttttttcctcaaacagagattagagtttcttggcgattctgtactggattttctaataacccgtcatctttttaacacctacgaacaaactgggcctggagagatgaccgatcttcgttctgcatgtgtaaacaatgaaaattttgcgcaagttgcagtgaaaaataacctgcatacccaccttcaacgctgtgctacggttctcgagactcaaataaacgactatctgatgtcctttcaaaagccagatgagactggtagatcaatcccttcaatacagggccctaaggtaaaaaatatacttgcatgaccatttaaagtccctgcctgagatttcagattataaagagagcaaataggttgacatacttgtctattttggtttaggctcttggagatgttgtggagagtatcgctggagcattgctgatcgatacgaggttagatctcgatcaagtgtggagagtctttgagccgttgctttctccacttgtaactccagataaacttcagcttcctccataccgggagctcaatgagctatgcgactctcttgggtatttctttcgagtgaaatgttcaaatgatggtgtcaaagcacaagccacgatccagttgcagctggatgatgttcttttaactggagatggatctgaacagacaaataaactggccttgggaaaagcagcttcacatctgcttacacaacttgaggtatatatattctgatgtttccacttgcgtgtgtgttggtgtgtgtgctcaaactttctttggttcttcagaagagaaacatttcacgtaaaacctcgctcggggataatcaaagttccatggatgtcaatcttgcttgcaatcatagcgacagagaaactctgacttcagagactactgaaatccagagtatagtgattccatgtaagcactgttatttacctagagagattcttcttttcttcttcagtttttttttttttttgtatcaagggttatgcatttcatggttttatgtgtttcagttattggacctataaacatgaagaaaggcgggcctcgtggaactctacatgagttttgcaagaagcatctgtggccaatgcctactttcgatacctcggaagagaaatccaggtgacttctcattttggttccttttttctctgctctcatgtatcccgagtcctgaccaatctgagactgataactgcacagaactccgtttgaattcatagatggcggtgagaagcggactagcttcagcagtttcacatcgaccataaccctaaggatacccaatcgtgaggctgtgatgtatgctggagaagcaaggcctgacaagaagagttccttcgactctgcagtcgtggaattgctttatgagctcgagcgccgcaagatcgtcataatacaaaagtagactaatttagactgtactatatatgattcacatttagtcatctcgagcagatcttggaaatgcgagaactcccaaataatagttttgtatctgaatctctaatttatatgttaattgttatgccttaatgataagctcatagacattactacagttgaagctactaacacgttttagcatctcgaaacctttctcggatccgagaaactgaatacgtttgaatacagtcttcccgcctttcatcaccgagtccgctgctcggagcttttcactgtgcctcgagttggtgtgaatagctgctttgagttcttcctcggacatgttttcctgcgacagtacatacaacacacaaaactactttgaaaatggtttcgtcaacgagatactggcacatatgaggacattgctacctgatagaatgcatagatgttttggagaatctgctgacatgtaaagccggtttcactgaaatacgacctggaagaaggtcccatttcaccataccaatcgattggaagtagtaatgttataaaatggtttttgtataccaactccattctctcactgtcatgccataacaacaataaacaacatgagctttataaacttaaaagagtagcttggatctcaagttacatagatgaagtagaacataggaacctttctgtgagcagtctcatggagtgagtgaatgaatcattagatttagcatcaaagaaggcagataaagattttctttcgatatcgtcgttgttgctgaaactatctatgataacactagctgttgaagttggttcagatattgtccaagagatagaatctagaaggctgctcagatttaacggctggatcagagtcttccccatctgttttatgaacaaagaaaatatagttcggtttagcgattgctcggttttcgaagatgaaatagagaaaaagatgaaatgcctttgcgtggcgatttgtgacagtctttttggcggattccacaatcttctgcctttctttgtgtggtctcgtcctatctgtaggagattcctgtaggagcacaagattaaaggactagagacttcatgaatacttatctacagacaaaagataccttcccaagattctcaatcattgtcctaagatctcgtgccaaatcatctgacatttgaactagattttgcgttggtttctcttccaacgtcttctgaagccatagtggctgaaacaggcgacaattttacataaagcaaccaaaggataatgtaccgcaaacaagatggaaaatgagttctcattagcttactgtaacaagattgctagagtgaccaagatatcttaaaacagaaccaccttcacatacaacatgactagcattacatccaatgaaccattgagtcataagcttggcacctccttcaacagccacctgtgaaacctacaagaattggaatgtagccgttgatccacgggcgttgctacatacgtttaaaactcataaggtgtttaggactaacctggcgtctcacttcctctgaaatatcagcatcgataaaaaccgaatagcctgacaaggccaagtccttgcttcctgtgacctctattccttgaactcctcctcctctatgtagtttttctaccgcgtaaaccgactttaatccatcttcattcaccttagtctcttcgggatttttgaccgcgtagaaagactcactcagcttaactacaacaaaatcacatctagtatgagaaataatcaacaaagaatgtgcaaactcggttaaagacatacacaccatttctacagacactgtccacaaaccacccaagcgtaacgatatacaaagtctctcttcttccatgtttcaatgcatgctcaaacttccgtccatcataattgtatactcctttttgtgttaagaaactaacacaaagctacataaatgttcatgtttataatttcaaaagattactctaaattctatagtaacataaggatatctgaacaaccaaatgtgtacatagagaatgcaaaagtgcactgtattcaccaccaagtctctctgtagcttccttgacctgtttccttgcctctacatacaacaattgatactcaattcataaaactagctcagagttctttacaaatacgctgattgattttgtctattaacaaaaagttgaataatcgaggtattaatttatcgagtattaatttataaatgttttgttggtacctttagagagaccagttacgcagatgattagaccagagaaaggtccatcggaacgaaccggtggatggaatcgggaggtggtggtggtggtggtggccggagaaaaaggctccgatatacgactgccacgtagtgagggcgtgaaatccacgcgcagcttcgaacacctctttgtatcaatcacctctgctcttctaacaccttccataagaaaatatgtttgaatcttggagttcaaggaagaggacgaagattacaagcgtaacttatgaaaacataataaactaataaaagattgttgaaagaaaagaagattatgagtatctgaagaatatgtatagtagaggtgagcatgatcgtttattttaggaaagtaaatccttcgtcattacaatcaaacgacttcgttgatattttagtattaacgcaattagttctccattattttatttaagaaaaaagattttttttttttttgacatatatcaacatatgaacgataatttgacatgtatcatatgatcacgcgagttactaactttaaaaactatattttatataataaaattatatgacataatattttaattaacacgatacaaaatttaatccaatatagaaaaaaatcacgaaacaaaattttaatgtaaaaaaatacattaatatgtatcaaaatctaataatagaaatggttaaatatggaaaaaacttcttaagaaaaaaaaaactagtcaaagtaacaataatagtttcagtttgctggaaaaaaaacatagtttaattggaaaacgaaatacatcaaatcataatgcaatcatatgtatacaggatagtgttatatatatcttaaccacataattaaaagaccaatttttattgcaatcatatatatacaaaataaagtgttatatatatatatatatatattaactacataattaaaagaccaattttatttgattttctgatgtagacaaatatttatacatgtttaaaacacgtacccgtctatacatccgcggatatatttacatgtgtaaagctcaagtttctttttttaaataggaaagggggaacaaatatcccccaatttattaattaagtaaaaaattaattacaaccaaatattttgtggaaagctcgtccagttagaatcctctaacattattgaatggatcacatcagtacaagaatcaaaagaatgaaaacctaactataaaaaaaggcatagtttgctaacccgtcagtcagaaggttaactataaaaccttctgactgacgggttagcttctcgatatacgtgaataacccagacttaccaatttcttgtgataaagccttggcaaagatgtatcaagaaagacagcggatgagcatcactcaaccttgttcgtagaagtccaaccaccaaatctgaattcaactccaactctattcgacgaaatcctgtctcccaaccaatgaccaaaccgtagtacacacccccatagttcttccgtcgctgttgagcatatacctatgttcagcgtgaaccctcccagccataatacctccccatcggatcacccccaagcagtggccagtcccgagtttccacgagacgctccatttatagtaagtttaacccaccttatactcggtgtgttcgtttttcaccaaaaacatcactacaccccacttccaactccaccaaaccgccatactgaacaatgtaggccaaccttactcgctagtgcttcctccagtacttagattttcaaacaaccattccaaaagagatttggtaaaaaagcatgttgtcgccgttgaggcaccaacctcctctaaataccatccatcggggcagtctctcagcaaatgaattattgtttcactagcagctttacacacttggcaaatctcactttctctaatatgacgtctaaaacgttctacattcgtcattattacttgatggctaaccagctagagaaaaacacgcactctctccggcgctagcacattccaaatccatttgtagtaatttgcgatacatgatcggtgttccatatccaacgttaataaagaatatgtcaccgtacgtaccgaaaactcgccattaggaataccttgccaagacaacttatcgcctatgcccgtcacaccttgcaccactaccgcaaacaacctctatattatattaactagaaagtagtgatttagtctcaccatatcccctcccgaccattctagctagtagcactctatgagttttccatctcctctggaagtaacggagacgtaagccgtagtgaaagtggatcctccaagaaccatctatccatccaaaaacgaatagctttctcatctccagagacccatcctatcccatgcagtacaacttctcgaatcctcaataccacactcccccatgtggatgaccagcttccaaagctcaagttcttggatacactccacaacaaatagtaacatgtgaaactgaatatttcgccttaggggattacgggcttcgaaccagaacctcctggattaaaaaaaaaaaaaaaactgaatatttaggatgatatggttatctctattgatatttgttacctatatgtaatttttttaacttaatttttaattcgaaaataaatcatatgaatcatgattcaacaattaagtcaatattgattcgaatcgatgatgttgtagtctgtgacttctgtgtttggccgtttgtgtttttgaggagtgatcacgtcaagtctatcgaacaagattattgttgggaatgactgttcaaataacttttgtcactgtcactgatagtgatcattcataggcaaaggatattttcttaataattacgcaatgtggaaaacaagaaagcaaagaaatgcaaaaaagaaagtaggtccatatagatgtgatttatcttataactatataccaatcatacattagtctcttaactatataccaatcataaatgaagcaaatcttattgtcttttcttgctttggtattgtattcaaagttggaatatgctaagagttgaaacgttaaaagttaaaacacgtcgtaattaaacatagtgggcttgctggatcggcccaaatgcttttctattttatcaaatacgttgacccattaattcttccaactctttcaattatcaaatgaaagtaaaacgcagcgtttcattaacattcttcttcaacctctaaaccctaatatttggaaattgttgatggcagaagatttgcagacagacagattttgttggggttttagtcaaaatttctttggtgttagtgaaagtgatggcaggctgctcaatgatgaaagtggatcgaacatttcctgatctcaaggagattccggtagatcttgctactcgtttccggcagatgatagagtggttggagattgcaaattcagagtgtagattgactccatacaaaaagataagtcatatttatcagattttccattcacaaggtgttcttgaatgtttatttaggagaggagaagatgatataagttttatgatagaggcatctgtgtacttattggaccatccactagatggttcaagatcatcatctccaaccatttgtgactttgctggagtgttgcccacgatttttgtgacctttagaaacaagcgacttggaacgatggtatccggtgcttcggtggaattcatggaattcgcgcatcacattcaagaacacattcatcgtacgagctttcctgaaataagaacggccgaaatacacaagatttcattgattgatgtacgttttggcaacatggatcgcaatgccaaaaacattatcgtcaaagtagaagataacataccccattttgttcccatcgatcatgaaatgtgtttcattaacacagggcaaaactacaacttgtgtaagccgtattggttatctttggaggatagtagtatttacgaagcataatctgtagagtgtattggctatgtggtagatctcgaatggatgcaagcatccacatcgagatctgccatatagccataaatattattataaaatgatggaatagatttgcgtccaaaacccactctatgatgataatgtgagaacactaactacatttttttgttttaaaaaagtttcaaaatcactaactgggttgtttttgaatcaacataacacctccgagcattctatacggctaatggtaaaaaatacctggaaaaatcatattcttctggtaataatattcttacttggatgaaatgactgttcatgtgtaggttgtgccaactgttttaattaaaccagtggtcgagtaggtgcacatgactttacccgagttcaactccatgaagtgacttccataggtcggcattgtaacacaattgatccaaattactgtccaccaatcacatttgtgattatcatgaaacaatatatcacaacattggaagctcaacatagtgacaagaataaaaatgtctttggaggttcctcctcatacctcttaagactttataatttaatcttaacatataattaacatacatgtatttcttctttaggtattgtggttgaaacctccatttgtcacccttatgatcaattcgatttctactgaaagtattaaggtatcaaaaagtttctcaaccaattaaaaatctccatggtctctcaatagaattataagttttgtttttttgtgtctaaatgctataagctttcatcatcaaatccatttttggagctttaaacagttaccactgcaatctgcaagatttggaatgtaacatatgtaacgtatgtaccatttatgtacaagcgtgaatacattcaaataaaaacattcaaataagctcatagctagccaacaagcgtagcgtaactacatataagtaatcaaatgtcggataaattctttgtatttgcttgctctaacatgtcattatattttagtttttttaagacataaactagtaaagattttttaaaaatattgattctcaattaattggtatgttatagccatgtgaacacattaatgagagatattattaatgaacaaacattataaaactacttatttttgtatgtgttttaacgagccatcaaataccggaattaaacttcgtatgtattgatattcattatttcttaaaataatctcttgttttatgttattactaaataagatccgtttatatagacagatgaaaaatagtaattttttatcgattatatttaaactcttaaataatccataattttttaatatttaatttattagtttgttttaaaccaaatttcaatattatatattccatttttctatacactttaattacctaatttataatatacacttaactatatttttacaaactctatattattgatgatatttgaatttcattagtatcacccaacacatcttctctatatttaatttcgtatttttttttaaactaactataaatattactcattttattaataatacaacttaattatttatttcatcataataaaatatatatttttcaaaatattataatctgataaaataattttgatcatgttaaactaattttaaatgactcaaaaaggatttactcctaggaatgaaccgaagaatttttctaaagtaaagcagttctaggttgatcatgatgcttaggactagataacacgaatcgtcgttcattaggtggactttaatgctacaatagcctagatgttacagaagagtttgttacggagaagaaaataagaatctcatattatttcttaataaatctggacttgattacagactcgtttatataaggaacattaatacccggttcaatccggtttacagactcaatcatggtttattctaaaccatactctaatagcctccctcaagatggcaagtatattcattggagagccatcttgccaacaagagccttgaattgagtcggaaataagggcttggtaaaaacatctgcaacctgttgatcagttttaaggtgcaaagtcttaatcaaaccactcataaccttgtctctaaggatgtggcaatcaagttccacatgtttggttctttcgtgaaatactgcattatttgcaatatgtattgctgcagttgaatcacagaagaaagcaacggactttagctgaggtgcttgaaactctctgagaagattaacaagccaagcaacctcacgaactgcaaattccattgctcgatactcagactcagctgaagaatgagatgcagtctgctgcttctttgacttccatgagatcaaagatgtgcctagaaacatacagaagccagaagtggaacgtcttgtatcacgacatgaagcccaatctgcatcagtatatgcctgtaatgtcatatcacaatcagctgaatagaagagacctgttccaacagtccctttaacatagtgtaaaaccttgtgagctgccttcatatgtgattcttttggagctgaagtaaactgacaaagtctattcactgcatatgtaatgtcaggtctagtgatggtaagatacatcattttacccactaagcgtctgtaagaagctggatcttccatcggaggctcatctccatccgatatcaactttatacttggttccataggaatattagatggcttacaagccaataaacctgtttcttcaagtaatcccaacgcatacttacgttgacaaactgaaatacctgaagcattacgagctatctccaagcccaaaaaatacttcaaagtacccaaatctctcagtttaaaagctctttccaagtctgcttttagttcaacaacctctgcatcatcattacttgcgatgataatatcatcaacatacacaagtactgctatatatttcccattcacatttctcacaaacaaagtgtgatcagcctgtgatctttggaatcctaatagcattaaagtggtactaaacttcagaaaccactgtcttgaagcttgttttaaaccatagagagatttttgcaacttacagactgcattaggtggaagagtctcgccttctttagttgtgtaacccggaggaagagtcatataaatttcttcttcaaggtcgccatataaaaaggcattcgatatatccaactgatgcaaactccatttctttgctgctgcaacaaccaacaatgttttgacaatagtcatctttgccattggggaaaaagtgtcaacaaagtcaacaccctcctgctgtgtgtaacccttggcaactaaccgtgccttgtaacgctctaaacttccatctgcgtttaacttcactttataaacccatctgcagcctatggcatgtttatcaggtggtaaagaacatatcttccaagttgctgttccttctagagccttcaattcatcattcattgcctttaaccaatcatcagatttcctggcttgagtgaaagaagtaggctctgcatattttgttatagaacaaatatatgctcggtgtgaatcagctaaaccatcatagttcaagaaatttgaaattgggtgctccactccattagtagacaaattacaataatagtcttggaggtaagcaggagtcttacttgttcggcctttacttgtcttatccgtagaagaaactgcaggaatagtactgtcaacaatatcattagtatccgtaggagattcactcacaactacaggattgatattagatggagtgacagaatcattcacaactgcaggtgcttcagaagtagatgcttcagtagaagatgcatcaacattagatgtttcagtagcaaaataatcaggaagaacagtagatccacttttagcaaatggaaaaatgtcttcatgaaaaacaacattgcgtgagacgtatatgatattggtttccaaatccaaaagtcgataacccttaacacctggtggataaccaagaaacacacacgccttagctcttggttgaaacttatctcgatttttggttgatgtagaactgtaacaaagacagccaaacacacgaagaccattaaaatcaggcattttgttagtaagcacttcaaaaggagatttgtcatgaagcaatggtgtaggcaatcgattgatgagaaagactgcagttaacacacactctccccaatattccacaggcacttgagcttgaaacataagagaacgagcaacattcaatatgtgttgatgtttcctttccaccaccgagttttgttctggtgtttctggacaagagaaataatgaatgatgcccttttctttaaacaacttcacaaacttcaattctggtgcattgtctgatctaacacctttcacctgactcttgtactgagtctctatcattttcagaaaatctgggaagatagtcaacacttcattcttgttcttcataagatacaaccaagtgacccgtgtatgatcatcaacaatggttagaaaatatcgaaaaccatctggagtaggaacattgaatggaccccagacgtcgatatgaactaaatcaaaagctgagtcgcaaacatgattcttggaaacaaagggaagacgcttctgttttgcaagaggacaaatggtgcaatgaaaagatctttcattcctttgtttaaatccaagtacatcagtaactatatcagaagtagttacagatggatgacctagtctactatgccaaagactagaatcaacaacaatgtttgcatgaaaacttatttccttagtaggaaaatccttaattctcggaacatccaggacgtatagattgttgatctgctcacctctaccaatcatcagccccttgacatgatcctgtataaggcaataatcctcatcaaatgtcactctatatcccagatctttagtcagctgactgacactcagaagattaaggcgaaaatccggaatgtaaagcacattattcaagacgaggaactcattcagcttcactgtacctatacatgtgatcttaactccaaaaccagtaggtaaggtaactgaactattcatagtttcagataatctcataagcaaattcttatcatgacaaacatgatgagttgctccactgtctattatccaagtttccgaggataaaacattaacagtagctttcaaaacaccaataaaaccaagagtagaggaggagaaagcaataccaggtaatgcggtaatagtagcaccagacgaggaagcaatagaggaattctgcatttgagaattgaagtatgcaacaactccattaatttgatccttggtaagaaccttagtcagaccattaataagatcatttgtagtactatctgtcaaagccatatgagcaacaacaggtttaactgtagaaactgatttttccaaagaaacactcttatcagattggttcttattcttgtgtttaaaaccaagtggatatccatgaatcttgtaacaacgatcaacagtatgtcctgtgtaaccacaatgagaacatatgactttctgtggtttcgcattgttgaatgtggcattcacagaaggttgaacttgttctggcgcagatacaataaatgcagctgcattagaaggaaccggtgtgaagctgcgttgactgtgatcttgatccaacaaattgtaaatctcagctaaggaaggcacatgtttcttcatgatgatttggcttctaatgacggcatatgattcattcaagccagccaaaaactttatcacacgagcatgttcagctttcttatccatagctttgcaacaatcacaacgtttacacaaagtcacacaatcagaaccatccaattcattccagagagtcctcaatgtcgtatagtaagtagtaagatccatagtcccttgttgaagtgaccaaatctgttgagttaacggataagatcttggaagattagtaatgtgataacgagttgaaagatcattccatatctctgaggcatcatcgaaacgaaggatactcttatatattggttttgacaccgaattcaagagccaagacttaaccaagctgttacatcgggaccaaattcgaaacataggatctgattcaggaggtcgaggaacagatccatcaatgaaaacaagcttattcttcgcatctaaagcaatcttgatcgaaattttccaatcatcataattcgttccatcaaacacttcagaagtaatagaagctccaggattatcactattcgtaagataatagggtgaatgtatactatcatgagattcagttaccggatttcgagtacgagctcgaggttcaggtgaaccttcaggtgaagaatcatcgcgatttgccgatctacgagctgaaacaggaacgcgaatcgtgcgacgagtagagattttacgtccaggcgccattagagaagctccaatttcacggcaaaggaagaaatttttgttgaaatttttggtcgatacaacagtttctcagtgacgagactgaagaaactgatcgaaatgaaaaagaaaagaagaaaacgaggtcaagaatcgtatgaatgattcaccattcatgctctgataccatgttacagaagagtttgttacggagaagaagataagaatctcatattattccttaataaatctggacttgattacagactcgtttatataaggaacattaatacccggttcaatccggtttacagactcaatcatggtttattctaaaccatactctaatactagatctaattgatttagaatttaggaaatttgttgcctcatagatgttgtttaggaggatataactgaggtaagcgaagctgtcacaatgtgattatttgttttctttccaagatatataacttgtcttggaagctccctctcattttttctctcttttttttaacaatgaaagaacaagaaagccataacatctaaagaaccttgatggtcttgtccaaaaaactaggatcctaaagaaccttgatggtcttgtccaaaacatcaggtagagctaaaatgatagcttagttcaagctataggtttgcgacgaatcttgtttcctttattaaaccaaaaaccaacgaacttgaacaccgataaaagtatatttcaaagcaaggccaaactaatcaactgaaaaacaaataaaacaaccaatttaaacacacttggagacaacaaatgagatgaagagttcgacttgattgggtatacaggagctacagcgactgcacatttcccggttggttcatggaagttacgttgaagcctaaggtacccgccttctccccactctggtccccaagaattacgaataagccagtagtctccttcatctgatgatgttccataccccacaattagcacattgtgatctccccacaaattactacatgctcctttatacacaccctaaaaaacaacacaagagaaaccaaaaagaaacttgatcatcacaactaagtattggagtcttaagaaaatcaacggtgacaaagtcatttgttattacagatttgtagtcgctcatgtttgcagctgatatcataacactaataggttgataagcaacagctttcttcaaagacatctcatcgtttacaggaacaacctcatgaccattaatggtaacaacccgagtggttttcatctgcaagacgaaaacatagattaacaaattgaaaccattatcaaaactacaaaaaaaatgtcatttatgtttggttttacaaacctcaatggccttgcatgcggcagtatcttcaccggtataaccataaacttcatcggatacaataccaccgttctccttaatgaactcaaaggcccatactgctccaccaccagcacatccaaagttgtcgttccctctatcgcagtcaatgagttcttgttccgataaagatactaattctccggttgtgatctggtttataccttccaccgctccagtcgcggcaaacgcccaacaacttcctatatatataaaaaccaccaatctcaaccacaagcacaatcaaaaatcaaataatgcagcaacgtgctgttggcccagtggtaaatctcctaggtggaggtgctgggttcgagacacagacatttgggtctgaacttccagatattaaaaaaaaaaaaatcaaataatgctaaggatattgaaaatcataccacactctccttgtcttttgactcttggaacaactgctcctctctccctccaatcaacttcatcaggtaaaacatctccttctttgtactgatacctctccgctacatctgataggcttttcttttccatcttcccacctaagtaactagcttgaaactcatcagccgttagatccgaaaacttgttcaacccgcgttcataactccggtttggatctgaattgtgttcttcgatgcgcttcaagttgtctttgaagatcttgaaccgtctctccttctctccaagaccgttatagttcttcccattctctacaagccattgctcgtacattgtaagcacctccccttcattcctctgcgactctgttgctgtgacgacgccgagagatatggaaattagtaacaccgagagggtcaaaagagctagagttctaaaacttattgccatttctccttctgttttttttttaacttgatatttctgcaactcttaagtcaaagtatttgtagaaagaaaaattttggtcgtcgaggcttgagagaagtgggaaaacaaaaaacaaagtagaaatggaggaggagagggttagttggatagatgtatttttcgtatgggcactaactattatgacaagttggcctaataatgaataatgacaatcattatttacgttttttagtttttttatttgtgacacgcattatttaaaatagttttggcttgaaactaacttttatggtttggcaaaagaatgaatttgaacgaaaatgtcctttgtttcgaatttggacgaaacaaggaaaaaatgcgtaaaatttgtagttttcgccataagaaagagagatgggtgggacatgtacatgtgttgtgtcagacaaataaatgaatatgccattatttcaatatacgttttaacgttcatcttctcataattacaaactttttatcataaacagtcccaacataaattatataggtatatttttatagctccattgcaaagcactatttaaaaaagtattttttcataaaataaaatcacttttaacttgtaagtcacatggattggtaaagtgggaactaacctcatgttttggcaagagtaatgaatttggaccaaaataccattcgttcgaacaaaacaaatagagatgatgcatgaaaattgtgtttgtcgatgcaagaaggagaaactagatagttatataacattttatgcatttctatgttattttatttgaccatgtaataaaatagaaatgcataaaaattgtgtttgataatgtattaaatcatactaggtaacatagaattctttttattacatggtttatttgtttaaataattcatctaattagataacataaaatgctttcctataaatgctaaatatattttttattattttctataaatttatgtgtaaatgccaagtaaagagatggaacaatttttggtcatataatgatttttatttttatttagtttttcaattgttacaaaacaatgtatccccatatagattcgaaatgtctaatttgaaaataaaaaacattcaaaatatctaaatttggtataaaaatgtaatgtttttttgacaatttacaaagttacaattttaactgttatggtaaatatggtaactttacatataaaaaactgttaaccaattttttttttacgattaataattacaatttttaactgtttaatttgattatagtctaattacaatttaaaaatggtacagttatagtcctaaatacgattacggtttgattttgatatgcctaagtaaattagaaatttcaacaactagacatctattaaaatatgagcaaaccaccatatccttctaggacatgagctagctgggatagagtaaagttcaatttttgagagtgaaatgcagagatctctgacatctttagtataagttgtgtttccttgttcaccattaaaacttttatttttattgtagttataccttgatgatcttgacggtggtctttttgtatcactgacttaaccaacaaagtctcacaagttgataatgactccatcgagtgttggcttgtgcaacacgacttcaaaagctctcgtctagtctttgtcggcacatgaaagttttaaaactgtaaactctgcaacatgatttcttgctgagattgtggagatcccatgatctagtgaagtgacctcttgatccaggaatgcaaaacatgtcatctttcttggactaatgacacgggaggggaaggagcaggggtttgcgatgatgatccacttgaaatttttgctttgagcggatctataatgctaaattgagatcccaagaacttgacaaccacaaccagctccacccaaagaaatgatgacctttgggcaaaaaacgtttttgggctttttagtattataatttatctattttattatttgtaatatttttggcattttattataatcaaaacaaattatttttaaaattgtgggcttttttcagtctttttattaaaaaaaaaatggatctttttgtaaacagaaaaaacaccaagctgcgttttgaatcgccacaacagaatccatcctaaggataatggcattaatacgttggtaacaattttggtttggcaatgaggcatgaggtcgcaagctgcgtcttggatctctgtccgacgcaaccgagtttaagtcatcttggagacgcagaactccatcgtcctttgaagtagctacccagtcatgagatgacctgatcgttcccatttctttcatcaactccggaggcagcttctttttcaagttcgagacgtctctgatatccgctccacaaggatcagcgcaaagaatggaactaggaaaggttcgtttcacttaagatgaaaagccattagaaagaagcgaagaggaacttaccacttaagatggcttcaagggatggttgacaagtttagactgtaaaattttgaaactaatttttaattacggtaatacagaaactaaaattttggaacgtacagttagattagagaattaacgaagtgagataatgatgttagtactaggtttctttatcagattgtgtagttcagctgaagcataaggcagagctcacattgcgaaatcaaaaccatataataaaaacatttggattttcaaggattctgatgtctaaacgtcttcaagaaaacctagagattctatgccaaaatggtctatattaacaagcaaaatattaatcaaaaccaaaagatcattgttccaaataagagataaactttaaagaagaatgcaacaacaacttaaaagattcaaggccaattcatcaacaccaacatgtttgtgtattataagcatcagtcaaaggcctctttaacggtactgcagagacaagaaaacatatatcaagagtttaacaatcataataatgaaaggagatacaaaatcagtaacgaattttaccttaatgaatccgatctccttggcgttactgcggaaacactgtctgcagcaattcaaaccatacttcctgataagcccgtgtgagttcccgcacacacggctacatacatacaacaatttgcataatacaaaatcagaatcttgatttccacgtataacacaaacttcatctcatacataacataagtcaatctcaaatggtgaagacataagctaaatataacacaaacttaatttcagacataagtcaatctcaaatagtgaagacataagctaaatataacacaaacttaatttcagacataagccaatctcaagtggtgaagacataagctaagtacaacaatgtcagacataagctaatcactataatcagtgacacagatacaagaatttgcaaatttaacacataactaatctcattcacatagctaatgtcacattgtaaagacataagccaaaaacaacaatctcatacaaaaaatttgagtgcttaagggcaaaagtagagtgaggaagatgattataccataaacgagatccaggaccgtacttcttcggatgagagttccagacattagagtgacccattttgtcgatttgctcacagaggaattacaaacggcgacgagagactcttcaaaaccctagaaatattagtctcgttggaggagaagattaattttatcaacagcggatttattaaagaaaacaaaataatactaacgggctaggttgtaggcccattaatagcccaacattggcctcctattttttattccaaaataagcagataagacatgtgattaagtacttgattaagaaagtggagcgtaatttactttatcctttcttcgttacataaaccattgattatctctgtaatctcattgataattttgtatacactgattcatattaatgaagtattttttagatgaaaaaaaaaaagacatgtgatattgttaagtcaagttctctcaatgggttctctcaacaaaatcgtgaaaaaatatatcaaaaacgacagcggtctctcttaataacaaaattcttcttcaactctactctataattgactcaaaaatagagatttctacatattgactctatacatagagcaactctattctcaattctatttttagttcaatttttttttctatactttagtccctcaatttcttttttttatttaatacatataatcattttacaaacaacagttacaacacatagttttataaacttaacaagcaaacaagtactaaatataaaataattttataaacttaacaacaaacaaatactaaatttaaaataaacaacataagaaacctaaaacttaaaactagtaatttaatagtccgataaattgcttgtagatccgccaagctaaaatatgagtgtgttggcaaactagtcatagattactgtatatatatatagaccaatgtacagatatgattactgtactgatatagatcactgtacagatataaactactgtacaaattgatgcatctgttaaacgaaatcataatttactgttaattaattaattatatgtacacacttttatttatacagcatatttaatattcatatttataacaaatttatacaacttaatttattatttaacaacatatctcaatttttttatacacttgtatacttttaactatttgattcgtacacttacatctgtacaaacacttttagtgtacatatgtatataaatatacacaacgccatatctgtacagtagtctatatctgtatagatatatattatttatactgtgtcatataatataaaatttaaaagtcattaaacaaaatgcatttcaaatgatagagaaaaaaacatagattttatttatatgatcaatttttaaaaaaatataattttattaaagagcattttaattattaaactttgttgggatatgtaataaagaaagaaaaagattttttaaagaaaatcctaacgcactaaggtcccacacgtttctctctctcacaatggcatgttggtaaatatagttgtttctatggggtataatcgattttctgattagtggggtaagaggagagtgactaaatctacaattataaatagtaacttgccctattttataattatgttctgaaaagttactagtttgcaatttaaccattaaaatattgtccaaatgaagtagatggaggagaagtttttttatcttgattttgatcttgttgttggacacgtcgtttttgtaaaatccgtgcttgttcactctcaatcaaaagctgccttttgaagccaatctttccaagttattaccaatgtggtaagaccaaacatcgattagagattggttttttgattcatctctccgtggtgatggttctaattagttgtgtgcttaattgtcagatgaagtcaacgctccattcttctcagattaattttattgatgtaagcactaagtagagttttgagtgcttatactcaggtttagagtgacgaattaggattagcaactgataagcttataacaatacgagtggctaatgtttttgtgtattgctattgcatagtgtgttgcagaacaataagtcggctaagatgaagcagaacaagcttggtctccgtcgtgaacaatggctttaaagggttcctggcttgatactttttggtcttgtaagattatttcattgcctcaaaaacaatttcagttcgttcttgtttgcagcttgagtctattaattctgtagtatcacttgagaaggttatagttgatttatcagctcagatttaacattttcatagttgagttataatgccaacttgatcgaatatatgactatatgatgaaggttatcttttgatgtgtcatgtatagttccatcatcaacatgcatcttttgatgtgtcatgtatagttgcatcatcaccatcaccaaatgcatacacgtttgtaattgtggtttacttgtcggctcatatttgtatgtttcttatatatatgaaagtggctgcagttgatgttgttgcaattccttctgaaacaaactatgtagcttttgatgctttacgtcttggtcgctttactcaacaggttgttggtcgcctacttcgtttttgggatgctcgcaacatcaagaaagatggtcaatttcatgggcatagtcctcctgttactcaatgaaaaagtaaatctttttagatgtttaatgtatttttgtttcatatgtaattgatgtttaatatccttcaaaattttgtgaaaaaatatctttcaaaatcaaaaagtaatatgtatatacacaaaagagaaatgtgtccttttattaaaaaagttatttattctacaatttctttttaatgaaaattgatttcggccgactctcataattcataaattatagttcggattcagataacggatttttccaagtggctaaatcaaatatatcaattgtgctagtccctcaaacgacttagggggtattgaagaactgaatttaaaagaattaaaatgggtggaaaaatgaaagatttgaaacattctatccaaatcacaccataatatgtgggatttgtttcttcacgtttttacctttgatttctattaaattctaatcaaatcacattagcattaaaacaatcttaataatgaataacagtagaatttaatagaattataaattcagtcaactgaataacaatagaatttaatagaattataaaaccattaaattgaataacactagatttaaaaagaattctaaattctttcaaattctttcaaattcaataaaaatcctacgttcaataacccgattcaaagaaaagaagagcaagataccattaaatatgttatttaatgttcggtatcttgtttaatcgagacaatctttgtgcccaacattttcggaggtggatgcaacatcttccaccaattttggttcttcgaagtcggcctatatttcatcaaaagtaaaaaagtaaaaaagctagtcgtagatttaacatgtcaaaatcacttaagatgtgattatataaaccagtaactaaacgattcaggttcagtggtattggctcaacagaaacattctagttttactaaaagaaatccatagattaccatctttatagcttgttcaggttttaattcgccattgagaagtcttgtagctagcactcttgaattctgtaaacaagagatcacaactaaagactcaaattaaacgagtaataaatgaagaaactaaaagctaatttcaatggtaaacaaaatgagaacatctataaacaatttattggagacaagaatattagtgtagaacttacttggatcatgtaattaatgtcaaccaagatactattgatgtaagtatatatacaatatagatatatataaggtgtacgtagcttattttaaaacatttttttaataatcattaattcgttagacatctcttaaggccaacaaaatttcatattttagaatgaagtaatccctttattattacaagagaagtgcaaattgaaattttgtctaatttggcctcaattttgatttcaattttggattttgttctttgttattcaaaatcattaaggataatttggtcttaacaatcccctaaactttatatgatccgattcaatctaaaccgttcaataaaattaattctcttcaatctaaatcgttcaacaaaaataaggaatctatgtcgtttttgaaatcaaaatatgatcacattccatccctaaaaatactatattcaatcacgaaatcaataatcaataatatccaaatcatatattacgattcttcactaatcactaaaaaattatatttctaagtttaaaatatcaaatttattcaaatatttagtataagaactaaataaaccgattgcccgcggtaaaccgcgggttaaaacctagttgtcatgaaagcctatgacttaattctattaacaaatgcatggcaaaataaatcaagaacacaatacaaaaaaaagtaaggaaatgggaactaaactaaccttgagtctctcaaccagaagctccaacttgtaattatactttggtacatcatccgcgaaagaatcatataaagcctcctcaagagcaagtaccatctgaacaacatcctttcgactggtccccgtactttcacaacacatgttcttaagtactacttctaaaagctccaacaatgtcttgtcacgatccaaagcactggatggtaacgactctaacttctccgagatcgggttagaactcattctctcacacttcctaacaattcttttacgcctcggaatcgtagtcgtttgaactttctcaacgtcaacgagatttccaattctcgaaaccgtctttgccacaagcatatcaatctcaaacttttgctcctcttcaaagccttcatgagagaacttcctcacctttttgcgaacattatcataaaccatttgcacgatgaagccggaatgatgaatacggtttgggatttgcttatcatctggcacgaaatatacaagacacttgtacttgacagattcagcaaacacttcatcacaatgaaaactgaagaaaatttcccttgggttttcggttttccacttcccaaaatgtttttcttcgatatcttctctacggtaaaaccactgcacctccatcttcacaagtccatctttttcttgtgaataaatatcctgtccaacaaacaatcaaaaaatcaaatcaattgttgattataataggaacaactaaaaatcatattaacatttttttcatcttatttttttttttttttttgaaatccaggaggttctgggccaaagcccgtaatctcccctaggcccgaaaccacatcatgtaatattagtttcgtcccaagcgttactcgaactgccgacctctaagcttcgcctagggtctttaccaattgagctaacgacacttagtcacgcttaactgcggagttctgatgggatccggtgcattagtgctgatatgatcgcatcccatcttttcttttaccttgatgatcgcaatgtattccttttgtttattgtcttctggatacaatagcacaaagtctttctacaaaacagaaaagaaaaatctaatgtaaatggtactaaaataactacacagatagaacttttattcttatcacacaactttttttttttttgtctaatcgtaagttgtaactcttattgttttttaataaacaaaatcttaaaacaaatcaaaactcaccagtctatattgtttgccatgaaactcgaatgtctcgtaatgacatttcttgttttgtcccttaccagtaaacttaatcggtttaccaattgacttcgcacaatcgctcggtctctgctcgaactttgctttcttcttcacttgcatttccttactctcctccacccttctcttctttgtcgtcgtttctttggtgcttaacgtcgacaatggaacattgtcaatcacaaccacttcattcgattgctggatggacatgtctatcgtccacaactttcttatacgagtcacaatgaaattataagttacaaatccgtttttcaccctacagttgttgaatcaaaaagaaacattaataactattaaccaataattttcaaatagattagtcactcaaaagtgtacctgattcatatcccaccagaccaatgtttagatatgtcttggaatatgcttttctcagcctctttcttataaactggattatatcaacaaacaaatactacactacaaagaatttagttcatattttcccacttttaaataaacgcttaataagaaatataaggaggaaagagggaaaatgaaaaaaagagatttgaaatcagtagattttgtccatataatgttttttttattacctgttaacagaaaaacaagaaaaaataattatataagggagtcaacgaaaaacttttctcgttttggtcatttaaattacaaagattctttaccatgcaatgtattttgttaatgtgacctgtacagaaataacgttctaaaactggattatcacgcagtctagaactaacactatgaagatcatacattaaatttcattgagaaatggtcagcccttacatatttgggagacatgtaatacgccaaaatccacaagaagattggtgtatatattggcaaaataatggagtagtcttttcatggcgtactttgcatcttacctgagtttgtgcttaacaaggtaaaaccagttatattatgatatatggtttgatacggtttgatccggttatctttggttattgtaaccatggtttaatgtatttatatgatgtatatataaaggatgtctgtagctggcagatctacagccgaagatcaggtggggctcgtgccctatactcttttttaataattaaacaattgactacagtgatatgaatatatgttaccttttattttctttgaatataggttaccttaattggtaagagtgctccacattaaatctaggcagcatggttcgattcccattacatacaactttctaattttattatttatcttctttttttttgccgtcaaaatttattatttattacaaattatgagaactgtttcatagacgattctaccacggacaatttcttctgaaccttattagatccacgacagacgacacttccttctccttctccatgcgcttgatggacaccttcaatatcttctctgcgtagaatcttggcgaacgactataattgtacatcgttgtagatctcatgcacacttgcctccattaatctgcaaatctgctaataaatcgcaatagctgagactcgaacctcagacctcttggtgtataagcattaatgaacccttggtcaatcattgggtcaaggaggcttccactattatttatctttaacattttttattatttaaaaaacaaaattatgagttaaatataattgatgccctatataaatttatttcctacatatgccactagctggcaccctatactatagttgctcaactagagtcaacctatattgtcgtcagcaaaattcaacctacacaaaattataaacttctcattccacctaatctctaaatctctactcatttcaccaaattcaattaatctactcagttgtgttttaaaattctactttggcgatcactatactgcgattagatataattaatcgggttaaatttagttaacccgactataatggtatagtccatattgaacccttcttcctgagaaagaggtttcgtttttcccttaaaacaaaacacatttgtaaacgaggaccaaaattcttgttaagacctatgttttgtttgtaatgaaagtgcaagaaaaaacatccaatttagtctcaaaacaaaaccaaaacatatccaatttaatctaaaagcaaaagcaaaacacatctgatttagtctaaaactaaaacacacgacaataatgttgttgatatctaaaagcaacagcaaaaaaccatgcaacataaaaaaaccatacaacacattcaactgccagttaccaaacctaactactcttgtgttgctgcagacggttgggtgattgagatcgtctcctgaccttgagtcttcttctccttctcacttttcttcttcttcttagtctttatctccttcttatccttattctatgtcttagccttctttgctttattttgaagctgatactaatagttgtcactaggaagcttaaattccagttaagataaaattaaaaaactttaaaccagaataatacctcatatattccagcattctttgcctttctcttccttggcaccttctccttaggaaagttcttacatcctaatgctttgtgaccagcttcaccatagctcttgcaatgaatgactattcatgtccgaccaagtttatctacttcattcttgttcttcttcttttttggtgaatcatttttacctttgatccttgcaaacttctctctttttctctttgatccttttcttctactaggaagaggaggtggtggtggtgcgattaccaacctgttagttgaatccatccaataattaccaacctgttagttgaatccatccaatatttgggtccccttaatggtaaggtggttgtatcataggtgcttctccataaatatgtggagaaataaccggatatgtagtcctccgcgttgaaaccagcttttaacatcgcaacataaacatgctcacaaggaaatttagttatttgccatttcccacagaaacattttttcttcggtatgtccactctattaccatttccatctaaatatacctcaaatatgccatgtgtgcaacagtatactgtgcatttatctacaactatcttctcagaggcaactatcttcataacatattttaaaaatcttccttggtgcttcaatgatttcttgttcctcttaacgatacgtgtcatttcttgcctccttatggtttccagcattggaaccaatgcctttgctcttgctttgatgatggtggaattgaatgacttggtagcgttgttgtctacatcctctaaacaactaccaagtctataaaaggacagcgaccatgtatgtggctcctctctcatcacatcatcagacaaggcatcatcataacatctcaagatgttaagatcggcagcatactctttctcattgtagctataggctaatttccaaactaatgtctttagcatatctttgttggcatgttgatatcatgcattttctgttagggtgcaagtatgcaatgtacatgatgtcttgatcacaaaaagttgcttcgtcttgacaaaggaacaataaacttgccacttacatttaccacccacgccgcacttgaatgcaaacctttccttttcccactcattttgaaccgcattaaaatggttctaagaacactccaaaatggtttctttgaactcaatacttgtgaagaaagtacttctgacaaccaatttatcatccatagcccttttaatccttagatccctcatcaaaatgggatcctcatcttcatctgagctatctgaaatcatatttcggccaatttgaatctcatctgcaaaactagctactccatcccctacttcatagtcaaaacactctaatggatcttatacctctctttttttctaagctgtcttcttagatggattcttagattttttctctttcttccttcttccactttcctcaatctcctcttcactttcagattcttcttcaacctcaattaacgatacgattgatataaccctgtttttcctgattttaactacgttttagatttaggattttgagtctttatgttatttctcgagtctttttagagtcttttcaggtattctatgcagtgggacaacaatggtgatgaggagacattttggagcaaaagctaaggagaaggaagctaaggacgatttcagttccagattcagtgagagtgtcgatcgacacaaaggagtgtgttttatagggcatatatagttttagtccctgaacgttttatagggcatatatatagttttagaggtcattgtttagaccaaatttcttttctaccaagttttcagagagacataagctattcatccatattttcatagattcatttagtttccaatacagtgaagagatcctttcatactataatcttatttgctgtgtttatactttcttactcaattatattgcttgtttcaaactatatgtctgagtagtttgcctgttaggaatagggtttctcattaggaattcatatggtttagtagatcgccccctttgctaggttatctgtagaattcttcatctttaattgttcttaatgctagatctagagtaattaactagaacttgaatccagacaatagatatacccgccataggtatctgtagttggatctattattggatgagcctggtttataggtgtgtaataagaatcggccaatctactaaggtgaacaattgaactcgtttagaatgcatgtttaagttaaagatctctcggcttctctgattattcttaagctatagacatagggagtttcgcgaaacgccaccagttattccataattagagtttgagtttaagaatggttcgataataacctagctataactagatctactaaccattactttcctgagattactctactcctagctctttattttaatcgtttcatattaaatcaatctgttgttttcttattttgtttactttttatttcaatcattccctgctagcttaatcttgacattcaattcattgtgtgaacattagaactttgagaaaatttgacccttaaatactgcaaccgatttcttatttgagagagtaggtttaaggcaatttaaaccatatcaaatttggcgccgttgccaaagttcttgggaatcaccattgagtttagtttagagatttcgtctagcacgcgtttcttgttttctgtgtttcaggtgtatgtctaggcaaacaaggagcacaccacagaaggagctgatcaacttgtatgttcttgacttgggaaaactcgaacgcaccaaccgcaaaactcagagattagcaatggctaacagagtcatcagagctgatgaggaaggagttttgagagatgatgatgggcaagactacaatgaggctggtcagagattggatgatcatggactcatccatccaaagggcgtcaatgaggatcaggcgcgcctcaatgcgcaattagctcagggttgaagattttggtgagatttcgagacccttctttaccaacttcgatttgaatatttttgggcaacttgtgaccggattttgttgtgaataggttgatcatacttctccatattagtgctttagttcaaggttgtattcagctttggtagaagagtttggtaagcctcaccgtcttccttctttaatttttctcgatggaagtgagctttaagctctttaatggtggatttcgtctcaggtagaattagaatttgatttataccttttaaaaagatctcgtcaatacgaatcccacgtcggtgagatctcgttaaaataaagtcagaattgatcgaaatttgattggtaagtattttcgattttgttgattcatggtcaaatcaggatttttatacaccggttcttagggttttaaaccggttttgttatggtctggctacgtagaatactcgtttaaaaaagaattttgaattggctgagttttgaatttcaactgatagtagttcggaccggttcggctttgtttttaccggttttggaaaatctgatacctgaataagattgaacgtgaatttatctttcgaacggtatatggttcctaattgtttaatctacggttgaatataggtgaattaattattgatttggagtatgtgtagaattgcagctaaccgttcgttcaatctgaaaatattttcccggtgagttctaactcccttttaattattatacatttgtataatattttaggagtatgataaaaagaataaatgaattatttgtttatttcaaaaattgatttctttgatttcataactaatttggttatgataataataataaaatatgttatttcgttaagaccgatgtatatttgtataacattcggaaataaaatagaaagaaaatttgaattatttgaatatttgaattctgaaaattgattatttgatttaatatgattattctaaatatgattctaatgatgaaatatgttattctgctaagacaggtatcagcatgcgactctgatttagctagctatattgagcaatctatggcggccggcatagccaacagatgtattgtgtatcatgttagtctgttagtggtattgaggtcggttaatacagtggaccgtacttctttatcatctcgttagggccagcatccctatcgagtatattatgtaaatattctgttagtatatgtgatatatccttatttttactgtttttagctatgatttgggtagtagttttagagtctttttgttatttctagagtctttttgttatttttagagtcttttttagtctttttcaggtctttacatgtttgagattcatttagagataatggagcattctggaggaaaacatagaatttatgctgttgaagaaatccggagactaaaaaccgcgtaggtgtcgaacgacagcaatacgtgacggtaattcgacgacgcaacttattgaagttttgaagatttccaaattcggctcagaactttctcttatttctatatatatatatatatatagattttaaggtcattgtttagacctaagcttggagacgctattctccttatctcttttgttcttgggagcaaaaccatgtggagactccctttagagaagatctttctgactctattcttctcttgtttcttacattgatttcttattcaatcgtgttttgttcttctatgatcatgtttgagtagttttcttgttagggttagggtttctcattaggaatttagatgatttagtagattgccctcttgctaggttatctgtaggattcttcatcttgattgttcttaatgctagttctagagtagctaactagaacttgatcttagataataggtatacctaccataggtacctgttatcagaactatcatagatgagcctaagtatttaagaaaaaacacgtaggctcatagaagggctctcctttagatatctaggtgaattaatcaaacttgataataatgcatgtttaagtatatgattctcggtttctctggttatcttagttctaggcatagagagtttcgcggaacgccaccggttattctagtattatagtttgagtttaagaacggttcgataacaacctagctatttctagatctactttcatctatttcctaagaatagtctaagtctgacgcttttaatatcttatttcacaaccaaccaatctgttattgcttactttttgtttctatttatttttttactattttacttagcttaattcgatagccattagtctattgcgtgagcctagaagtttgtgaattcgatccgtaagtgctgcaactgacctctttatttgagagagtggtcttaggattaatttgacttacatcattatggtttgggtcgaccaatgctggagttgtaccattgctagatacctggtcgttctgttctgatgttattattctgtctgatgatattattttgttcttatgatttatttatgtattttgtcagcataagttatgatgtactttactttatttaaaattaattgaattgaaactatgtttgttagtaccaacacgtgaacatcactttgtgtgagatcagaccatgttggtatttgtttgttgggtttgtagtctcactgggcgagttttcgctaacataagttatgattccgtgcggagggctttgacgaggagcgttatgtagctgaggttttgaacttgttatttttagagcgagacttgatagattttctaaaattaatttattttgattttgagatttggagtttatacaagatttcaactttatatattttggaaattttgagtaattttattatagtaatgcttcaaaaaaaaaattgaattttcaaggcgttacagattccgaaccaccattgtagtcgatatcatctggtttgtcactacaatttgttaaaaaaaacatcgtcatctctctgttatttttcagaaagcaacacaaatctagacaaatcctacttcaataacaaataatttaagagaaacttacgacatcttttctgggttagcgaatgattcataacccaacgaagcttcagattcccgactcttatccaattcaatcaccaccggagacgacgacacactagcagatacgaagaattaaaagaagaagctatgagacaacgaagaagacaaatcaaaatctagagactctcggtagaaggacagtcatgaccgttgaaacctaatttctaagttttccccaattcaaatttaataggttttgtgtttaaggggatatcaaaacttctttctcagggagaaggtttcaattgaggctataccactgtaatcgggtcaactaaattaaatccaatttagatctaatcgtggtacagtgaacgccaaattaggatttttaaacgcaattgactagattaattaaatttggtgaaatgggtagaaatttaaagattaggaggaatgaagaagttgctaatttgtgcaggttgaattggacagaggaccaaagtataggttgtttttagttgagtgactatagactatagtatagggtgccagctacagggagcccctatatattttcagctacataagtttctcttagattagttttgagtagtttctaaatctagtaaagaaaatttgttctttaatctcttgtgttgctgaattatgtcctcaaacattcagcatctaagtcagagcatgtcggctttgatttgatgtgaattacaatggtcacacagcggtagaaataatgtttcttgggcaatatatatgtgttgtagtaatcctcaacctttgagttagattttgggtgtgcattaattagtacttgaactaaagtataaactgagacacttctttggtaaaatcaaatttttattagaaaatttgtttagtatatgcatttacaagtttcactcaaaaatgatctaatctctcgcattcaaggatttatttcaatccacgaacctctcaaaacaaaccccttaaacattgatgcatgtataagaattttcttgctctctcttctgagttatggtaatctctctacaaagacttaattagcactcaaattaaacaaaataagtggtggttgtacaagcctagttttaattctacggatcagtactaatcctgaatggaaattgacatgttttttttttttgaatatctggaagttcaggcccaaaggccttacatctcccagaggcgggacccataccagaaattcatcttctttggaaaagagatccttcccaacgtgtctcgaatccagcacctctatctgagagatttaccactgggccaacaacacgttggtgaaattgacatattttctttttgtagatgaaaaaggaacttcttcttatgtttaaactatacaaacttccaatatcctttccaagacaccatctcaacaactgtctcttggatcgtatattgccatttatgtgttgagctcctcactccagctccatgtcatttattacattgctctgttgtatcacttcctaagctacttgcaactcgttacttatgggagtcgaaagttagtcaaagtattattcttccatataaatgtttttttgccgtcactttttctaattgactctagtcgttcggaattatttttgttgaggaggagtcataaattttacaaaacaagaagaagtaatattctaaagaaatttataaatatgtgtctctctaatttgttgttataattctcaagaatttccaatggttaagctataattattgacttttccttgaataagaatcttttgaagatgttgggaatatagaagaaagatacttcgccacggatggattaatgcatcttgtaattgtaatcacatcaagttacaagaaaaaggtaatgaacaagtaacatatacaattcattttttctcttctttccagtgaaaatatccattaattcatgtttgagttatcttcttctccgagattgtgagagagtgtggaagctttttgaacattgcatctcccacagccatgcctaaccttatatagtcattgacgttttcttctattgtttagtccctcaatacgtaaaacacacgcaaagcttggaaaatctttaaggtggtcggatcaaaacccttctcaatgacctccttgatggcttttttggcttcttcttttccattgatcaagaggattaacaactcttgaggcacacctagttgtttcaaaataaatacatctcggattacattgtcctgcttaccctgcggcaaaatcatactatccacttatttttcgtctcgtgaaatgtctctaacgtaatcattgtagcagctcatagagcttgaagctcttctgaactggagaaactcaagttttgtatatatcacctaacttgtgccccaactttaagctccatacagacgcttaattcccttctatccctttaaccttgagacaatataagccaactagactcatcacttgactatatatatagcctaaaaaacctaaaatcgtcgaaaggaaaacgattttgacgttattgaatatgtattgaggctttgtttttttttttggtggaatgtattgaggctttgtttgggcctataaatattgagagattgaaatttagaaaaacagacggtggaagaattcttctattcttttattttttttgttcggccaaaaagttcatttagaagcccaataagcagttacagaggaaaaaacccaatacaatacagacacaatttaaacggtccagattaaatctaatctttggatgctgatacgtgttataaaatgctggcacttcaccaagccacgcgtcaggtattcgagcgccgccgcatgcatcgtgttgaacaccgtcgagtccgatcagccatcgccggttagtcctgaaacggtggatagtctcctcctatctgttgatctcgaatccagactcaaggaaagttgaaaatcttctagataaagtccatgaaagccgcttcaaaaattctctgagaattgccatcgccgggaaagctccatctctgacaatatctaaggagatgtagtcggttttgtgctcatatatgagcaaaaaggattgatgaagattttattcctcgaacttgattggctgaaacagatgatttgtgaaggtaacagagacatcgacaagtcatggatagagatctgaaaaacggatagaatcggtagcagaagtctgacttaaatcagaatttattgagttcgcctaagcgaaatatacaaaaaatccgattaaacggaacaaaagaaaaacaaaaagctacatctccgattagaacggagaagagagctctctctctctaaaggatgttgttgagttattttggcgagatgataaccttgggtaacatgtccaaggcagatcccagtatattagatttgttcttttaagttactttgaataaaacgggaggctatgccgcccgatcacttaccaaaaaaaaaaaaaaaagcaaatgatagacacttgtctaatgtcattctgtaatgcgaggtcacctaaaatattaataaattaaaggtcaggacataaatcgttggttaatttaatcatttaaattaattttcaattaaccactacaattaaattgtatgatttttttatttttttgggtcaaaaaattgtatgattaaatatttggattcgtttcatgttttcaaaagttcttacaaaaaaatacatgtctactttacaaaaatctttttaaaccaattataagactttttgtaaattcatgctactatatatccacaaggaagaaaatatttttatacatagagcagaagatgcaacggaattcaaagtttatggaaaacaaataactgtacagattttttttttttttaaatcacactttttaagctttcagtaataagaagataacatgcttgaacaaacaaaaaaaaaaaaaaaaaagaaaccacatatctaaacaaatcgccttatggctttttttttaatctacccatggctctagataatatagtatagctttgatgagtattctttcatatcatcaattattccttttggtgttataaagttcctcttcagaatccttcttgtgacgaaaaatttgaaagcagattggttattggtgattttgtggctgtcataagctctcctcgtttcaagtgtatgataatgacttttgttggggtaaaccgatcacagctcgggctggaccaagctctattgaaagtggcactgatgagattaagaccaatccaaccaaactacttgaaccacaagaaagcgaggagcagcttgtaccggaagaagcattaatcgtttcggaagatcttctaacaagatcaagatccaagaagttcaaccaatccatccatggactactaaagaaactaaaaaaaatcaagaagacgtatcttaatcctccttcatagtgatcacagttcaagaggttcggtaaagggttaagtgttgcttatgcactcttttcccttgtcaagttttgttccaataggttttcttgataaggtttttaatgaggcataagtaacattttcaagtctctctttatcagtccaaatcgtggtccaaggaccttggaccactcacaatgcattggcccattttctcttttttaattcaaacttgcatttattgctttagttatttccaagactctttgcatgagtttgcatgagtatggacttgtgcatgctcttgcatgtttttcttctctcccctcttctccttcttcctcctctcctatataaactcattgtagctctcatttgcaaagcatcaaacattttaatccaaaactctctctttcacttgtttgatccaaaaagtatgtaatatctattcaacttgttttcttcttagtgtataatatctaagttggatccaacctcgtagtctaagagtctttcatcactcttacaagtataactcgttccccctttcattttgctgcatccactcgatctcgtcgtcaccccgttcgtcgtcatttcgcagctttgttaaagatcaatccattattcaccatcaactagatcatttccatttcaaaaccaacaaagtgtgtcattggagaattgatctacgtccaggagagtagacttctggacgtggatctacgctccaaggacactttgttatcaggttttcattacatcattcaaagatatcattttcattgagtttcttcccaagtctaaaaaaaaacagtcatttatctgagctatctagcagagatatattacaactccatccataaaaacggaggtataactttttccttcttctccattgcataccacatcttttcctcttcgtagcaatacttattcttcaacgtgttggttgaattaggtccttcgtcatcttcaggttcagatacaaaggaggagacggagaaggagatcaatgggaacgagaagaaaaaaaagaagaagaagaaggacgacttgttttcatgatcagagcgatctgttcaaaatgttttttgtcacgccccaacagccctatcaatgggccccacgtcctctctcgggtccatgggctcacccctgtctgacggtcggtacgctacatccgggattaaatacttgttaccgaccctataaattaccatatgatctttttcatgttttgtcctcactcatatggttccgacaatcagtttccggaaggtcacttttctaagttaagcatgcttaattatggagttctctcaggacgtctaaccgaaaagataagtgtactttggtgcataggtggctaaatcaatacttttaaatttctccacatgcaccaccatattcctgaaactaaaggtgttatatttttcaaattaaaagaagcttttggtctattgttgagaagacaaattatttggtcttcatgatcagtgcattctaagtttggtctctttcttgcatataaatttgttatataggtagagtttgatattatggagtccatgctggaacacagttaactgattatgatttatgaagcatttcattttcgttatgattgttttattgcgtttcagctatttgcaatttaagaaatgatctaaggtgtttttgctttgttaccgttcggttttgaagtcatcgactcttctctagattttcatatttgttgctatcttgtttacttcagtcgcagcctgcaggatctatctttggttctgatctcagaagcatacatggacctcggcgaggaatatctcctctctacaattatgatctcattttgtgacagattctatggattttgactgtaaataactaatcttgtataccttaagcaatcatccatcaaaaaacataggagctggatggattgtaagggctagtttgtgtatttccctacaattagcccgtgaagattggacactcgtttacttggattggagacgcattaatcaaatgggattttggtagactcttgtgatagctaataacaagcaaattcttcttagtcaaatttgactgataaaacaaaaatacgagaatagccaaaacatcattaatccaaaataagacatgcttaatgaggttcaacaacttaattaactcccaaaataacaatggttctcaaaagtaaaaatttcaaaaactacaaaagcttaaaagccatacccatcgacgccttcatgtttatatcattaagcatcaatcatgaagttggtgcttgattaacggtactgtagaaacgagaaaacaaaatcagaaacaacagtcttgtgtaatgatgttaacacaattcatagagtttggaatttaccttaatgaatccaatctccttagcgttgctacggaaacactgtctgcagcagttcaaaccatacttccggatcagaccgtgcgagttcccgcacacacggctacacacacaaacaatgattgcataatgcaaagtcagaatcataacttgacttccaaatataacacaactaatctcatatctaaaccaaatacaacaatctcatacataagctaatcactataatcagctacacacatacaagtattgcataatacaaagtcagaatcataacttgactgccaaatataacacaactaatctcatatataaacaaatatcacaatctcatacataagctaatcactctaatcagctacacacaatacaaagtcagaatcataacttgcctgccaaatataacacaactaatctcatctataaaccaaatatatctcatacataagctaatcactataatcagctatacacatacaagaatttgcaaaaattacaaagtcagaatcttaattgccatattaacacaaaactaatctcacatagttaagatagaagccaagtataacaatctcatacaaatactaatctctacaataaagagaagaattgacaaactatacaaagtcagaatctaaaattgccaaaatataacaacacatatctaatcacacatgtaacaacaaatacacaaatcatcaatagacgatcagatccattagagaacaaggaaatggtgttcaagttctatacttctaagaaccaaacaaatcaaagcaaaacgcgagaggtagaggaagatgattataccataaacgagatccaggaccgtacttcttcggatgagagttccatacattagagtgacccatttcgtcgatttgctcacagaggaataacaaacggcgacgagagagactcttcaaaaccctagaaatttagtcacgatgatgaagaagctgagtttttataactagtacaatttttatctaaatgggccatatttctaaaggcccattaattggtggattcttttttttttttctttcttctccatccacatgttctttgctttgaatgatccttagcttttttttttttttttttttttgagtgaatccatggccagtcgacctctcatctctctgcaacttctttcttcttcttcttcatcttcctcgttaaaaccaacaacaaaacttctcttctttcataaacctgaactaattagccaccaccatagaaaccgtaacaagttgtcacggacaagtgttcatcaacactcagctaatctcatcattcacccttctgttcttttcctaagtagcgccttcgatggcggtggaggattcatcgatacacagacttttattgtcaccattagtctcgttgtagccattgctctctcactattcctcggcttcaaggttttgtatcaattattcttctctacttaatcgttcaataagtcattttggtgagtttttgatctttttaatgtcttattgatttgtttcagggagatccagttccttgtgagagatgtggtggaaacggtgaatcttttactctgtctctctttgtttgcattatgattagtatatgtcttattaaatttttagtcacctatatcatgaaatcaaaatccattaggttctatgtaaattatcttaaaaaaaattctaaactagttttactatgtagcatgcttgtcttttgattggatacttatgcattgttcaatgaaagtaaacaatgtatactgtagtttcacaggtattctagatcaacttaacattgatatactacaagaaaacatagagttttcctacccggtttcctaccaaatttatggtagaaaaaattatctatcaaaattctacgaaattgtgacgaaaaatatatttagtaggaaattcaaaggttatttcgaaaattgatgtcagaatttcgaaagaaatttcctacaaaattcctacgaaaacttgaaggtattctagcgcattctcttttccgagtctaattgtctttgtaatcttttgtgttttatgggttgcgcacaaaggcggaacgaaatgtgtattttgcctagaagggaagatgaaggtggaatctggcatggttgattgcaaagtctgcaaaggttcaggtacttaatacttaaaccattttcttggtctgtttttttgggtgctaaatacagtagtctcttgataacatatgaataagttttgttttgttaatgtaggtttgattttttgcaagaaatgtggaggttccggatattctcgccgtttataagaagtccttactattttcaatatttacattggtcctttggactatgatgatatactttctaacttgtttatagtcatataacaaaactgtgatgcattttcttgtttaattgtcatccacagtttttgttacatcggttcaaatacgagtaagtgattgttaattactaaagaaatagtttcctagacaaaattataaggcaagttgattcaaggtacaaaagatgtaattcatgagcttagtgatgttttagttttcacactacaaaactaaaattagtgaacactacaaacccaaaaattagtgttcttagagcaaccccaatggcaagggaccatgagggtttcttccaaatttttaatcataaattttgaaatttttaagtttaaaagtttctgttggtcattaattttttgttcgtctaatggtaaaattcttcaatgggtttcttaaaaagaaaaaaatttattattaaattaacaattacaaatattttatttcgtaaaatttaataattaatacaaatacttaaattgtaaacatacatcgcatatatttttaatttgttttcaaaatgttttgtggtttttaggcagtgaatggagacacagtattcgcggattttaaagtgagagtgtggaaaaacgtgacttttcaccaatcaataaaactaaaagataaattgcgttttccaaaaaaaaaaaaaaaaacagatgcggatttcaaaggataataacacaggaccgcacttcaaaactgccacactccagttaagcagtggtccagtaaaattcgctggtacaatattatcttcttttataatttctttttctattaattgtttcttccttatatattggtaaattagtgtagagagaatttacgaacaaaacacaaaaattcattctctctcattacactctttttttttttctactttgatattaaagaaagttgccaatccccattaaaagtaattatttgtgtataattttgtttatagagttttttaaccacacgacactatcaacttagaacaagattatattttaaagaaatggatatagaattcatattccggtttatgtgaaagcctgattaatccattgaacatcctgcttttatttttttgtaatatacgtgtatgttgcatagtaattagcttagtttgtaactagcttagtttctcaactagtttagtaattagctcatatacacgtgtatgttgcatacatgtttaatatacatgtgtaactagcttaatttgtcaaataaaatcaatgatttatatcgtattttatataaaagtgttgttgtaatatgtataaagttataaaaaaaaatatatagatgcaagactaaagtacaagacgtagatatataataatttattttctaatttagaaattgttggattttattgaatgtagaatggcttccaatcgtcgacggagcacaaacccttctagacgaacagattcaactcatcccactaaaattttaactcctcctacaaaaacaacaatacgggtaaatttaatattatatatatatatatatatatatatatattaaaaatttacttaaatttgatagaataaataacattgtattcacgaaatatgtagaataaagacaagtacaaatggacgtacatacaggaaaaaacattaattcaattgttcgacgaagcaattgccatgaataattatactctcaagaatcctactgctatcggtagagagtatatggttgaaaatttcaatatagcattcaacatgaatattacttatggttttttcaaaaacaaacttgatgaattcaaaaaaagttacaagagatggaaagctcttacgcacaaaacaggcatcacggttgatcctaatacatctttcataaatgcatctaacgcatggtggacagaacaagagtttgtaagtacatcaaatatttgtattaatcaattataattcaaaatttttgtatcacgtatttatattattttaaaattacagggatgcaaattaacaaaaagcttgaaccgaaaaccacctgtattttgggacgtaatgcaacgatgtctcgtattacatgatgttcaatcacaatctcaacattttgctcgtcaaagaagagaacaattgatccacgagcatggagttgatgaagaaggtgaagattactcagatagtgacagtggtaacatgccacaaaccaaagttcctgaaacgctagaagaagaagaagtgtatcgtgttaccattgatgatgatgaaatattccaaaattctgccgctagaaggcaacaacgaggtaggccaaattttcagtcaaccgctagacgtggaagtagtgcacaaagatctggaggaagctcacaagtttctattggaagtggttcacgaggaagtcggcgacgacaatcctttgaaacaacaatacaagacagcatcattggcttcagagaattccaacgacaaagttttcaacaacttcgttctggtgcttttgaccaagatgattacgatgaatttaaaaaagcggaagcgatatttatcgcgctagatcttccctagcacactagatttcattgggcatgcattaatgcacttaaagagctagtattttggcgtaagtatttcattgatatagctgcaagcactgacgaggataaggtacaactgttagaagctatgagtggtgtttcacgcaacaaccaagatatgccaaaacagttaggttcagaccattcatttgggagtccagattcaggaggtatatcatctggaagtccatcttcagtgggtaataatttgggagggcaaaattcacccggtttttggggtcccatttatccacagtggggaacaccaccaaacgttgcacagtggggaacacaaccaaatactccatagtggggaacaccaccaaatgcacagtggagcacgtcaccaaatgttccacaatggggaatatcaccaaatgctccacaatggcggcaaacagaaaattttcaacaaggtggttcaagcggaacgactccaacaaatgttcaatatggtttttcagttggaggtcaaggagatggtgcaacaactgaaactccaccaataattcaacaaacatcatcatctggtctcggtttcacaaattattttgaaactggacaaatgccacaaacacctagacgagggggtctctttaatatttggggaactccgcaaggatccaacgcaagtcatcacagtgatgtaggagatgaagattagtttgtgttatttgtggtttatcaatctcatttatgttttgaaatgatttatgtttttttttgtttaatgttaatttattttttgttaaatgatcgcaacttaaataatctatgtctaatgcaagaattcgtttgtattgaatttcaggcatttcgtatatgtcagttgcgatcacaagaccttaacaatctaagttacgaagaaagaattgaattgtggaatttggaaaatgaacaatttgaagagttagtaattcaaccagctttgaattattatgaccgatatttcaaagagcacccgttcaaactgatagagatttgggatggagaaatatatggcgtcggctacagcaagatgatgctgcttgtcttcaattattacggatgtcacttccatgtttcacgacattgtgtaatatgttgcaaacaaattatggtcttcagccaacattgaatataagtattaaagaaagtgttgcgatgtttctacggatatgtgggcacaatgaagttcaaatagatgttggtttaagatttggacaaaatcaagaaactgtgcaaagaaaatttagagaagttcttacggaaactgaattattagcatgtgattatattagaactccgacaagacaagaactttatcgaattcctgaaagacttcaagtagaccgaagatattggccatattttagtggattcgttggagctatggatgggacacatgtgtgcgtaaaagtaaagcctgagttacagggaatgtattggaatcgacacgataatgcatccttgaacatcatggcaatatgtgatttgaatatgttattcacatatatctggaatggagtaccaggttcttgccacgatacagttgttctgcaaatagcacaacaaagtgattccgagtttcctttgcctccgtcagagaagtattatctggttgattcttgctacccaaacaaacaaggatttctagctctttatagatcgtcacgaaatcgagttgtgagatatcatatgtctcaattctatcctggtcctcctcctagaaacaaacatgaactgtttaaccaatgtcacacatctttacgttctgttatcgagagaactgttggagtttgaaaaaaaaaatggagaattctttctgattttccaagatataatgttcatgttcaaaaaagagtggtaatggttaaaatgggattacataatttcatcagaatttcaaacttctcagatgcagattttgtagatgtaatgacaaagacaaatataaacaacagagattttaatcatgatttagatgacatagaagcaactgatatagcagatgaagaatataagatgcaaataagagagaatattgcaaatatattatgggaaaatcaaagtaatagataatacttttttaatatttttatgatgaaattagtcgacgcatgtaacaatatgtatgttacaaaactaaatttctattttgattaatttttatattactggtttataaatatctgttattatttatttattaacataaaaaattaattaattattaatatatatatatataatttataatccgcaccgcaaatattatttcaccaatcaaacattattctgtaccgcttattttgtataaaccgcacttgtcctacaaatatatttctcccacacgtaccgtagttgaaccgtaccgcactgtaataacgcttttcccacacaacaaaaaacgcggttaccattcagacacttagttgtagaaatgttattttttaaaaattggatcttttcaaatagttttttaaaaccaaagttggatttttaagatatatgtcttaaattagtgatatttttgcttttcgtattaaaaaaaaaaaaaaaattggccacgtatgagaaataaacgaaactcacaaaaaataaaaccaaacacaagaactttttgtttgtcttcacttgaagagccaataataattggccacgtatagtccctctaatgtaaaaaaatctcttccctaaggagtagcctgatccaatttcattttttctttattttttggtcttgtggaaggaccttaccacctaagaacctgacgagggacgtctgttgtggccgacccatttaaacctatttaattttaaggtttattagggctgcccatttaaactcatatacccatttacacaatctacctcacaacttacacatctctttctctcccacaatctacctcacaacttacacatctctccctctcccctagctcttgcaaatcctgaacctgaagaatggtaaacgttttgtcacttcctcttctacttgtacgtagactacttacacatctagattgatcatttaaatcctcttatgtctctcttctttgtttctacgtacgtagaccacttctttaatggctttattccaaattacccaaatagcagatagaatcgaaaacccacattgcataactagctataagcctataactaagcaaatcatgtgacgtttaaacaacatatcttcataaactaagcaaatccttaattcaaattcacaactgaaccaatccattaccaaattgaaaacaatagagaggagtttacaatggaacagctcaaggaaaagttatacctgagagaggaatcagaaagggcgatcctctttcaccatatcttttcatcatttgcagcgaagttctctctggattgtgtaggaaagctcaacaggacggagttctaaccggattacgggtctcaaaaggcagccctagagtgaatcaccttctttttgctgatgatacgatgttcttctgtcggtcagaccctaaaagttgcaaggctctaatgctaatccttaagaaatatgaagatgcttctggccaaatgatcaacaagacaaagtcagcaattactttctcaagtaaaacgcctgaacacatcaaatcagaagctcaactcatccttggaattcaacttattggaggactaggaaaatatttgggattacctgagatgtttggcagaaagaagagagatctcttcaacaatattattgacagaataaggcaacgtgctttaagctggtcttctaggtttttgtctactgtgggtaaaaccactatgctgaaatctgtactatcttcaatgcccacttacacaatgtcctgttttaaactcccgaacacgctctgcaaaagaattcagtcagctctgacccgcttctggtgggattcagctgcagacaaaaagaagatgtgttggatagattggttaaaaatggctaaaactaagaaagaaggtggactcgggtttaaggatatcacaaattttaatgatgccttacttgcaaaggtgagctggcggatcctgacttcaccatcttgcttgctggctcgcattctgctgggaaagtattgtagatcttcctccttcttagactgcactgtagcttcatactcttcacatggttggagaagtatctgtatgggtagagatctcatcaagtctaatctgggtaaagtcattggctcgggttcagatacactcgtttgggatgaaccatggatctcgctttcttccccgacaactcctatgggtccatcacctgaacttttctctggtatgacagttgatcaccttatctgcccggtattgaaaacttgggatagagagaaaagaagaagtatccttcccagctatgaaaaggatatcctttctctgagacctagtaaacttggtgctcgagaacgttatgcttggctactcactaagtccggtgattattcgacaaagactggctatcacgcagctgctgctctcgctaaacaaggaccccaacctccagatcctccattggagttcagttggaataaggagatttggaacttaaaatgccttccaaaattgaaatttcttctctggaaatctatgaagaaccctcttcccgttggcgaaaacctgaggattcgaaacatcaaccctcttgctaattgccctcattgtggtgaggatgaatcgtgccttcatctgttcttcctgtgcccttttgctcttcggacttgggaacaagcactattcaggaccactctattggcttcccgaattaccagtatgaagatgggcttagaagcatctcgattccttatcaacctcccaccatttggaattggacaaggacttctcttcccttggattttgtggaatttgtggaattgtaggaataagctgatatttgagcaaaaacacatctcgagtctggatcttatctcccaatcgatttctcaagccaaagaatggttaggagctcagatccaggcatcgtcttctcagatcgtgaaatcttggattcctcccacagagatcgattcagacacggttaagtgcttcacagacgcctcctggcgtgaggagtcgctagaggctggattcggttggatctttgtggatcattggaatcatactgaatcacatcatcaatctgcagaggctaatatcaattatcccttaatggcagagtcgacggctctcctccttgccatccaacacgcttcagaccttggcctaaaaaaacttgctatagtttcagactcgcagcagctagtcaaagcactgaatggtgggtctcctcctttggagctccatgggattatcttcgacatctcagttctctccctaaactttgatgaaatttcattttcctttgttaagagagagaataactttaaagctgatgcattagctaaagctgctttgaatcctatttactctatacggttcacaattaatgaaaaccaaccatttaacaaaaaaggagtttacaaataaaatcaaagagagagctgaatagaagcttgacccaaaaactaatccccaacatcttactatttgtatatatggaattcgttttgtgaacaatgttttaaaaacttattaatttagctgaaacaatgctcaattttgccttcggtgaaatatataaccagcttttgttggcttctcaataaatcgtaaacttttgttaattttttttgtcggcttagtgatttcttatttaatcttaacttttgttgtctttgctgaattaagatgataaatttcgaacaaaacttttattggatatgattaatttgagcctccagtcaaatggattttataagtcatcgcaagatgttatgatatcaagttttttcaatatcacgttcatcaactaaagtaaacaatttttttttgttttgttttacatatagtgatctaaattatttaaaacgaatatatattatctaactgacgaaaaatgtgtcttcgacgtttcacatcaactaaaatatttagctaattttttagaattatatcatagatatgatcaactttaataaaataaatagtttttttatagatatgagaggacgggtttggcgggactgggttttgaatcaacattaataaaagattttaatatatcattaatccaccgctttaatacgggttaaatctttaaattattatttttaacaatgtcaatattaaacatatcaaatcaatctaatttagaaaaaattgtataaaaccaaaaatgtctcgtaatataaaaatacttaataacaattgtaaacaataaaatataaatgtttttatagtatgatacaatttgcaaacttttatatgtaataaatgatcattaaattttaaaactcactacttttagaaaagaaatcacgagaggagataagaaactacgagaaaggttatattttggaacgagttatatgactgacggatttgaattggtatttataaaattttaaaatatcattaatatgccagtttaatccacgctaaatcttcagtttattaacatttgtctcatggactcgtggtatacaattacttaataataattgtaaactataaatatataaatatcttatagataaatacattttacaacattttatacatatgaatcttttaaaaataaatcgtcccgcgatgtactacgaattaaaatttagttagacattagtttcagtagcgaacaatataaattttgttactttatacccaaaaaaaaatgttgaaaccccataaatctgatttttctagcttgctctttctttgaattaagggtaatattaattaattgccaaataaacatacacaaattaagaaagtagcatagaaatttttttgttgcaaaatagctatggatccacgttgtgagaaaaagtgaaaaaaaaaattatccttcgtttgtttcaagatcaacagtatacaagacagtttagtgaatttttccaaaatagcatgtgatatttgaatatcacgtgttatatttcactaaaaaacatgatatttcaaaaaacatagttattttttgaaaaataaattgttatagaaaattttaatctgaattgaatcttttaagaagaaatcacatctgaacttaataaaaccgtgtatattagaaaataagaagtttgggttcgagtcccagatactgcgatttattagcaaattaatggaggcaagtatgcagtagatctccaacgatgtacaattatagccgttcgacaagattctacgcagagaagatcattgtaggtgtccatcaagagcatgaagaaggaggtggcgtctttcttggatctaataagggtaggaaagaattgttcgtagtagaatcgtctatgtaacaattttcataatttacaataaataataaatgtaagacggcaaaaaaagtaaatcacatgtgatcttaataaaaaacgtttattactacaaaaaacatgataatgagagatattaaattgaatagaatatttttccaagaaatatcatgtactctttataaataagttgtaataccaaaaaataacatgataaaaagatatattaagttatcacatgtaattcgagaaaatatgtgttataaaggacatttatgtaattacatatgttttccgacatgttttcgacaagttactgtagcatatggttattttggtaaagaataagttggaatatagtcactaatttcaaacataatttataaagtaatcactttattatttacaattttcaaaatattcactttttattatttatttccatacactaatattcgtaaaacacatcttacatatacatttttgcagccattttgtgaaataaatcttgtagttgaaacttatttacgatggttgccactggactttaatgttatttttgataattagaaagaaaatcttcgaattaaatatttgatatttaacaatcttcccaaaatctctcaacattaactacatgattagttactaaaataatctttttttttttttttaataattaaaatcatcccaatgggcaataggctcaaggccgaacaacaatagtacggttacaaaatgagaagaaacgaaatgacaaaaccggagacgcgagatcggatttggaggttgatcggaaaacaaagaaacacatccattaaaaccggcgattacaagaagcactgctttgcggctacgacggtggatccgaactcattgaccgaagtaatcggttccagtcgctatttcgaccccccgaacaaacctgaacctgcaacacttctcccgacatgaaccgttccccagataatccggaacccaatctctctaatcttcgacctagcaaaaagagagaacctagaaatctaacacccagtctccagcactgacaataaatgttatcttctccaagcaaagcaaacctcagatccggcctgacgaaaacaaaatcttggaagctgggaggatcagtggctcaaaccaagcctcaacaaccaaaatccgagaaaagccaaaacagatccattggatctgtcgttaatcgtcccgacaaacagcctaacccaccaatccgccttcatgacttccgccgcaatccacagccctcacctcgagaagttgagccacgagaattctccaccaccataattctagcgtccatgaccagaaaaaatagcatcgggaaaatcctcaaacttgtcgtagaggaagccatagatgcatcacgaaccggaactccacaccacagctatcggagaggagagctcgctcaccaccgtttcatggagcaagaaccctgacctacaacgaagatctaaaagcaaaaaagaaaagcgaaagtagatctgttttttttttcttaaggagagagaagagagagacgtggaacgattgtcctcaattgtaaaaaaacgtcagtcaaaaaaatatttaacaactccaaaaatattcaaaaaaaataaaactttcaaaatatttaatatcatctaattattacaaaattttaatttttatgttgcttttctgcatgactataacaattcaattataataatcaaaccggaaagatatttaataaaacatttaattactacaaaattataaaataataagacaataatttataaacatatcataaataagatcaacattaataaaataaatgattttttttacaggacgggttggctgaacgagtttggcaggacgttacttaataacaattgtaaactataaaataaaaatattttatagatagatacaatttgcaaacttttatatatactaactttaaaaaataaattgtccccgtggtgtactgcgggttaaaatctagtttaatatataaatatacaagatttataggtatttttgtctgtaaactaaatgtgttgtatgaattttagtgtaagcaaataataaaaaatgcctatttgtaaattgtgaatagtaaatttgttatgaataaagatggatgtccattataaggcccatcatctaagcccatcatctagatgtttgtagggttttaccctttccttgtactcctatataaagaatcctttatctcaatggaataacacacttatttcctctatctctttctctgtttataacacgttatcagcacgagtcctacctagctgagtaaaccctagccgcctaagaaaaaaaaaaaaaaaacctagccgcctaaacaaacaaaatcttaagctaacaagataagttttctgttcatatttgtttatgcacagattatctatcatcagatctgtttgtatttctgcactaattatgaactgattatctattatcagatctgtctatttatctattatcatatctgtttgaatctctgtacgaattatgcacttattatctattatcatttctgtttgtagttttgtacgatttatgcacggattatatgttattgattctgaactgttttatgcattatatcgcagaaacccgattttcgcacaaattatcatcatctggattttcacacgaaagataagttctctttcatatttttataaaaataaagatctaatgcttctttaaaaattaaactttaatagttgatgcactattagttttacgttaatagagttgatcatgaatattgtttaccctaaatttgcacgaaaaaatttgtttaaaagatctgtattaatcttttctaaaaaaaaaaaaaaaaagaaaaaaaaactagaaatttcaagagtatatttggcttaaccggattggtcatcctggtttaatgatgatgcgaaagtattgagaattatgtggacattaggtgaaaaaccagaagattctccctaatgatttatcaattgttacttgctcagaaagcaatatgataaagtgatttttaacgagtcaaaataatttggactttatctattcgttggtatatacaaggagatgattatgggttgatcacccactgtatgacatttagatacctaatggctataaaagatgcatcgattcaatggacgcattgactcgattgttgcatcgactagaaggtcatatttatccttgttataaacccgcaacatagagtttgcgaggttactttcttgattaaagtacaagagtatttcagtgtttatttattataaccattattggatatccgttgggataagtgttcatacacaaaatggtttagtaatatcgatacgcatcaagccaatgaataattaatagttttccccatcattattggttttgggtcagaaaccaaatagttttcatctaaaatctttgaatgtaaaaagtgatccaccacagcacgctgagatgaaccctcaaaagaggataagtatacatgttggatacgaatgataactaagccatcctagaaggatttatataccgctcattttgaagactatcatattatataatcagctattccaacataagggggagaatgtatacagctggtgaaaaaaaagataaaaagaaatgaattatcaatgatcctcggagtaaagaatgtatattaagagtctaaaagataatttaattatagaatttagcgttgtaattgccagacgcatttgctgacccaaataaagtgatgaagtcacttataccagttgtaaattaaatgctccagaatataatgaatgtcctgtaaggaccaatttcaaactgctattgagtcttaagatcgcatgaagcgtaatagaccttggttccaaatataaatatcctcgtaaaagtgaaggagcacaaaattaaaaatgaccaaattgaggaaataaatattttgatgatctcttgaagagagtgaatgatccctaaaagagacataaacatgacaaatgaaacattcaagtacttgacaatgaagagatctagctagctatgtcatgtcaaaatataatggaatcaaaagcaaatcgacgtcgtaatatatttgcatgctatgagcagttgaaattatagacaaaaaggaggatcatgaaagaaagtctattgaaaagtgtacacaaagtaatgattagccaaaaatggaaaagaagaaatagacatataattataatctctagtagagatatttagactagtagtctatgcacatgatgtgtaaaaccagtggaaaataaatgagtctttatgtgaaagaatagtgaaattaatgataagaaatgtattatgaagagatatattctcttgtggtggatgtaatattttttttttaagtatctaaagtctggcaataagagacggaacactggatatgacatttatatgaaattcttgaaagatataatctctgaaggattaattatatgagaattatgttctctagaactctactcgatcgaataaaaaaaaaaaatatatgtaacatgacatataatcatataaatgtatatttatgttgagtttgcaaaatatattgatcaaactaatatttgttttgaaaatcattaaaactcctagagagttatcataagtaatacgatgacaataatctatgataaaatatcactagataatgatatttataagtctatatgaaaaccatataattttgatcattaagattatggttattaattccaacgagatattgtatttgattgaaaatcatctcctgaagaagatgtttccgagggggagattgaatgatatgcgtggatgtaccctttttccttatcatagtttttatcccacatgatttttctatgacaaggtttttaacgagacattaaagaacacgcaaataatacacttgatgaatgttaggaaattctatcaatcatccaaatgaatattatacactaatgatatttagagaaataaataagatggtcaagataaatcatctaaaagattcatgagcagcagaaaaatggcgttgtactttatccagaaatttgttcaagagaagaattggcagacttattctcaaatactgtttattctctgccacatcttctaatcatgcagagattttaccaattcatgaagctagccgcgagtgtgtatggctaagatccatagttcaccatatacaagaagactgtggtatgtatgcagggaaaaagactccaacaaatatgtacgaagacaatgcagcatgcataactcaaagacggatacatcaaaggcgatagaacaaagcacatcctaccaaaattcttctttacccacgatctacaaaagagcgtcgatgtacaagttttacagatccgttcgaatgataatctggctgacttattcaccaaggcgctacctattgctacttattcatcgtatcggattacgccgtctcaaagatctcgacgaatatactcataagggggagtaattgtgtgttgcactctttttcccttaaccatggtttttcctattgggttttcctggtaaggttcttaatgaggcagcatttcaaatactttacgagttatgatactataatggtcatcagggggagtgttatgaataaagatggatgcccattataaggcccatcatctaagcccataatctacatgtttttagggttttaccatttccttatactcctatataaagaaccctttatctcaatggaataacacactcatttcctctatctctttctctgtttataacaaaatttactattttttaaattatgttttaaaatgtgattactttccaaactcactcttttgttaattattatgatttatcttcaaaaatttggctacttagtcaatattctcatgaatcaatacaaaatatccggttcaactatccccggtttggtgtaatcataaccgatgcaatcatatatttaatgaattaaaaaatagaagaagcgcaacgtttcagaaatcaaaaagccccaacgttccgattaatttcaaaaaactgaaataaatctcagccgttcattaacacgctcctttcaccctccgatcacatctcgtcttcttcacaacgtttcctttactctctctctccatctcttcccccttgagacccaaatttcaaatttctctcttctctctctcactgactcagtgaattctcatcttctctcatcacccaaccaaatcaagcatgccgtttatctccgagactgctagtgccatcaagcgccggttcggattcaacgaccgtcccgctccgtcggaatctctccgctctgtaccttgcacgccagaagctaacaccgtctcgagagataatcacactcatcagtctttgcttttctcttccgccgttcgaagcatgcctgaattggacgaagatggtgcgatttgcgctggatctgctcagatatcgaggtctcaaagctttgagttcaatgaagatcccgctttttggaaagatcacaatgttcaggtattgagcggttttggtgattgattcgtgtagatttgatttcgcctagcttctgtgtagtagtcacaatgcctagtttttggttcaattgaattggttgctcttgaagaatcttaatgacgaaataattttcggattttgtggttttaacacattaatgaattgattttgagaacattttagggttttgttgatttttctggataaaagaaaactaagtttgttctatcgtttcttggaatgttgaaaataggttatcataagaactcgtccacttagtagttcagagatttctgtacaaggcaacaacaaatgtgtaaggcaagacaatggtcaggcaattacttggattgggaatccagagtctcggttcacatttgatctcgttgctgatgagaatgttagccaggtattgccgattgtttatgcatctttttttcgaagctctagaatgttcctgagtctgcttgcttttatttgttcttacaggagcagatgtttaaagtggctggagtacctatggtagagaatgttgtggctggttacaatagctgtatgtttgcatatggccaggtgagttttctgactgtgagttttatctgtatttgctttctagtgtttccagtctgatgactgatggtagtcttaatttgtagactggaagtgggaaaactcatactatgcttggagatatcgagggaggaacacgtagacatagtgtcaactgcgggatgacacctagagtttttgagtatttgttctcaaggatccaaaaggtttggtgtgtttgtctttctgtatgcatatgctttagctgtgaaatgctgtgttctaacttatctgtcttttctttaccaggaaaaagaggttcgcaaagaggaaaagctacatttcacatgtagatgctcatttctggagatttacaacgagcaaatccttgatttattagatccatcgtcttataatttacaggtatacataccaattgtatcatggcaacttgtgatctgaatttcgtatcttatgtgggattaaccaaatatcctcttttgcagctaagggaagaccacaaaaaaggtattcatgttgagaatctaaaggagattgaagtttcaagtgccagagacgtgattcaacaattgatgcaggtaatttatttttattctcttagctatttgatattaggtgcactttgtctgttcttcttggtttttctgactctgacctgctcccgtactacttttcctaagtataaaagtttgatcctatgtaagattaaatttctcaaaataacctgttatgtcaaattattcagtttccatggagaagctttaatgacactattttcttgaactttcatcttttcttttgcatctactaactactttgcatgctagatgctctttccttccatagtcagaaagataatgcaagaagtagttgacaatttgctcatgtcattcatttatttcataatagctttctcatgcaacttccacatcttttatgtgtagggtgctgcaaacaggaaagtagccgctactaatatgaatcgtgcaagtagtcgatcccacagtgtatttacatgtatcatcgaaagcaaggtaattaattgcattcaacttgctacttgagttctcaggctttatttctgaaatcgttatgatgatgtatagcttatcaatttctcaaagtaaaagttatcctgatctgtgttttctattagtgggtatctcaaggtgtaactcatcatcgttttgcacggcttaatcttgttgatttagctggatctgaaaggtaatggcagctataagtttcaaacatactaccctttctctgttcaagatattctgctaacatctggaatataggcaaaagagttcaggagctgaaggtgaacgcctcaaagaagctaccaacatcaacaagtctctttctacattggggtacgaatacatcttgcagaagcttttctagtttggtgtttgttatatagttttttaatgatttgtggctacactgactttgcaggcttgtaatcatgaatctcgtaagcgtttccaatggaaaatcagttcatgttccttatcgagattcgaagctcacatttctgcttcaggtaaaaaacttcttaaatgatgtgaagcatggattcctgtattgtggttctcgcaccctaattgccccgatcattgaccgtcactcttatatatctacaggattctcttggagggaattcaaagacaattataattgcgaatattagtccatctagcaggtaaactgatacttgtttgtttatcattccatgacctttctgcctgaaacattcattggactgtatctcatgtttctgtcttttctattattcagttgctcattggagaccctaagtaccttgaagtttgcacagcgtgccaagcttattaagaacaatgtaatgaaattattccttgccattgtttactaagtcatggatctgacatagttggaaagtttagttgtattaattatattaaatccaacaggcaattgtcaacgaagatgcgtctggagatgttattgctatgcggcttcaaattcaacaactcaaggtagtgttttagcaaagactgttgctttttctctcatatgaacatgttattaagtgtctgaagtcataatttacagaaagaagtaacccgcttaagaggaatgggtggagtagacaatcaggacatggacactatctcaatgggttgccctgcctctccaatgtctctcaagtgggatgggttcaatggatcattcactcctctgacaactcacaaaaggatgtctaaggtttgtaattggattttccctgatagggagtttctatcggctaagctatttctttttcttaggaatctgatcctcattgttcagcatttggtttgtttttaaacattttcacttgtatggcttttgtaggtaaaagactacgaagttgcacttgtgggtgctttcaggagagagagggaaaaggacgttgctttacaggctttgactgctgaaaatgaggcctcaatgaagttggtacgttagaaatagattcctcacttttgagattcacatactgtcgaaaatctttcatcatgagttgatcaacttttttttttgtctccaaacaggaaaagaaaagagaggatgaaatacgagggctgaaaatgatgttaaagctccgagattcagcaatcaagagtttacaaggtgtaacttcaggaaagatccctgttgaagctcatctgcaaaaagaaaagggtgaccttatgaaggagatagaggtgctacgtgctcaagttgacagaaatcaggaagttaccaaatttgccacggagaatttgcgattgaaagaagagatccgcaggcaagaagactctctgaagatttcctatttgtggaccctcagctatatacatcttttctaactttcacttgctacacagattgaaatcacaaggtgaggaaggggaacgggatatcttaaatcaacagattcaagcgttacaagccaaggtgagtaatatattctgtcatttcgagacctcagaagtttgtttacgatttttattagtatgtgtaacttgaatctatgtacagttgctagaagctcttgactggaaactcatgcacgagtcagattcctccatggttaaagaagatggtaacatcagcaatatgttctgctcaaaccaggtaagggcttgattctctttcatctgagctgatgttgcctcacaaagtctgttaatttctggcaagcgaataagttgttttttcgcgttctgacacttgttcttgttgttttttgcagaatcaggaatcaaagaaactttcgtctatccaagatgagaatgaatttctccggatgcaggttagtcttgcattgagtctgactattcagtcaaggtttatgccattaagttgtctaactttcttgattcgttttgtaaaatgaaggctattcaaaaccgggcagaaatggaatctcttcagaagtccttaagtttttcacttgacgagaaagagagattgcaaaagtaattcactgcacacactatacatttcattttcagggtcaattattaagcctcagctcatctctttggatttctcttgcaggcttgtcgacaatttgtctaatgaacttgagggaaaaataagatcctcaggcatggttggtgatgatgatcagatggaggttaaaacaatggttcaagccattgcatgtgttagtcaaagagaagctgaagctcacgagacagcaatcaaattgtcgaaagaaaatgatgatttgcgccagaaaataaaggtcttgattgaggacaacaacaagcttatagagctgtatgaacaagtagccgaagaaaacagttccagagcttggggaaagatcgagacagattcgtcaagtaataatgcggacgctcagaacagtgctgaaattgctttagaggttgaaaaaagtgcagctgaagaacagaagaaaatgataggaaacctggagaatcagctaaccgagatgcacgatgagaacgagaagctaatgagtctgtacgaaaatgcgatgaaggaaaaggatgaattgaaaagacttctctcttctcctgaccaaaagaagcctattgaagctaattccgatactgaaatggagctgtgtaacatttcttctgaaaagtccacagaagatttaaactcagcaaagctgaaacttgaactggcgcaggaaaagctttcaatatctgcgaaaactattggagtgttctcttcgcttgaagagaatattttggacatcatcaagctgtcaaaggaaagcaaagagaccgaagaaaaagttaaggagcaccagtctgagctaggatctatcaaaactgtttctgatcaaactaatgcaagaaaggaagttgcagagaaaaaattggccgctctcagatgctcactatcaaactttgcatcatcagcagtttactttcaacagcgagaagaacgagcaagggcgcatgtaaactcattttccggttatctaaaccagaaaaatgaagaactcgatgttatccgttctcacaaaagagaaatcgatgctgctatgggtaagatccaacaatctgaggcagagctgaagagtaacattgtaatgctgaaaataaaagtggatgaagagaacaagaggcatgaggaagagggtgttctttgcacgatagataacattctgcgtacaggaaaagccacagatttgctgaaatcccaggaagaaaaaacaaagctccaatcggagatgaagctttctcgggagaagcttgcttcggttagaaaagaagttgacgacatgactaagaagtctttgaaactggagaaagagatcaaaaccatggaaacagagatagagaagagctcaaagactagaaccgaatcagaaatggaattggagaacacaattcaagagaagcaaactattcaggagatggaagaacaagggatgtctgaaatacaaaacatgataatcgagattcatcagcttgtctttgaatcggatctgagaaaagaagaggcgatgattataagagaagagcttattgcagaggagcttagagccaaagatgtgcacacgaatatgatcgagagagtcgagaatgcgttgaagacactggagaatcaaaacaatagcgtatcaggcaagattgaagaagaagtagaaaatgttttgagtttagttcacgaagcctcgaggttgcttgaagtttctcactgatagttcacgttagagactctgattgctgtgtacgaaatatttttcgttaaccataaatcactaaaacagaaaaaaagaaaaaaaagaaaagaagttactattaaatttctgaaatatgtaataacttggttatggatgaggatgatcacaggacttgaatcttgagcttgcatgaagctgtgggaagctt

SEQ ID NO: 1350 - DNA, 102873 bp, Arabidopsis thaliana
gaattctcatcttctctcatcacccaaccaaatcaagcatgccgtttatctccgagactgctagtgccatcaagcgccggttcggattcaacgaccgtcccgctccgtcggaatctctccgctctgtaccttgcacgccagaagctaacaccgtctcgagagataatcacactcatcagtctttgcttttctcttccgccgttcgaagcatgcctgaattggacgaagatggtgcgatttgcgctggatctgctcagatatcgaggtctcaaagctttgagttcaatgaagatcccgctttttggaaagatcacaatgttcaggtattgagcggttttggtgattgattcgtgtagatttgatttcgcctagcttctgtgtagtagtcacaatgcctagtttttggttcaattgaattggttgctcttgaagaatcttaatgacgaaataattttcggattttgtggttttaacacattaatgaattgattttgagaacattttagggttttgttgatttttctggataaaagaaaactaagtttgttctatcgtttcttggaatgttgaaaataggttatcataagaactcgtccacttagtagttcagagatttctgtacaaggcaacaacaaatgtgtaaggcaagacaatggtcaggcaattacttggattgggaatccagagtctcggttcacatttgatctcgttgctgatgagaatgttagccaggtattgccgattgtttatgcatctttttttcgaagctctagaatgttcctgagtctgcttgcttttatttgttcttacaggagcagatgtttaaagtggctggagtacctatggtagagaatgttgtggctggttacaatagctgtatgtttgcatatggccaggtgagttttctgactgtgagttttatctgtatttgctttctagtgtttccagtctgatgactgatggtagtcttaatttgtagactggaagtgggaaaactcatactatgcttggagatatcgagggaggaacacgtagacatagtgtcaactgcgggatgacacctagagtttttgagtatttgttctcaaggatccaaaaggtttggtgtgtttgtctttctgtatgcatatgctttagctgtgaaatgctgtgttctaacttatctgtcttttctttaccaggaaaaagaggttcgcaaagaggaaaagctacatttcacatgtagatgctcatttctggagatttacaacgagcaaatccttgatttattagatccatcgtcttataatttacaggtatacataccaattgtatcatggcaacttgtgatctgaatttcgtatcttatgtgggattaaccaaatatcctcttttgcagctaagggaagaccacaaaaaaggtattcatgttgagaatctaaaggagattgaagtttcaagtgccagagacgtgattcaacaattgatgcaggtaatttatttttattctcttagctatttgatattaggtgcactttgtctgttcttcttggtttttctgactctgacctgctcccgtactacttttcctaagtataaaagtttgatcctatgtaagattaaatttctcaaaataacctgttatgtcaaattattcagtttccatggagaagctttaatgacactattttcttgaactttcatcttttcttttgcatctactaactactttgcatgctagatgctctttccttccatagtcagaaagataatgcaagaagtagttgacaatttgctcatgtcattcatttatttcataatagctttctcatgcaacttccacatcttttatgtgtagggtgctgcaaacaggaaagtagccgctactaatatgaatcgtgcaagtagtcgatcccacagtgtatttacatgtatcatcgaaagcaaggtaattaattgcattcaacttgctacttgagttctcaggctttatttctgaaatcgttatgatgatgtatagcttatcaatttctcaaagtaaaagttatcctgatctgtgttttctattagtgggtatctcaaggtgtaactcatcatcgttttgcacggcttaatcttgttgatttagctggatctgaaaggtaatggcagctataagtttcaaacatactaccctttctctgttcaagatattctgctaacatctggaatataggcaaaagagttcaggagctgaaggtgaacgcctcaaagaagctaccaacatcaacaagtctctttctacattggggtacgaatacatcttgcagaagcttttctagtttggtgtttgttatatagttttttaatgatttgtggctacactgactttgcaggcttgtaatcatgaatctcgtaagcgtttccaatggaaaatcagttcatgttccttatcgagattcgaagctcacatttctgcttcaggtaaaaaacttcttaaatgatgtgaagcatggattcctgtattgtggttctcgcaccctaattgccccgatcattgaccgtcactcttatatatctacaggattctcttggagggaattcaaagacaattataattgcgaatattagtccatctagcaggtaaactgatacttgtttgtttatcattccatgacctttctgcctgaaacattcattggactgtatctcatgtttctgtcttttctattattcagttgctcattggagaccctaagtaccttgaagtttgcacagcgtgccaagcttattaagaacaatgtaatgaaattattccttgccattgtttactaagtcatggatctgacatagttggaaagtttagttgtattaattatattaaatccaacaggcaattgtcaacgaagatgcgtctggagatgttattgctatgcggcttcaaattcaacaactcaaggtagtgttttagcaaagactgttgctttttctctcatatgaacatgttattaagtgtctgaagtcataatttacagaaagaagtaacccgcttaagaggaatgggtggagtagacaatcaggacatggacactatctcaatgggttgccctgcctctccaatgtctctcaagtgggatgggttcaatggatcattcactcctctgacaactcacaaaaggatgtctaaggtttgtaattggattttccctgatagggagtttctatcggctaagctatttctttttcttaggaatctgatcctcattgttcagcatttggtttgtttttaaacattttcacttgtatggcttttgtaggtaaaagactacgaagttgcacttgtgggtgctttcaggagagagagggaaaaggacgttgctttacaggctttgactgctgaaaatgaggcctcaatgaagttggtacgttagaaatagattcctcacttttgagattcacatactgtcgaaaatctttcatcatgagttgatcaacttttttttttgtctccaaacaggaaaagaaaagagaggatgaaatacgagggctgaaaatgatgttaaagctccgagattcagcaatcaagagtttacaaggtgtaacttcaggaaagatccctgttgaagctcatctgcaaaaagaaaagggtgaccttatgaaggagatagaggtgctacgtgctcaagttgacagaaatcaggaagttaccaaatttgccacggagaatttgcgattgaaagaagagatccgcaggcaagaagactctctgaagatttcctatttgtggaccctcagctatatacatcttttctaactttcacttgctacacagattgaaatcacaaggtgaggaaggggaacgggatatcttaaatcaacagattcaagcgttacaagccaaggtgagtaatatattctgtcatttcgagacctcagaagtttgtttacgatttttattagtatgtgtaacttgaatctatgtacagttgctagaagctcttgactggaaactcatgcacgagtcagattcctccatggttaaagaagatggtaacatcagcaatatgttctgctcaaaccaggtaagggcttgattctctttcatctgagctgatgttgcctcacaaagtctgttaatttctggcaagcgaataagttgttttttcgcgttctgacacttgttcttgttgttttttgcagaatcaggaatcaaagaaactttcgtctatccaagatgagaatgaatttctccggatgcaggttagtcttgcattgagtctgactattcagtcaaggtttatgccattaagttgtctaactttcttgattcgttttgtaaaatgaaggctattcaaaaccgggcagaaatggaatctcttcagaagtccttaagtttttcacttgacgagaaagagagattgcaaaagtaattcactgcacacactatacatttcattttcagggtcaattattaagcctcagctcatctctttggatttctcttgcaggcttgtcgacaatttgtctaatgaacttgagggaaaaataagatcctcaggcatggttggtgatgatgatcagatggaggttaaaacaatggttcaagccattgcatgtgttagtcaaagagaagctgaagctcacgagacagcaatcaaattgtcgaaagaaaatgatgatttgcgccagaaaataaaggtcttgattgaggacaacaacaagcttatagagctgtatgaacaagtagccgaagaaaacagttccagagcttggggaaagatcgagacagattcgtcaagtaataatgcggacgctcagaacagtgctgaaattgctttagaggttgaaaaaagtgcagctgaagaacagaagaaaatgataggaaacctggagaatcagctaaccgagatgcacgatgagaacgagaagctaatgagtctgtacgaaaatgcgatgaaggaaaaggatgaattgaaaagacttctctcttctcctgaccaaaagaagcctattgaagctaattccgatactgaaatggagctgtgtaacatttcttctgaaaagtccacagaagatttaaactcagcaaagctgaaacttgaactggcgcaggaaaagctttcaatatctgcgaaaactattggagtgttctcttcgcttgaagagaatattttggacatcatcaagctgtcaaaggaaagcaaagagaccgaagaaaaagttaaggagcaccagtctgagctaggatctatcaaaactgtttctgatcaaactaatgcaagaaaggaagttgcagagaaaaaattggccgctctcagatgctcactatcaaactttgcatcatcagcagtttactttcaacagcgagaagaacgagcaagggcgcatgtaaactcattttccggttatctaaaccagaaaaatgaagaactcgatgttatccgttctcacaaaagagaaatcgatgctgctatgggtaagatccaacaatctgaggcagagctgaagagtaacattgtaatgctgaaaataaaagtggatgaagagaacaagaggcatgaggaagagggtgttctttgcacgatagataacattctgcgtacaggaaaagccacagatttgctgaaatcccaggaagaaaaaacaaagctccaatcggagatgaagctttctcgggagaagcttgcttcggttagaaaagaagttgacgacatgactaagaagtctttgaaactggagaaagagatcaaaaccatggaaacagagatagagaagagctcaaagactagaaccgaatcagaaatggaattggagaacacaattcaagagaagcaaactattcaggagatggaagaacaagggatgtctgaaatacaaaacatgataatcgagattcatcagcttgtctttgaatcggatctgagaaaagaagaggcgatgattataagagaagagcttattgcagaggagcttagagccaaagatgtgcacacgaatatgatcgagagagtcgagaatgcgttgaagacactggagaatcaaaacaatagcgtatcaggcaagattgaagaagaagtagaaaatgttttgagtttagttcacgaagcctcgaggttgcttgaagtttctcactgatagttcacgttagagactctgattgctgtgtacgaaatatttttcgttaaccataaatcactaaaacagaaaaaaagaaaaaaaagaaaagaagttactattaaatttctgaaatatgtaataacttggttatggatgaggatgatcacaggacttgaatcttgagcttgcatgaagctgtgggaagctttaacagatcctctgtgagctgcatctttttggggtcatccaatgcagctgcaacgttgactttcataacttcaagacaatccatattcagtaagaaatgactaatgtgtttcagtacagttgcacttccttggtactgcatgatacgcagtacctttatttggttattcgggggaattggaatccctacaaaccgatgtcttcgtccaaatgtgtaacgatgcagatcctgaagcatcaagagaagatactactttaatcacatgtcacaatcatacatataaatgaagatttgttcagggttttcttcataccgagagaaccagagtttcaaggtttggagaattctctagcagaagaggcagaagcactctccaaccttcctttttactcgaaaacactaactcaacaaggttgttgaacattggtagtccacctttgcagtatacggaaatcacctgataacacacacacaaagaatgtttgaacttggacagctttttaacagaaagaatcatgagagacgatacattaagaacttacctcgactgtagaacaagtcaagtgaagggtcttgacgttgcatatctccctaatgagatttttcacatcagcgtcattttgcacctcgcgattgttattttctatgaaatgaaggtccaatgtaactttcgcaagtgaatctaaatgaaaaagtggagcgttatgccgaggggaatcagagtagtagaggtcgacaacacttggcgtgtcaagtgtaagaatataaccagcaccataataaccactgttaacgctaagtgaaagtttcttaatgcttttgctggatatgacgcatgggtgatacgtgtgatgtatggttaagtcctcaagtgcagggcatgcagcgagaaacacattagataattgatcatcccgaaacaagattgaatcaaggagcagaacctttagtgctgggagagatgtatccggaggaaaacttgggcagtatagtctcgatcccaatgacagcttaaccagtgttgagctgttgaaaactttagatgggatagaaaacaaccacggccacgattcatgcattaggtgtagatgaagttcagagacaccgtgttccagggcattacaaatccagcggtcaagtacgtgatattcaaatgttttaattttagtatgaagtgagaacttttttatatgtttaccaccttgaaaagctaatgaactgtccacgaaatcattgaaactctttaggatatcttcggggcgcccggagatgggatcgtgaaagtcaagattatcactgcgagtaaacagagtcctccatctcttggagagaacagaggttgaaacagcctctttcgtgggaagtaaatataagatttggacaaggagatcatctggaagacaatccattgaaaccacgcaatccatagagacagagtttaagacagtataccctaagggtcaacgcttcaaggttcagtttaaacccaaaaaccctaaaggttgaactttcaagctttctctccgggacataaaagaaaaattgtatacaatacttagatggtgctattggtttatgatttcagaagagctttaatgacttaaattatcatgtacaatctgttgttattcaatcaagatttttttaaagtaggttaaagttttgtgttattcatttaagatttgtaaaaagtaatctaaaatctttataaatttgggttattggattcatactcttatcaagtcaataaaagttttgtattattcaataataaaacaaaagaatctctgattattaattatttaaattattatgttattgaggttcatgactttctatatttttcttcacaaaataaagtcataaaaagtattatcaaaatagagagattatttaaaaaactttacaagattatgaaaaactaatcaacaagattataaaaaaaactctctaacaatagtgtagaattacaaatctattgtgacaaaattgctcttggtaaggtttttctttgtgttgggatgataaatgctatatctggttcggttcaatgtggcaaaccaacttatttccggttcaccttggttgcttccaattacaaatcagatcttgtttcttattttttttctaatcattactataaaaagagtcgaagctatataagcttctaaaaacgtacacataagattgtaatcgagtaatcgcggttagccatcttactatttaacattttttaggttctgatagttttttatattaaaattttagtaaaaagaaaaaaaattcataaataaatatttaaaaatatgcaaatattcctaattattatcttatgttaataaaaacataatataaaaataatcctaatgtaaacgactaatcgcggttggccatctcactatttaacatttgttaggttatgataattttctatattattttttttacggaaaaagccataaataaatatttaaaaatatggaaataaatatttaaaaatatgtaaatattcctaattataatcttatgttaataaaaacagaatattaaaataatcctaatgtaaatttttaattttgtaaagattattatatataaaaacaaaaagtctaaatatatgaaataattatattactatttaaaaaattttagattatgataatttccagggagattgacaaaaatagcatttcttttgaaaaatttcacaaatagcactacaaactttaattaaatactaggttataaatccacgccacgcgtgggtctatttttaaaacttttaatgattttttgtgtaactaaaaatatttactgaaaatttgagatatatgtttagtatgtctacttattgttaataatttaaatttcttgagttttaaaattaccaaagcaaataattcaatttaaatacataactacaaagaactctaataaaacttttaggttttacaacatttatcaaaagaacatttttggctcatattttgttaaatgttgtaatcgttttgatattttggatgatgacatctttttacgtaagacattttgattgagtctgatgaaataaattgttgtatgaagaataatttcgacgtcgcaaattcactattgttttttttttttgtatacttcactagattagttagtataccttttctttcttttttgtcaaaggtttgtttttcattccattaccaaggaaaccaaatacaaagatggaggggaaatgaattcccaaagtttagaacatcacaataaagggcataccccaaagaaaacataagataagataacataagaaacataaagggatagatagggttaatcgatatcaaatccttgagggctttgaaccaaaagctaggtaatttgttggtgcaagtgagatcaaaagaaatcgacaaatcttccaagagcaaatcaaaggaagaacaattcgtcattgtcaagagacgaagtggcgttggtgtaagggtcaaagacgtgaaactcggcggcaccaaacaaactacacgaggtagtgctttgacaagggctcgagcaaagacggtactccgatgcgtgaggttgagaggtagagctgccgtaagatgagactggagcttgggcaagccatagcgaatggaagtagtgtagagggtgaatggcttaaagtcttctagagagcttgatgaaaggtagtcatttggcaagcttccaaaaacactatcaaaactcccgcatgtaagattcaagagcaatagaccagggacttttaagcaactaaacacacacctcaaaccattagaggaagcaaaaacaaggattcgtaaatgtcgggtaataaagcgtaacaaaacaggtgggttctctcccacatggagttctcggccatggagattaagaaatccatacaaagtttgtcttcggtttaacccagagagatgataaaaggacatgggcttcaaagttttgagagtgttaaaggtatcactaaagatgatagatggcacatgaatgagttcagtaaacaagggatatggagataagaggtcgaggaagttacggtaatcaccgctccttggagccgggatcataatgtcgttattcctcgacaaattcatttggccttaaacatggttgctaaaaacaaaagtaaaacccctaggtgattctaatggccaggttatcagacaaagtttgaacccacattgcaacaaagtgtgattaggatccaatcggcgtccatgaacaattggttccatagatcgacacaacaatttgcagtgaggaatcggagaagagataaagcagaacctggtcttttgcagaagaaggcgtggaaagcaccttaaaggggtgggtctcaatgaacgaaaatatgggcttgagcccaataggcgagaaacaagatccaatccagaggcatcttcatatgttagggttgcgccgccccctggttgcagtttccggtgagaaacggcttcatgggaagacgagagagatccaaccatagcacatctgggcaggccggagcaaatcgtcacagttgcgagtatggagtctcgctgataaaggatggctcctcgaggttcaaaagcgatggatagatcgtgggttgagcttggcaagggaacggggttgccgggaaacgtctcttagcttcaacatccgaagaaacatcaaagagctttggattaaaggggaataatggggctgactgagataaaggccaacaatagcgagatacaggggatttagaagagccaatgaaagcagagaaacaaagatcctgacgccggcaagcataagctttaccggcgccggtggaggaagccaagagaataacctcaataattggatcatggaggatatttctgaagcttttgttagtgaatggtacgaaaaaattggtcgacttaagatatgattagtataccttttctaaaaataagattctatacaaaatatattcataagcttatctatacgttttttaacaactatactttttcacatgttttttcaataattccgtcttcacatctttttcgaaagagctatcactctttctatctttttgcaaggactcatttatttgttttcttctttcatgttgacgtatatcaaattaccctaagaccactctctcaaataagagatcgtcaattgtacttaaggatagaatttcacaaagttcttttgttcacaaaatgaacctaagtattgagattaagctagatgagtgtaagaaaataaaaacatagtaaataagcaaatagcaggattggttggttgtaaatcaagctaataagatgcttgggtttagggtattctcattaaacaattgattagtagatctagatatagctaggttgttatcaaaccgttcttaaactcaaattctaatatcagaataactggtgatgttccgtgaaactcactatgcctagagctaaaattcccggtgttgtgccgtgaaatcctataccttaacacgcatgctaaacgagttcgataagttcaccttagtagataagccgattcttattacacacctataaaccaggctcatcaaatagtagttctagtaacagatacctatggtgggtatatctattatctcgaatcaagttctagttaattactctagaactagtattaagaacaactaaagatgaagaattctacagataacctagaaaaggagcaatctactaaatcatatgaatccctagtgagaaatcttaactctaacaagcaacaacttagacatgatagatgaaacaaacaacatgtatgaataagaaagtataaacaaatcaatagagaaaagagttagaaaagatctcttcactagtaatgaaatctctgataaaactctgaaaacaggggatgaatagcttatgaaagtactctggaaaataacttggttgctaggaaacttgataggtctaaacaatgacctttaaaactatatatatgacctaaaaaacatgtagggactaataataaaaatagagaagtcttctggggcaaatttctaattcttcaaacttaaaagcgtcatgaacttctttcggccgcaactggtgtcgatcgacacgaagagtctgtggatcgacactatcaactggatctgaaagtgaattcgtcctttagcttcttttcttcagcttttgctccaaaatgtcttctcatcttcattgttgtccttctccatagaatacctgaaaagactctaaaaagactctagaaataacaaaaagactcaaaactctatatttaaaacatagtttaaaacactaaaaatagggttatatcacatacggtgtctctttccatcctcttatgattttgtctatgcagtacgtgtcataccttccaaaattttcacatgcttcatatttcttcttcgaaaatccatccctttcttcattagtaattttcttttgagctcgtcgagaggtagttaagtcaagtcaataaactcttcgtttgaatttctatgaaattttttttcttgctctatattgtttttttttttattattctaataaaaggttttaacttctaaattggttaactccatcacttctctcctttgatgttgcattttagattctcttcaccttcacgtttcccagactaaaagacctcatcttatatctttgagaacttgattcaaattgatacgattagaaaacaccaccatcaaaacatgtccttgttgctttaacgcttcacagaccaaacacaccttaatctctcttcacttcattttgttttgaaacacatatttcacatacttctttcctacggtgtctctttccatcatcttatgattttgtctaagcagtacataccctaccttccaaacttttcacatgctccatatttcttctttgaaaatcttttcttctccttgttagtgaaagcctttttcaaactcgtcgagagtatctgagtcaaatcaataaattttcctcaagaataaaatcgttgttttgctttattgttttctattattctaataaaaggttttagcttctaaattggttcttaactttatcacttctctcctttaatgaggcagtttagatcctcttcaccttcacgcttcccagactgaaaaacctcaacttatatactctgaaactttattcaagttgatatgacgaagaacaacattatgaaaccatgtccttgttgctttaacgctttacagaccaaacacacctcaatccctcatcacttcaccttcttgtgaaaaaactttcacatacttcttttttcctatggtgtctctttcaatcctcttatgattttgtctaagaagtacgtgtactactttccaaacttttcacatgctctatattttttctttgaaaatcccttcttttccttgttagtaaaagctttttcaagctcgtcgaaatgtatcgtagtgaagtcaataaactctttgtttgaacttttaagaataaaatctctattttgctctgttttgttttctgttaaactaataaaaagttttaacttctaaattggtttttaactttatcactttctctcatttgatgttgttgtttaaattctcttcaccttcacgtttcctagactgcaatacctcaacttatatattctagaacttgattcaaattgatacaattaggaacaccaccatcaaaccatgtccttccaaaatttaatgcttcacaaacgaaatacaccttaatccctcttcacttcaccttcttgtgaaataatctttcacatacttctttcctacgatgtctctttccatcctcttatgattttgtttaagcagtacatgtcatacattccaaacttttcacatgctccatatatgttctttgaaatcccttccttttcttattagtaaaagtctttttcaagctcgtcgagaggtaccttagttaagtcaataaattatttgtttgaataaaatctttgatcggctatcaatgatccatagatgtttatttatatagacaccatagctttattattttggactttattagtttctttggttgttaagaagaagttttcatttacgtcattaaggttttccttttcgtttaaactttaattttcttaaactttcgaaaaacttctgctcgattatttattactatctttctgtcaatttttagaaaactacttcttttatttcacaaaaaattgttcgtgaaacaattcctgaattagtgaaatctttcctgaattttgtaaaatccttcctaaatttcggaaaatgattatttgaaagattacacgaaattcagaaaagattttacaaaattcaggaaggttacaaaaaaaatatatattttgaatttcgtgaaatctttcttgaattgcttagaatcttttttaaaaattttaaaatccttcctgaatttctttttttggcaagaaaatgggctcgtaatttgttttggcggaatttttttgacagaattatttttgggggaaaacgattattggaatttttttgatgggaaaatattgtcagaaatattttggcgggaaaatattgtctggaatttttggtaatgaatttgtgtattttttggattttcttaattgtttattttaataattaaaaataaactaattacttgagtgttatttatatctaaaaaacttttgagggattttcaaaagtactattttttactactttttgcaacaatatccttttttgttgtctatttttaaaaataccctttttcttgaataaaatgaccaaattatccttatctaatgagcacatgtaaatagaaacttaaatttttccgccaaaaaattttggcaccaaaatttttttttgcgcaaaaaacaaattccgccaaataatttttcccgccaaaatttgtttccataacaaattttttcgtagccaaaaaatacatttgaaaatccttgtaaaatttttgagaaccttttaaaaactctttaaaaaactttgtaaagttgttaaaaagctcttgtaaaatcattctaaaacctcttaaaatttttataaagtctttagatacatatgtaaatactttaaaactccttttaaaatctttgttaattattttaaaaccttttacaatggttataaaagatttacaagagttttaaaaggatttacaaggattttaaaaaaattataatctaacattttcaaaaatttaaaacactcacaaaaagttacacgaatttttagaaatttacaaaaatttacatatctctatgccttacgttttaatcacttgaatttacacccttataatctgctattgcttgctttatttttttttttactatttcgtttagcttaatttcaacactataacctcttgtttggacaaaagaatttagtagaaatcgatccctaagtattacagctgacctcttatttgagagagtagtcaaggagaatttgaacatgtatcactttgctttcttgtgttttcggtataccgacattttgttacattttttcagttttttgtgtctgtttgatttggtcgtcttcataatatttagttgagagatatgcgcttaattagctgccacattgacaatgatgggaaacaacatgagaataacaaagcttagcttgtttatatggagaggttcaagtgaagcaagtgtggagtaaaaagagaaacagacactaagatttataaaaacaagaaaatagtttctcatctttgatctctctttttgtttttttggggggctaaaatttatcaaaaagttgtttcttttgtttttgctgggaaaccaagtctcaagataaactagagaaaaaaagaaagtacacaatattgcatagttagtctgcctatacaatatgcccatattcatttaaatttattctaaaatatttaaaactcaaggtcctgaatcaacaatttggttatagtgtggagccaagctaatattctattataaatggaaaaaaaagtgagaattttgagtgaagatcatgaaacacatggagtaacaaagttcccaaaattatcagttatttgataagcattggagagcttattttagaaggagaatcgaagatgacgtggcaagagagaagagtctgtacgaatgtacctactataaatagtaagagagagtagagaaaaagatatcttgcgtgatcattgttgtgtaaagaggattaaagcttcatgtaactccaattaagcttatcaatttaggactttgattcatttgtaattggattaacggataagaaagacaaaggattatgtttccgttcttatccattattcttccaagaagaacagattttgtgatacattttgtaaagattcatggccttaataatgcttataattgaccggaaaaaagttcatagatgaacaaaatcatataggcaaattagatggacgcaaatcataacaacgttctttgaagaactaagtcatcaattattattaaacacaaatatcaatagctaaatgaagaccaaagacctaagtcttcatcagttcaagaaactcactctctccaaaacagcttttgcacaaaatgctttcaacttttctacgatcttctctccttcttactttaacgatcgaatgactcttttctgctaattcattaacttcctttatggatgattatgatcccatgacttgtatcttgaccttagatgaagctgcgggaagcttcacctcatcctcagtgagttgcatctttttaaggtcattcatttcagttgcaagataaactttcaccacttcaagacactccattttcagtaacaaatggcttatgtgtttcagctcggttgcacttccttgatattgcatgaaactcagcatctttattttgttattcgcgggaatttgaatccctacaaatcgatgtcttcgaccatatgtgtaacgatacagatccttaagcatcaagagcatcgagaacactttagtttcatgccacaatcttacatataaattaagatttgttcagggtttgtttcacaccgaaagaattagagtttctaggtttggagaacgctctagtagaagcggaagcactttccgatgtcgttttcgactcgaaaacattaattcaacaaggttgttgaacaccggtagtccatctttgcggcataccgaaataacctgagacaaacacaatgaatgttttcctgtttctaatttaaatttgatgagaaatcatacattaaaactgacctcgacagcggaagaagttaagtgaagggtcttaacgttgcgtatctcactgatgatatttttcacattcgcataattttgcaccttttgatagccatatcttaagtaatgaaggtccaacgtaactttggcaagtgaatctaaatgacaatgtggagctttacgcctaggaagatcagagtagtagaggtcgacaacatggcgtgtcaagtctaagaatgctagaatgattatgtataagacaattataataactattatcaatggtaagtgagagctttttaatgcttttgctggatatgacgtatggataattcatgttatgtatggttaactcctcaaggacagggcaagcaggcagaaacacatcagagagtatattacccttaaaccagattgaataaaggaagagaatcttaagtactgggagagatgtctccggaggaatttttgagcacactagtcctcttcccaatgacagcataaccagtgtggtgctagtgaagaatttgtaaggtaattcaaactgcgaatttatgcatagatgtagctcagagacaccgcgttccagggcattacaaatccagcggttaacaacatccacgccaagtccaaatgcatataattctctactttttagtgagaacgtctttatatggccacggaaagccaatgtcctctctacgaaatcctcgaaactcttttgaatgtcaggcctataccgatgataaccgtcttcccggtggaaaaggatgtagtcgtcaatgtcaagattatgcacgagagaatatagagtcttccacctctttgagagaagagaggttgaaactgcttgtttcgtggtaagggaggataagatttcgacaagaagttcatcaggaagacaatccattgaagccggattcaactgttccatatcaagaagcttcagttttgagttgttcacttgcttcttggttgttttctatgggaaaggataatggagctctctcggtagggatttaacttttatagcttgtggtcttagccatgtgtcatgatattaattttaaaaatttaaaaattaactatattcagtgtcatataatctgtaatattaaataagatatgagatttaactaaatttacttttaattaagtttccatcatcactaacatttcttaaatttgtaattaaaatgtactttatttttataaaatcaatagtgtttggtactttaaagacttaaccatatatatcctcattttatataggagaattgacacaaatagcactaaaaactttattatcccaaaaatagcaccttcttttgaaacttccaaaaatagcataaaatttttttaatcctctataaattaattaaataaaaaagtttttttattatcatttgtatcaatcccccaaataaaaatgatagcaaacactaatctaatattaaattgaatcaaaaaaaattaaatagtgaaaatatataacctaaattggaaataaaaaacccaaatataataggcctgggcacaagtactcgctactcggcttactcgctactcggttcgtattcgccttgaaaattcaagtactcgtcataggcaagtcaagtaacaagtcggtttattttattacttgcaagtgcaagccaagtatcaagtatcataattttttttgatacttgcctcgttacttgcctcattttgatacttgccccgttacttgcctcgttacttgcctcaatttgatgcttgtctttttacttgctttgttactcgttatttgtacatgtgacttgtgggatcagtaataattaagtctggatataatttttttctattacttaccttgttaattgttgagcattgtatacttgttactaaaatactaatgcttaaattattataatagatttataattttggtttggcctataaaagctaaaaatttaaatttattgtaacaaactcattgaccttaaatattatgtatgaaatagttttttttattctaaatattttaggttcaagtaaaagtatttaattttggcaagtaagaaggcggatcaagtaacttgcaagtaattaaaatttagacaagtacttactagatcaagtactcgttttaataaagcaagtaacaagccaaaaatccaattacttggacaagacaagtcgagtcacaagtacctccaaattggcaagtacttgccttgtgcccagccataaaatataatactataaactaattttaaaatgaaaaatctcttttaaatggtgaaaatatataccctaaattggaaataggaaaacccaaatataataccataaactaatattaaaataaatctaaaattcttttaaatagttgaaatatataccctaaattggaaatagagaacccaaatataatattttaaatttatttctaatttattttggttgaatatattttatataaaattgtggtattattattgtccataaaacttgttttagtgttacttttaggaatttctcaaataattatttgagtgctatttatgtctaaaaaacttttttatgctatttttgtccaaaaaacttaaaattgtgctatttgtgggtctctaaaataaactatagatcattgatcataggcatccaatataaaaattaatgaagttaaaaaagttttttaagaaatgttagtgataatggaaacttaattaaagtaaatttagtaaactttactttgactttaatttttgtttgtttcattttttatgatctcatattatttaatatttcagattttgtgaaactaaaaataaatttataattaacgtcatgccacatggtaaaaagtaaatttgaaaaggaaaccaatcattatacgtatttataaaaccccattatccttcacaaaaacaacctaacaacaaatgaacaactcaaaatcgaatcttcttgatacggaacatggagataaagttgctgaacaaatgaatctagcttcgatggattgtcttccagatgatctccttgtccaaatcttatacttccttcccacgaaagaagctatatcaacctctcttctctcaaagaggtggaggactctgtattctctcgtgcataatcttgacttggacgattacatcttttggcaccatgaagacggttacaatcagtactttagtaacgacattcaaaaaagttttgaggagttcatggagaggacattggcgctcctaggtggtggccatataaaaacgttctcactaataagtgatgaaatatatagatttgaccatgtagtggattctattagaccctggctatattataacctacaaaaagattctttgtggcagtttggattcccatacaaagtcttcaccagcaccaaactggttaagctgtcattgggaacacgactagcctgcccaagaattcctcaagatacatctctcccggtcctaaaagtcctcctacttgaatatatatggtttgaggataatcaattatctgatgtgtttctcgcagcttgccctgcacttgaggacttaaccatacatcacatgtttcgcccattcctcatatctagcaaaaaccttaagaaactctcagttaccattaattttagctattatgttgatcgttctacaattcttacacttgacacgccgaatgttgtcgacctctactactctgattttcctcggcctatagctccacattgtcatttagattctctagccaaagttgaactggaccttcattccttagaagatgatagtcgccaggtacaaaatgacgcggatgtaaaaaatctcattagtgagatacgcaatgttaagacccttcacttaacttattctgctgttgaggtcagttttaatgtatatatggtctctcatcattttttggttaaaagtaggacgacattcttttttgtgttttttcaggtgatttccatattctgctgttgagttgatgctttcaagtaaaaaacgagactggaaagtgcttccacttctactagagcgttctccaaacctaaaaactctggttctatcagtaagaagcaaaccctgaacaaatcttaaattataagtaagattatggcatgaaaataaagtgttctcaataatcttgatgcttcagggtctgaatcgttacacatttggacgaagacatcgatttgtggggattcaaattccctccagtaacaaaataaagatgttgagtatcaagcagtatcaaggaagtgcaaccgagctgaaacacataagccatttgttactgaaaatggagtgtcttgaattggtgaaagtttatcttgcaactgaaatggatgaccttaaaaagatgcaactcactgaggatgtggtgaagcttcccgcagcttcatctaaggtcaagatacaagtcatgggatcataatcatccataaaggaacttaatgaattagcagaaaagagtcattcgatcgttaaagtaagaaggagagaagatcgtagaaaagttgaaagcatttggtgcaaaagctgttttggagagagtgagtttcttggactgatagagacttaggtcttaggtcttcatttatctattttttatttgtgtttaataataattgatgacttagttcttcaaagcatgttgttacgatttgctaccatataatttgcctatatgatttggtacaaaaagaaaaccataaaggagaatgaaaatcttacaaaacaagagttcatctattagattaaaagattttctcagactaaatgctatattgcatgattaaggcaaaaaactttctatttcttaatttattttttgtaatttatatcacaatttaagaataaataatagtgtaatattgaagttgttttaaaaaattttgaattagtaattacgtttatcaaataaaaagtgttacttatatacttatatatacaagctcacctatcaactttctaattcatatcactatttatttttatttattttttaagaagatttctaaattctcaaagtgttcattattaacacttcatccaagagaattgtacctatgctatttctcttttctttggtcaattcaaattcttaaattctacatcttcttttcatgtcatcgactcctctttccccccccccccccatttcttcataagaatacattgtatcgcaaatgtctctaattagaattgtatctttaaagagggaatgagcgaaagctgccaactatttcttcatggcatattcaagtggtgtaagcaagtttagatcaatgaaaaatttagatatatggaataagaactgacaatgtaaacacttaaattattaccaaataagtattcagttttgtcatgtattgcaaaacaaggatttatggaattcaagtagtattactcatatggtggtatttgacatcaagataatgatgtctttcctcggctatttgttccttcatttgttgaaatttcgcaaaaaaaaaaaaaaaaaaaaaaaagaagacatataatgagattcaagaatgtgaatatcacttactacaatttttaataactaattagttaaatattaaaaaataaattaccacatccttgtagctagaaaattttgaatggcttttcatccgctttttaatttttttaataaatgtcttcataaaaatcatcaattttgtttataataagtctacaatttaaaattttagtctacatattttagggctgttgaacatgatttattttatttcttttcaacaaaatatttttaaattctttctatgttaacatagtcaagtgttaattagttttaaatatataggtatattaagttgtaatgattttgttaaatatttatagattagaagtattagaagacatcaccaagttacaaattatcagaaatgtatttttttgtcaaaaaatgtaaaattactttctaacgaaaaagctattttacaattaatacttgatagtgcgctgagttttaaaatttaaaacagatgtagaggattagaatctattattgtaaaagtgaatactaatatgattgatgtgacttattttaatgtgaaaagaaaatttaaacaattgctaaagttatatcaaataactctaacaatctttgtttttgatctaaatgtgagttaacattacaaactgttattgatgttttatgttttagcgactttaatttagatattttgcaaaaaaaaaaatttaaaaaaaaagattagttcaatatatttattcatgattacttatgtttgtctccttatatttttcatattagtttttgagaaacttttggtaggagatgttttatcattatcaatcatttgcttaaaaatgacatggatgttgagctaccaataataaacaattcatatgtatatttaaaatatatggtgtcaaatgatatctaaaacagtttgaactgattggaaattatgaattgaaagagctatagagttggtgtagtaattatttgagaattttgtgtttgtggtatctaaattcataagagacgaacaaagttcatgtggtttgtggcataatgatcacagaagcagatgaattttaaataattaaataaattaatttttattgtaaactattctattacttaaacttgcataaagaaatgaaaaacattgatttttatgatgaattttacaataataatgaattcatgtcgtactcaccaaaaaaaaaaatgaactcatgtcgtttgtggcccaaacgtgtgaaagtcgccgacctcccttaattatatgatctctctctttactttcgtctgaattattagaagtatatatctatatttaatatatttttgtacgaaaagtgaaataattgggtgagaaatggttattatgggtggttgaaaaatattcatataatgaaattaagccgacgcagatagtgaatgaagaacaataaattaaaataaaaacattacatgaatgttaaagtttctctacaagacccacgagatccacttcacttacgttgacggtgttggtccttgttgtgatcatctagagccctctcattgcataaatttttgtcacaatcaaaattgatattatacaaaaattgaacaatcaaaagagagtcagagaaaaagaggcctgcgaaatggacgactccttcatccattgagtgagaaaaacataattctttatcaaataatagattaaagtgagtttgaagaaacaaagcttccaaagtgtatgtcacaccatcaacaatggcaaacagccgcatcaaatctgtgtttactgcactatcaagagaagcctacaaagagaaaacaattttttgaataagctttcctgattaggaaagtaagaggccaagtgtagttgtaaatctttgagaaaacacaaatatgcacgaatgatgagactgacctgcattgtgtatgaagttggtcattaacacaaggcttaaagcttgtgtaagagttttaaacttaatgtaggttagaatttgatcttaatattatgttttttaggcgacaaaaacttataagcttcatttttatgcatatgaatggtgattaaggttaataatactaaagtccatttcaaaacatagccaataaaaagcaattatgtgacttaagtaaaatgcgccaaacataattttttaaaaagttttttagcgaattatcaaatttgaattcataaatactaaaacaaaaattatgtaaaaaaatattaatttaattagtttgaaaaatatttagtttcacagcattgcataatttattatattaactagattctgacccgcacgttcgtgcgagattttatattataagaaatgtgttgtataaaatttacattcaatatagttttttttggttttagtcatatatattgtagtatatataaagaaaattgttgattgttaattatgtttgtttatgacataatagctaatattgtgaactataagtcaaattgtagagttttaaactgaaaaatagattagaaatatcttagatggaaaattatcttaagttatagtgatgttaagtattgttatataaaaaattatggttagaaaattgtaataaaaatttgtgttatcgatggtaaaacacaagttagttttgttaatgtttatttttcaaaattttaatggtatgtatgaactaagaatttgtgttaccatgttaaaatatttaaataccgatgcattttttgtatatgtgttgtgggcagtgttttcacgccagacccggaccgcccggtccgaccggttgaaccgtgacccaaacacttttctggtttgggtttagtgctaaaacccgacaaattcaaacccgaaaaaactcacaaaaactcatcaataacccatgacccgttgaactggccgggtgtgggttttaaaatattctctttattttggaatataatataggattttagactttattcaatcatttttataaaaaattcagttcctaaactcatttgatgttttacattttgatgaatacttcacaatgccgccttaaaaaatgaatcgaatggtgagtgagaaacccgatattagttgtgtaaattcacgatgttttattagtttatttccgacattggtgatctcctactatatttgttatggtattagacgtttagttggatttaataaatttaatcactttattatttttatttgattatatatatatatatatattttttattttattttggtgtaaatgaatttatattttattaaatataatctgattttatattttataaacatgattatttttgtttttaaatttataagaactctaaaatctctattaatattaaatttattatataaattttaatcacttgacccgtggtctgacctgcttaactcgatgacccaatgacccagaaggtagtccggttcactatccgggtcgggtttaaaaacattgattttgggctatatttaattggctgcttgtaaatcagtattttgccaaagtaacttaaacaaaataattgcaaagagaaaactttaatatcagtaaacatattatctatagttggcccatgtagaacttgtaaatttttttgttagtatggattcgattgcaaagctgaactaagtcctgttttctatcattgtatgttaatttttttttatgcatatgtatagtaagaattctctgatttaaatgattcttgttatgtcaattaacaaatccgcagaatatgcttcattttgaaggatagtaatctttaaattttaattaaaagagaaaatatttgaattaatgctagaattattttctagtacaaatctaaaatccaaaaagtatttgttgaatatgctatattttaaatttaaatgatggtagtttagattatatacaattttgaattaagtagtttgatttgttatggaaactttgttaaacgatttacaaaaaatattgggtagttattcatttattgatttaattttgaatttgtgttttttagttggtaaatggaaaaatatcggaaaatatttataacataaatattattaattatgttatatttaccattaatttgatatagttggtaaatggaaaaatatcagaaaatatttataacataaatattattaattagattttattgttaaaatattttgtatttttcaattaatggtatttgatttatgttgaatttttttgtttaatctctaacaaattgagaaatagaaaatatttcgatttatattcaaaataaatatattgatgatgaatattcagttataatttaataaattgtaatatttgttaatttactaaattacccatataaaagttcatttagttagtattaaactaccctcacaatgttgtagttcacaaaatgtttcccaattaatagtataaattcaaactcacgcaatgcataagactttttctagtaatccataattttggaattttttttactccatgtatatatatttgatgatcttcactcaaaattcttacgttgttcatttataatagttattggcttggctccaaactataaccaatttgttgattcatgaccttgagtctcaactattttagcataaattctcatgaattgtctacttgtgtgatatccaaacaaagattgtctcttaaagctgtagttgatcttctgcattaaacacaaactaatctatccctaatgaaatgagaaaaattaaaaacttaagacccacgcatcaattaagatccgatttgtcttgtaaccgaaaagcaaccaagttgaaccggtgagaagttggtttctcaaattgaactaaaccagataaacaagttccaagttccaagtgatttcagatcataacttacgtcttatgtgggacaaaaaccctaaaggtttcacggcgcaagttagcaaccaacaaggtgctaatcaagttggacatttttacgaactcaaattaagaaagtttatttcattattccgggatcataacctaaactcgacagagctggataccaaaaaaaaactcaaaactaaaccgtggaggagaagttgctggtggtgtgcgtctttgtatccctttgtttatttattttaatttgatgaatggtttttctatctatctcttggatattaagcttgaaccaccaaaatcaaaagaactcaaagttgaacaaccaaatttgtgacgtatataagaagtcactgattgtttaaagtctttgtatatcgctttattttgttttcagtttgatgaatgacttttctatctatctattggagagaaagctgagacggtgtttctgagcttcatctacacatgaaaagtacagggtggtatcgttttccatcccaagtcttcaccagcacaacactggttaagctgtcatcgggaacagaacaatacatacataggttttcttcggatacatctctcccagcactaaaggatcaattttctaatctgttttagctgcttgccatgcacttaaccatacgttaattttgaggacactcatacgtcatatctagcaaaagcattaagaaactctcagttaccattaactatcttaattgtgtttataactctagcattcttacacttgacacaccgagcattgtcgacctctactactctgcttttgtcatttacattcacttgccaaagcttcattggaccttcattccttagataggcacatcaacatgtgctagatgacacgaatgttacaaatcttatcagtaggatacgcaacgtcaagacccttcacttgacttgttcagctgtcgaggtaagttcttaatatattgtctctcatgattctttttgttaaaaggtgttgtcgaggttcaaacaatattctttgtgtttgttttcaggtgatttccctatactacaaaggtggactaccaatgttcaacaaccttgttgagtaaaaaggaaggttggcaggtgattctgccgcttctgctagagcattctccaaaccttaaaactctggttctcggtatgaagaaaaccctgaacaaatcttaatgtatatgtatgattgtgacatgtgattaaagtagtatcttctcttgatgcttcaggatctgcatcgttacacatttggacaaagacatcggtttatagggattccaattccccgaataaccaaataaagatgatgtgtatcatgcagtaccaaggaagtgaaaccgagaggtattctggataggcgcgtcttctccacgcgtccccaaacacttttctcccaaagcttttttctgcgacaaccctaactccgccgcatcttgcctctctggtgactggttgcgaccagcgccgtgagagggctcacaatgatttagttcacttgtcttgttctctggagcttgaagcggtctttgggttgtgttttgctcttaaacgcggtgagtgggaggagttgatttcagatctgcgcttctctctcggtggaagctcctttgtgtgcttcgatcttgtccttcgatgtctttgggtggaggatccgccgctcgatctactatcaccggcggttttgggctgcttctaaacggattcatcgtttgaggacggtggtgtctcaaaagttgttgcctctatccccgccgttgtaggtcctcttcgtcggtcggagcttgtggcgtaaggagtggtcttcggtgattgtggtgaagctttctcgtcttgatgccttgattgtccttcaccctctttggtcactgtggcctcggctactcttgtcacgcttcttcagataggttttcagagcaatgctttttcgttagtatttttgattgctagcctcgacgttatgacttgacaattggatggtaacttctctgttggtcaattctgctaatggacgacatcagaacttttaggagagtttccgttgtggtgcgtcaagtgtgtggcttcgtcatgggcttctcaatttgtgccctcgtgtagctatgatggttattggctttgataacggtttagcctccagtggaggctgtttgttgtcttcaattgtaatgcggtccctcttcaaaactagagattgctagaacataagacaattggtttgggtagtaatgactacctctttttgggtttttcattgatttatatggaagcaaattggaactacacgttcctacaaaacaggaagcaaataacaaaatggaaagtggaaaagagaacatgtcatactctgatcctacaaaccaggaacagagaagaccagtacttattcaaccaattaataaataaaaaaaacaaaagacttagtcgttgtacttcgggtttggttttctcccgtgtgttgacttcctcctctcaacgacttcatcttcactagtgacgaccccatcaatacccttcccttgaagacgaaccttgtcctcaaggttcaagataaactcaggaaaactggcctcaatctgatcttactcttccaaagtagcatcttcaatgtttagttcctcccattgaactaggagatcagcaacccgctttgtcccatgagtcctccatcgtacctccaagactgtcgttggttgcaacttcaattcgccattgttacgcaagggtggtagttgtcctatatccggctcaccttcaccaacccaaggtttgagtaacgacacgtgaaaaactggatggattcgtgtaccttcaggaagagtgagacgataggccacattaccatgtttcgctgcgacttggaaagggccataaaaacgatgcgagagcttctgtgaactgcggcagaacagagttttctgacggtaaggttggatacgaagcagaacccaatcgccaacctgaaagcagacgtcgcgacacttagaatcggcttgttgcttcatgcggttgttggcggtgatgaggtgctgctttaatttggataacaactcatcacgggctgccatctgctcgtctagctctccacataaagctgagcccaattcatagaccatagagagcctgaaatggagtcattcgcgtagaggcattgaacgttgtgttgtaccaatactcagcccatggaatgaacgaactccatttttgtgggtggtgatggacgaaatacctcaaaaattgttcaatgcaacgattcacaacctctgtttggccttctgtttgcgggtgataggcggttgacatacggagttttgtttctgagagtttccagaattcttgtcaaaacaagctcataaaaataggatcacggtcacttacaatggaacgaggtatgccatgaagcttcaccacatggaacacaaactttgcagcaacggatctggcggtgtaagggtgagacagagggattaagtgtgcagacttgctcagacggtctaccacaaccatgagtgagttatgccctttggattggggtaatccgttaacgaagtcaaatgtcctcccagacttgagcagacactggcaaaggctgtaagagaccggctggtgaaagagaagaatacttagctttttgacatatctcgcatgcagctacatattcccgaacaatctggtgcattgacggccaataatattggtgtgcaaggcggcggtaagtttgcagaacccccgagtgaccaccaagaggagtgtcatggtgctcccttagtagctgcctaatgagcggtgacgacggtggtaccacgatcctgttgtggtaacagatgagaccattttttcactcatattggttccttggtttagctgtggcgagagcccctattcgctgtaaataccagtctgtttcatacaactccttaatctcatcccaaagcgacgattgtggcacgaagatagcatctaaggtgggactaccgtgaacactggacaaagcatcagcggcggagttggtcttacccggcctataagtgatctcatagtcatagcctaccagcttccccatccatttctgttgttccggcgtgaggatgcgttgttccagcaagtgacggagactctgatgatccgtttgtattgtaaacctgcggccgatgatgtaaggacgccatgtgcgaaccgcaattacaatggctagtatttcccgtgcatacgttgaccaagactgctttgtgactcccaaggttctgctcatgaatgcaatgggtctcccattttgagacaagactggccccaattccttcacccgaagcatctgtttcgatcacaaaggatagtgagaagtcgggaagtgtcagtgttggtgttgtcgtgagcgcttgcttcagcttaacaaacgcttcttctacttcagtaccccacccaaattgacccttgcgtaacaggttggttagaggtcaagctatgatcccgtagtcacgcacaaacttgcggtagtacccagtgagacccaaaaatcctcgcagttctgtgaccgtcgtcggttgtggccagtccaacattgctgcaatcttggtgggatccaccttaactccatcacaagatattatatgaacaagatattctaattctttttgcccaaaatcacatttcttatacttcactgcgagcttatgttgttatagaagaaaaaatacctcacgtacatgttgaatatgttctgaccatgaagaactataaacgagtatatcgtcaaagaagaccagaactgacttacgaagcagaggccgaaagatctcattcatcagcgcttggaatgttgacggtgcgttgcataagtcgaaaggcattacgaggtattcgtagtgaccattgtgtgtctgaaatgctgtccttggtgtgtcagaaagatgcatacggacctggtgatagcctgctgtgagatcgagcttagtgaaatagacaactccattgagctcatcgagcatatcgtccaccgtgggaatagggaaccagttcttaaccgtaacagcattcaaggctcgataatcagtgcagaaacgccatgacccgtctttcttcttgactagcaacactggagacgaaaacggactcgagctcggtcgaataatgcccgcacgactcatctttttggtaaaacgcataacgataaggccgcacattcaccggatcggtcccttctttgagtgctatgcggtgctctattggccgctccggcggaagctgcgtcggcgtctcaaacaaaccggcaaactcctctatcagctcttttatttcgccatcgggtgtattaggcgctagaattatgggccatagtgattgcaaaaatagtctgagccattcgagcctctttcctgatggttttatgttccacccctctaagcccagtgggcttaatacccatcaaccttacttcatctccggcccaatgaaactgcagcgtttgttccttccaattacaaagtgttgggcccaaagtggtgagccattggactcccatgaccaaatccaagcccactaacgctaaagcatagagcgtgacagggaacaccacaccgcccatcaccactggaatcgcctcatacctactccgacaaaccaacgacgttctgttcgccactctcacggtaaatggttttgttgttgtggctttgagattcattcctcgaacaactttctctccgatgaaattgtgagtagagccgctatcgatcaaggcaattagacgatttctatggattgtggctcgaactcgtatggtgctcgcattgtcaaccattcgagcgcgtacaacgtgatttctggtttcccttctgcctttatattctcctcctcaaccgcttcgtcatcattctccccttccatgaagaatagttgaggttgtttacatttgtgtccggcgtatacctctcatcacagctgaaacataaacccaaactccttttttccgtaattcttcccagctgagtttctttagcgcatgttcctctgtctctttgcgcaccaccaaacggttagggacaaaactgcgtggagatggtgagtagctcgttcccttcttttgtctttagatttgcccttccatcaaacgcgcatagttgattacttctcttagagatcgaggctggaacatacgaatcccattagagatggagtaatgcaatccattcatgaacgttcccaccaacgcctcttgagtccatccgtaaaccttgttctgtggcctttcgaattcctgttgatactcattgagcgacccggtctgccggatttgcatcaacggttcatgaaagttctcttcgtcgttgggaccaaatctagcccacaactcagcttcaaacacctcccatgtgattagcaccctatcgtgtcggagcgccttcgatgtagcctgccaccaccgttagccaccccgtcaagatgaaaagtggtgaatcgaacggcttgttccactggcacctcgtggtattcaaaatattgctttgccttgctcagccattccgtcgtgtctcctccatggaagcgtggaaaatcaagttttgatggtctggcgatggcgttgttgttgttagacgtcaccgcaacgaataggttatctagttctccacggttccctgtcgattggcactggttcccttcggtccgtcgacttcctcttgaagtcgctgaccctccactgtctctctgcgtcactgcctctgtcaaacgtgcgagagcctcctccaacctcctatggcggtcctcgttttctcccttgagatcaaccatagccaccgtcattctctgcatcttatcttgcatcatgccctgactcgtttccaactgctctaaccggtccttgttggtcgccatcggctctacggttatcaccggagacacgacctgcttccctttacgtttggatcgtcggagcgtaatgactctgtttttgtgaaaagaaaaaaaagaactgtactctgataccatttaatgcggtccctcttcaaagctagagattgctagaacataagataattggtttgggtagtaatgactacctcttttgggtttttcattgatttatatggaagcaaattggaactacacgttcctacaaaacaggaagcaaataacaaaatgcaaagtggaaaagagaacatgtcatactctgatcctataaacatgtcatattcaaccaaataataaataaagaaaacaaaagacttaatcgttgtacttcggatttggttttctcccgcgtgttgagttcctcctctcaacgacttcatcttcactagtcacgaccccatcaaattgatcctcacctcatgtatccatgtctctttgattttgcctcaagccatgttttttattgtgtcttgctattggcgttgctttgagtaggagtaagtcatgtgatggggttagttgctttttgttgcgttttggtttgtgtcctagaggagctagtaaggccattggtgatcgttgtggttttggaatgttttatcttgctctgtgctagccgacttcgggattgaacttggtagagggagcttgcagcgtttgcataatttggctcgcgaggttccattttgggaaagctcatggatgtgattttcaggtcgctctcacataccggagaaacgcatgtgatcgaggattttgagttatctgtcgttgacggctcaatttcggacgtccggtgaaagacttctagtgtttacagttttctgcaattaggctctttctccttgcattaaactcttcttttccagcaacaaatttggaaagaacaatcaaaatcgtcatcgcttcatctaactcccttagccttactgctttgattgagtggatggaccgaattttagttatggtttatgcttctatgtttttacttttttttgctatggaaccatttctataggtctataatcatcgattgtaaacttaaattgttttcatttttatgaaatatttatattattaaaaaaaaaaaaaggaagtcaaacacattagtcatttcttaatgaatatggatagtctagaagttgtgaaagtcaacgttgcccctacaatggatgattctatgaagatgcaactcacatatatgatctattgaaacttcccgcatcttcatccaagctcaagatacaagtcgtatgatcatcaacatccataactaagttcatgaacaatacccaaattaggtatatatcttcaaaaatttaatagtaactttattttcttcttctgttttatgtgtttatgagatcagtcttaatatttcatacacctgcaacaatcacaatctctaacgtatgactcaagtcacttctatcagtgagaaacttcaagcaaccttgtggcttctgaactaaaacccaaaacactttctacttcttcttcaatcttgcctgatatgttattgttctcattttgctaattaaatattttaatattttgataatacatattttagagtatcaaacatttgactaattgaaaatttattattaagttgagaattcagtaaataaaattatgttctcgtcgacaatatttttgttttttcttgttttgttcttaaaaactagaagaataaacatgtgatgtcattaaacattgttttcaattgagtaagagtaatgcctatatgcatcatcaacttcaatatgcatgtaagatgctagcactgatgcttgtgctgatgtttgggtcacttgggattttgttttttgagatattgtaggattttttttctttgtcatcagatattatttaggacttaaacgagccaaaattgcggaaaattgttaacataagtaatgtgtagagatattgtaggttataggatggaatatccgagtaatccatctgggtgttattgtttttttaaattattgaacattccccaaaagtattataaattttacaaaagtttcaaaaattatgcaaaatagccgttctgaaatttatttttatgaaaaaatagtgtttatttggatagtatttttagatatcctaatctttttatcctcttttggaatttattttaatctaaattagtgactatttggatgatctttttacctactagaatatttttaaccagttcattttactcggaatctcatgtctaatattttttggggaatattattttacaatacccaaattattcattaccgacctttatccaattttttttacctaataccccaattggttaccctgctctagtaattgatgcaccacataaataaaaagaaaaaaataagaaactaattgaaatttgagaatttgtgtttaaaaattcttaattaaagagtatcttttaattaatttttgaataaacttattttatagaatcatgatgataaaaaacagagttgatatatattgtattctattttcattttatttataaatgattttaaaaaatagaggatgtaactaaaaatattaaatatctaaagagaaattccccaaaatagcacaattttaagttttttggacaaaaatagcattaaaaagtttttttgacataaatagcactcaaataattatttgagaaattcctaaaagtaagactaaaacaagttttatggacaataataataccacaattttatataaaatctattcaaccaaaataaattagaaataaatttaaaatattatatttgggttctctattttcaatttagggtatatatttcaaatatttaaaagaatttttgattcattttaatattagtttatggtattatatttgggtttcctatttccaatttagggtatatattttcaccatttaaaagagatttttcattttaaaattagtttgtagtattatatttagttctttttatttccaatttaggatatatattttcactatttaaaagttttttagtgctatttgtgtcaatccccctttattttatttaacttagttttctaggggtgggcatttcggtttaatttcgggttcggtttgggttcggttcggttcggtttatttgggttttgtaaaactctaaccatactcaaccgaagttagtttggtttggtttgtgtttgggttagttctagtttggttcagttcggtttggtttggtttgtgtttgggttttgtaaaacactaaccatacttaaccgaagactcttctttatcaagttatgaataaatgtttgtttttgtaagacttcaccatatatagcaccattttatattttagttgcatcctctatttttgaaaatccatatataaataagatgaaaatataattttttatatcactcctcttttaccatcattattcaataatttatttaaaaataaattgaaataccataaggtcatatataattagttatttttatttagttatatatatattaaattatttatttaaagctagataaaatatgtctaagaacaattttgaaaaagataaggaaagaaaaatagaatatgtctaaaaaatagtatgtttgattttaaagatttgtagccattgatgcgtgttttaatctacctcaaagttttaccttagagatcacatgattactgcaagggcacattgaatcgtctgtagtatttaaggatcgaattacacagagagaagatgtttaaacgaatctatcacaagagagtaaagctatgacaaatctataaaaggggtaaattgcaagtaaaataaataagaaagtaaagtaaagtaaataagaaagtaatcgaaggcaagtaaaagcaagtaaattgtaagtaaagaaaaataagagacaaacgctgggcattcaggtaaattgtaagtaaagcaattccaagtctcaaacatacaaacactaaagttcaactcaccctaggttataggagagagtcggctaaaatccataaactcaattactcaactcacgcaagtaacaatgcatacgttaaagcaataagatcaagtttgattttagttcataaagtgctataactcaactttcgcaggttataacacgatacacattcgtaagctaggttcaaccatactaagcaacgttttgagaaacttagacacttgagatcatgggttagttcatgacaccaaccacatgcattaaaaccaaacttaactagaaagaatactatataaacgatcaaaccaaaatcctaatatcgccaatcggacaaccgatcattacccccctttgattagcccttgaaacccaactagaaaactactctagcatggtggaagaactcatcaagggtaggtttgatacacacataagaaagagatgaataagaactgaatagggtttacaaattacttctttgaatgtcgaatgcaagaggtaagacttcaccttaatagatcttagagtacacaagagaaaaagagatatttggtgttcttcaaagcttgagattttcaacgaagggtgtggattctaggtgagcaaggtaacgaaggggatctcgttttggggcaagaagaagcaaacctaggtttagggtttagaaacaagtatttataggttttggggaccaaggagtcagtttaagggcaaatccgtcttttcttcacattagatcaagtgttggacgaatgggcttagcccggtcacgttatttcatgactgttctcatcaaggggctccggaacggtaacgagctttgtgaccagtcccaagtgggacttctccaccggtcgcgggcatacgtctgagttcagataaggcttcacttcaagaggccttaaaatcaatcgttgatcgtatgagtccaactccagatttatgcgagtcctgactcttctatatttacatagagtccaaaatatctcaattccatgcacggggaagtgatcaacaaatgcaaaaccttcgcagctacgaatctgtccgaaaacgcatatcgatctccttttggccaattttctgttaaaactcttgaaaccttcttgacttctaaaatacttgattatctacttgttctatgatgacaccaaatactccctaaaacataagaaacgtatagccaaaagtggctaaaatgtcatgttattaaccattttttagaacaaatcacaaaacaaaaatagaaagtgaattaatgctaaatgaaaaataaacatgtgaggtattaaattaaggaatcgattgttggcatggggtcattacgaaaactttaaacgaaaattttatgggggtcctgcctataaaattttaatgagacttaccttaaaaaaaaaatcataaatgttatggaggccctgtcaatatagcctacaaatatctcaaaagaaaaaaaaataaaataaaaaaaaaaatccatgtgaaccaaacatcagtgtgtgctattctcagtacatgcattagtgatatcatcttacaggcaaaggtatattaatttttgaatcaatgaagacataaatcagaaccgatcaggagaccatataatcaggatagatatccaaaagtttaattactgcataagcaagattgttgattggctctctcagattgtgaaattacaacctgcaacttcttaatctattttattagttcttacaataactcatattgagccagatcacatgagtctgatttaacattgaagcaagatttaactgttcccgcaacttcttctccggattcagtatgaaaccaagattctgagtctttgttgttcagcaaatcttttttttttttgaaagaatgtaaaattatattcacccaaaaaaaacgtttgttacaatgaatgcgacatgattttaaagaatctaaaagagttaagaacaattagaatgatttctagctatggatttgaaaccaaaactgcagcccgccttggagtcgtgtattcccagactttatagccgtgctgaatctgtttcgaatattcttgtcgatgatctttgcaagttgcgttaccgggatagcaagccccccatgtcgcctactattacgctctcgccataaactgtggatcgttgcttggaaagtataacgaagagtgaagagatgtagatactgacgggatgtatccagcagatgtggagtgataaggctccaactcgagatgcgtcgaccatgaaaaagaccttttgtcaaagagcaccagatttgagaggaatagggacacgaaaaaaaaaggtgatctcgtgtctccaattcctcatcacagaacacacaaccatgccaagcttcagaattccatttgcggagtttatcacccgtcgcaagtctgttctgaaaagcaagccaagtgatgaacgagaatttcggagtagcagaagagaaccagaccccccgataccaatcgcagcttgggtttatggttcttatttgctgccaagtagttgaagaagagaaaaagcacttaaagctgtcctccttttgtttccaaagtgagcgatcactctccgtgcctctgttttgtatagccaacgctatgtaattctcaatctgatttaaaagatccactctgtgtctctttctccgatgagtattcatgacctcagcaactgtagcatgactcgcaatacccagatctattattccccgtgaccctaacagttgatgaagtctgccaagcggacaccaatgatcataccaaaaggatgtggaagttccagaacgtacttccattcgatggaatagactagctttgtctctctgctgaagtatttttttccaaatccaagatcccatacaagaattgcccttaacagaccaaaacgattccttacgtatcaagtttttagagagccattgaacccacaaagaatcccgagccgacagtattctccatataagcttcaaaagactaacctcattcgtttcttttaaagtctttaaacccaaccctccttctttttttggcttacacacttccgaccaagctactttagctctcttagcattgagttcaggaccagaccacaaaaaagctgagaacaacttctctatctcaacaagacaagccttcggcaatcgaaaaacagagaaccaaaagttaatgatgctagaaagaacggacttgatcagttgtaatctacccgcaaaagacaagaaccgagtggtccaggatgtaatgcgagttcgtatcttctcaataagaggaagataatccatctgcgacattcgcttagtaagtagaggcaggccaagatatttaaccggtaatgtacctaacgcaaaaggaaactgttgaagaatagcttccttagctcgtggagagattcctgccatgaaggctgttgatttctccaagcttatctttaaccctgacatagccgcgaacctatcaaaaacttcaagagtgcccttgatggatttagtagttccatctgagaacaccattatatcatcggcaaaacacaagtgtgtgagactcatattacgacaccgaggatgataaccaatccgtttttcctcaactgccttgtcaagcatacaagagagaacgttcatacagatgacaaagaggtatggagataaagaacagccctggcgaagaccccgttcactgcggaaataacccgagagctctccattcacctgaaccgaaaaagaagcagtacttatgcagagttcaatccaatggatataaatatctggtaagcacatagcctttagaatatttaacagaaaagaccattgtacagagtcaaaagctttcgatatatcaatcttaagagcactccggctagatatactttaaagaccattgttcagcaaatcataacaacgtactttgaagatcctaagctttataaacccaaaccaagttttttttttcttttttttttctagtttttatgatttgcatgataagaaataataaatcactatcactaaaacaaaaaaccttactttgaagacctataaataacttttggatgatgatgatcacacgacttggatcttcagttctaatgaagctgcgggaagcttcaacagatcctctgtgagctgcatctttttgaggtcatccattgtaggtgcaacataaactttcacaacttcaagacactccatattcattaagaaatggctaatgtgtttcaacacggttgcacttccttggtactgcatgatacgcaacatctttatttggttatttgggggaatttgaatccctacaaaccgatgtcttcgtccaaaagtgtaacgatgcagatcctgaagcatcaagaggatcgagactagtttaattacatgtcacagactcacagacatatataaaaattagaaaaaaaattagggtttgcttcataccgagagaaccagagttttgaggtttggagaacgctctagcagaagaggcagaatcactttcaaaccttccttttttactcgaaaacactaactcaacaaggttgttttttttttttttgctaaactgttaatatcattagaaagaaaaatgaaactgtttggcttttacaaagtagagccattagctttgagaccttggcaaaaagaataaaacaagatttcaaagaagggaaaacacaaaagggtgtttatgatatccaaagcggcatcaagtcacgaaaacgtttccgatgtcgacaatgttacgaacctccctgttaataattctgaaaatagaacccggagggatggaaacctgattatgaacaacattgtttcgttgcttccaaatatggtagatcgttgactgcgctgcaataatcctcaacaaggttgtttaattaacattggtagtccacctttgtagtatacggaaatcacctgataacacacacacgtttgaacctagacaacgttttaacaaacaaaacatgagagaccatacattaaaactgacttcgacagccaagcaagtcaagtgaagggtcttgacgttgtgtatctccttgatgagattttttacatccgcgtcattttgcacctggctattgtcatcttctaagaaatgaaggtccagtgtagctttggcaagtgaatctaaattacaatgtggatctttaggctgaagaaaaccagagtagtagaagtcgacaacattgggtgtatcaagtgtaataacgctatgatgaccatcataacaactactgctattgataactgagagtttcttaatgcttttgctggatataacgtatgaacttcctctaaaattattgtaacgtatggttaagtcctcaagtgcagggcaagcagcgaaaaatacatttgctaatggatatttccaaaaccagatagaatcaaggaggagaacctttagtactgggagagatgtatcaggagaaaactcatagatgtgttgggttttccccaatgacagcttaaccagtgttgtgctggtgaatacttgggatgggaaactaagccacgatgtagatattatctgtaggtgaagctcagaaagactgtgtagcatggccttacatatcaagtggtcaatgtcatcctctacttcggatattacttcggatatcttcgggacgcccggagatgggatcgtcaaagtcaagattatgactgagagcaaatagagtcctccaccttttggagagaagagaggttgaagcagcttgttttgtggcaaggaaggataagattttgacaagaagatcatttggaagacaatccattgaagccacgcaatccatagagacagactatacaaggtagaggttcaactttcaagctttctctccgtagatagatacaaaaaccctaagggttgacctagaaaaatcattcgtcaaattaaaaacgagaatatacaatacttacaggatcggcaactttagattgttttgttttcagggttttgccctcgatagggtttttcttgagggaaattgtcagaaaattatatttgtgtcgatggttcaagagacgatgggatgatatataaatgctatatctggttcggttcagtgtggcaaaccaacctctattttagtttttttaacataagtctctaataaattattaagactagccgtcaattttactaactaagactatccttaaaaatatgtttccaattgaaccggtcattaaaccgagattaaccacaaatccgcgtttactgtaccgcgattgtgatttacccaactaatcactcacaccgttaagaagacaacgttgttttgtaagtctacaatggagcttcaaaaaaacaccacagggagccgatacagtcacactcacacagagaagcagtctatgtgatcaatgagagtagttctagttctttattgatttagattgtcattggaacaattttcaacctcttttgtctattttggatgatatattttgggaagttgattctatttaggatgttattgtttaggttgactgattgatttggagtcttatctatccttatgattaggagttttatctatttcgatttgtcattttccttaccaattaacacaacacataacatatatagatagattcacattataaaacaaagacaaaacgacgtcgttttcttaacgggtgtgggattagtcgggtaaatcacaatagcggtacaataaacgcagatttgtggttaatctcggtttaatgaccgattcaattggaaacgtatttttaaggatgaatctgaaagtacatgttgcaattttaagaattatcaaagtttatggtggaaatttcaggagcaaaaagtgtggggggggggggaaagctgagaatgcaataattagtttatggctataaaatcatccaacccttttcttaatggatataggtgatgaatcgggtaaatcgcaatcgcggtacagtaaacgtgaatttgtggttaatctcggtttaatgaccggttcaattggaaatgtatttttaaggatgaatctgaaagtacatgttgtaatttaaagtattatcaaagtttatggtgaaaatttcaggagcaaaaagtatagggggaaaagctgagaatgcaattagtttatggttataaaatcagccaacccaatttcgaatcttgttggtatagtttagtagagttcttttacttactaataagattaagataaacttaatcggtaaccttgaatttttacaatagactccacttgaatctttgggagtagactcatccggagaagaaatggtttaacagaatataaaaatttatttgtgatggaatcaactgcttgagactttagctttggatcgtagtgttgatgaagaaaccgaaaacagaagcatgctttcgctccgaaattggatgctatatatggaataaattagtatttacgctatgagcagagggatgatgtcttttgtgatgagaattcacaagtggaaccatacttatagctagggaaagagctttgtgagatggttaaccaagttactgttagaatatgtcccacatcgagactttgataatttgtagagcaatatataagtatgtggtaaacatccactcttgagctagcttttgggtgttagttcggcccatacaaatctaggttttacgtgttttgattgtggaccacccatgtttgtccagtcccacaaacttcacgctttagatgtccaattctgagcgtgagggggatgtgttataatatgttttacattgagactttcatagtttgtggagcaatatataagtatgtgataagcctccactcttgagctaacttttgggtgtgagttaggcctaaactaatactgtatgagtttgaggtttgaacaaagagaaaaaatgttgattggtttgtctcagattgtgagactagtacaacttgccacttgtgaaatctgaatctattttgtttagctctatcaattcttacagaaactcatcttgagaaggattctatgattcacgtgacaaggaaatagaggtggttgacttgaagcacacgacaaggagcgtgaaacagaggaagttgcataaccgactttgtttgttatgttccatgagagagtataaatagaaaggatcggagaggctatcgtagagatcatcatgcctgaccattgaattttgtgttagggttcagagcttgtgtgctatgttcatggtccttaagcaatatagatttttagtaagaaacttaactagtagagaccgtaaaacctaatgtgatcttgaatttgaaggtaacacagatgacagacctggaaactcttttccgcgagtcattaacttcctttatggatgatgctgatcatatgacttgtatcttgagcttggacgaagatgccggaagcttcaatagatcatcagtgagatgcatctttttggattcatccattttagacttttacttcttcaagagactccatattcaataagaaattactaatgtgtttcagcactgttacacttccttcagcatctttatttggttattccggggatgataaatgcttttgaaggaagagattatcatagattgcttctaacttgattagtatgttatcttgatgactgctaccttgcgcagtggaaacgttagacagattggtttgtgactctttgtttcatgtagatcaactcaagtctctaaagagcattctttatttggacaccacaaaagtaaacgagagagagattcacaaagacacaatttacaccataaaacttaactagcaaagaccgcagaacctactgtgatcttgaatttgaagctgatacacgttagtcttccgccattcttgtcgttgattgtcatctttagcgtgtaagtaccctgtttcaaagagacgtattgttagaccagagaagccactctaataggatatagatttgtagataataagggttaagaaatcttacaggtggtgtaattgaagggagtgtttgagaatgagaaagcacaaagctgccaggtgcaaccggacatgccgtctcatcgcagaggtcatgagtttcggtatggacaggaatcccaacgtataaaaccctgatcactacttttcctccagagatgtcttcgcctagtacacacaccacacacaataatattatcaagaaatgtcaagaaggtaaagaatgttatgattatgtagtgctgaaacttcttaaggaagcaggaagtatcatttaccagtagaaccaaaaatcttaaatgttgcggctgcaccactcacaacagggtcaggggagatcttcacacccgtgaccttaacgggatcgagcctcttatctacaaagagtcagcaacagtttacaaataagattcagactaaacaataccaaggaaaaatccagttcatgacaagcaaacaaaagacatagataggatcatgccaatcgacaaagaagaataaacaagcatggataatcgaaatttcttctgcaaactaaaaacttaatgcagtttaaacatagaacaacactattaaactgaaagtttctctcttcttctgaagttattgctaaatctgtaataacatagtcaagaattgactttttgagaaatttcacccttaaatcaaaccatgctctaaatattaatctgaaccaaaatcacaataaagattcaatctttatggaaagtgaagtgttttaaacatagaaaatactggatattttctaggtacgatccaaaacacccctaatctgagagaggaagaagaagagagtagtagtaaggaacaaaccgcagtaggtgaaagaagtggcgtgcaaagcaggtaagaagaagactgataagaggagaagaagcagaggctgagcttgagaaatcgccattgatgagtgattgagagaatttggtgaagatggaagagttttgggtagttttgagtcttttgacaaagaaatggaatccaacggtctctgaacacatctaacaatctaacggttctagatttttttacagagaaaatgttttttatttagtcgttttgacttattgggaattgatttatttatttattagaattaggtgcacgtgtctcatcactaaactagctgtagctgcttccagcaccagggctccatgttgcttctctatctctattcgttctaaattacatgatgtttttttcaaacgaaaaccagaaaagactctgactacgcggcattaaccagtccaccacatcagttgtgtggctatggttctatgggcttaagcccatttgacctacggaagtttcgcaaggtaatatgttatctattcagtttcagtttgaaaccattggattatcggggtttttttctaaagtttaatatctattcgattattttgaaattttggttcggttacagtttaattttgattctttcggttttaaatttaatatacattcgactatttaattttgaatattttcagatattttgattatttttgaatattttagatatttttggttattttagatatatcggatattttttattatttttaatatttttactattatatatatttttaaatatttttaattatttagtttagaaataactaatagttataaaaaatatttttatttctgttattttcgattacccaaaatattttgattcggtatcgatttagttcggttcttttgattataaaatttagtattaattcggttattttattttctaatttttggtttggtttggtacaatttttttgctaattttaaaactaattttatataaaatttttgttcaagctacaattacaactctttttaaaatacaactggtatgatctctattgtactcacataactatttgcgtatttgatccgtcatagttgattttataaaatcttttatttgagaaagcattgctaagatttgtgtaaagagaaattggattaaactttcatgtttatgtttacgtttacattcacgttaatttcgtaaatatacagtcacaagatattgccaaaaaataaattaaagaagtcaaagaaaaataaaaagctgacataattatatatgcaaacaacaaagcatatagaaaattaaattaagaaacatttttaaaaaatataatattatattttacgtaaatatttctataaattaatattttattaacttataagataaattaataaatattagtttataaaataaattaatatcactataaattaataaaattgcgtcgtccgaacattattaatacattttttactaatttatagagtttttactaatttatagagtttttactgtagttcgtacgtacatgtcatcggagttaacacccaaaacatggtgacatatacaacaaaaaggataaatatgaacatcttagactatatagcagcatttgttctgcatgaacacaaaaattattgaattttaaatccatatcaatatagaaaacacacagtatatatgttcttagacattaaattactacaaatttaatcataaagaaaaaacacaaaattgtaataaggccttaatttttaaagtcagaggaaaaagagaaaacaagtttcgatgttccaccgaagtgggcaaattcttaaaccgtaccaaactcccataaagactccaatacacttagaatgaaaaagcaagagacaaattggttggagcccaaacccatgtgggtcaaagtctctctaaggagttacttactgctgggcacattgcaccctttgagcaccacccggatggtcatcatcttcatcgtcatcatcataagcctctctttgagcttgtgccttcctcctcatctcatcctcaatgttgacatcgtggagcgtggtctcctcgcattcatctatctccatgtcactcaactgagctgttgacggcttaggtagaacagcttccagtgctttggtctgatctgggctcaacgagtccgggaactccactgtgaagtggatgtagagcttacccttcatgaatggcctctggtatatcggcattccttcatcgcttattgccttgtatgaatctgtcaaacacataagataagtgatcatgtttcaatcagagacagttatagtaactgtaaaatctgagtatgacgatgcatctgaatacgtaccaggtttcacgacctccccaggattagatttaatgagaagacttctgccatccaagtgagtcagaacaaattggaagccacacaaagcttcggttagagaaagtgtgtgctccacaaagaggtcttctccctttctcttgaactttgggtgctctttctgctgaaggacaaacactatatctccagtgacagtgtcaggctgcaccaacacaaaaacataaaacaaaaggttagtctccagaagaaaagtaaacatactagtaatcaaagctggagtaaatgtatgagagtagataccgcttcatctgcttgtccttcaaatgtgatcttctgactgtgttgcattcccttctccacattcacttcaagcaccttcttctcaggaatgaccttgtctcctttgcattgtggacacctgtcccgatcattgatggtctcacctgtccctttgcattcattacatgcatgctgcatctgctggatcattccaggtccaagctgcctaatagacaccttcataccagatccctgacaccctccacatttcaaggaggctccagattttgatccctttctgcaatcacaaattcagaaccttttaaccaactggggtcacaaattgagataaagggtttctgtcaaaacttaagctaattcatattattatgaacctaggacacatatagctacaccaaaaacgcaagatcgagtcgaatgtactaacccgttacacttagagcagagagcattcctagaaagtgaaagcttcttcattgtaccaaggtacacatcctcaagagataccttcaagggatgaacaacatcctcaccacgcctctgcctcctttgccggctggtattacctattcaaaaacagaaacatattcaaacgaaaattctcaattgcgatatcataaagtgtacagtgtccaaggagactcacctccaaaggggcctccaccaaagaaggatgagaaaatatcaaatggatcatgtccacctcctccaccacccattccttccttgagtgcatcctctccatactggtcataaatctcacgcttctccgggtcactaagcacttcataagcttgtgctaactccttaaactgcaatcaacacataacacaacaaatcaaactcataacctaacaaagaaccaaactttaaccactcaattatcaaagcaagacacatctatatcatcaaaaccctaatttttgattaatcgccaaaactcaaacttttttatcagatcggatcaaaattcaacattaagaaactaacaagacaacaaatcaatcgaaaaaaaaaacacaatcaaacaatcgaattcgagagaatctaagcggatctaagaaattattcaccttctcgggatctccacccttatcaggatgattcttgatagcggcttttttgtaagctttcttgagatcttctggtgaagcgctcttaggaacacctaagatctcgtagaacttagtgttgtcgctcttcttcgagggtcctctaccgaacatcttttcgccgttgtaacgaaaaccctagagagattggaaggagatagagaaagagagagagaaaagtgtctctctttcgatgtttgggttggttgatgtggctgccgtttctctgagaggacttctctcttatgaagaggctaaattgcgtttgcttttgtttgaggttttgtggagtttggaactctctagaatgttttattactttcttttttcctttttttctcttaaaaacattattactatatttgatatttccaacatgtagagataaattattatttttttgaatacaaaagaggaaaattatattatttgggtagacagaaaagtatattgtagatgtttgttgtacaacaacgactactaagattatattgacttgtttgacaaaaaaaagattatattgactttttttttatgacgatttttttcaaaaaaatttgttttgttttgttacaatattaagtaaataaatttttatacgagcaacataataacaaattataaaactacatgagttttatgtaactcacgttactttttataaaactcacataagttttttatgtaaaagaaaaaaaaattgtgttattcttctcaacataactaaaaaattttacaatcgattcacaaaaaaaaactaattattagagttttgttaaagagcgtaaaaaaatattttttcatttgataatttagaaaaatatatttcgtgaaagaaatttaattttgttatttttttgtttggttttttatctttgtatatttgtttttagagtcactgacaattgtcggttcgtcggcgactctttttttcttttttttcttaattctcttctaaagtaaataatttgtattgtcggagttacaactgtaaaaggtgacactagcgattgaactttgatttttatagattttattatccgcttactcgatcgctcaccatcacacttctctctaactatcaagatgaggttctggattcccaagttttgttacgattttctatcgattctatcttcactactaacgcgatcgatcaaagtgctctccatcgtgtgtcccttggtcgccgatcttctttatcgttctcacaaactctatctccatcaattggttttgtctctaaagaacacattcgtggttatagcaatttgttggttgaaaacgatgacggtttctttctcttcatctttagagagcgtcatattggtaagtaatttgatcatcactgattttaccatcttctctgggatttataataaggattactcaggtccgaatgttttcttcaccatcccttcaattgattggtgttatcttgaaaacattttgaagttcctcaacccaaaattgtttggtgtcatcactactgacatttcatctttcttttacttatagaagaaaatcaaattgagatattgtttgatacttatttcggattttttgaagatttgggaaactctctagttgaggattgtgtggctctaaaaaccaagacacataaaagtaggagttatatgatccagatagatttgttggaagagatacacatggatgttggggatacatgctatcattggatgatgtggagaacaatgtgatatatatataattgcaatcagaagatggctcatactatactgagacgtcataatttattctcgggatataatggtgagagaaaacaaagtcaaagatagttaaagtgattatgatacggaagttttggtatcataatgttgatatttcataactgttatcagaagcatatggttttaaatacggtatgcgatatggaagtttaagcaagaaatgctatccagaaacataatttgcataagcgtaagatcaaatacgaaaaaaatagatttaataatctgttaacgagtaagacttatatgtcaaaagcatcgtcaatcactatagtttgtgtatttttctcattttatggtgcttacgttataattttcgttcgatgttttgtacaatgactttatagtcttgatttgatattaacgaaggtaaaaataaaaataaaaattatctttgttttatgctaaatattttatttcataaaagaagtttaaaatatatatatttttttttataatattttgttttgcaaaaaaaaaaatttacataaaataatattattttgtgaataatagtttcttgttaacatgcaagtaggttggtaaataagatgacatgataatctatactattaattggaaacattttgtgaaatacaacctcatgagagtagtttaagactaagtaaatgattgtttgcatgggtaattaggtaattaacaactagtacaactagataacggacaattccttctgacccttattagatccacgacatacgaaaattctttctcattttccatgcgcttgatgaaaatcttcaatatcttctctgcgtaaaatcctggcgaacggctataattgtacatcgttgtagatctcctacacacttgcctcgattaatatgcaaatctgttaataaatcggagtaactgggattcgaaccccagacctctcggtgtagaagtattaatgaaccattggtcaaccattgggccaatggggcttccaaacttaatattcagcatcaatatatatatttcgaatataaatcgaaatattttgtatttttccatttattagagataaaacaacaaaattcaacataaattaaacactcataatgatatatatttagaatacttaatatttgaaccttgtacttattttacttaaaattttatccatgtaaaattcgaacatcatatccactaatttggcatcgaatattgatacagttttaaaatttaatccttcagtttacaagctgaatttgatatcactacttgcttttattttgtactagatgagtatccgcactacgtgcgggtttatatattactatttacaaattgttttatataatgtttattcatataaagtaaagttaaatgcatcggttttgaaacataaatatgaattgtaattgttttcaaaaagtccaactatattagttcatctgaaaacgaaagtgcttgagttgttttttattgttgttctagattctcagtttttttttaatttatatattcttgttcttttggttatatatttagtttgtgatacgaggaaattttagaaaatttatttcttacattaaaaatataacatgtctttattaaccatgtctctgcatatccattctaatcatattcaacttgatgttcttggaaagtttagttaatttcttgtcataatcttatatcttacgtattagttataaggatagctcctcaaacatctttcaaattacttgttttcttagcataaatctcgaaaagcttagatatatttaatctgcatattcatttagtttctttcataataatcgtttaatttttaggtaaggaatatgtgtaacatgtttggatctcaaaattaaagaggatatattgaattaaaaaaatgtagaaagagtgatgattcaagttctgattaattatatcctcatattttagttattatgttgaattaattactaattatgtattatttattttatgaagtttaggtggcaagctctcattgctgatgtgtcaagttgtgggagagagttggccaactttcatatatatgatttaaatttcaaaaaacagattgactagataaattttaacgtacgatgtttatttatttatcaagaggttaaaaaattcacattaattactgaagttaattttataatattttctttagttacgttagatattcagtcacttataaatagtttacatagcttcatgtctaaaataccaaataaaaaaaatagacttcattacattcttttaatataataataataagtcgataaattctaaccatacgaaaaaatatggctaaactaagctctaatgttactgcgctattcattgttgtagctttgatgtgtgcgtttgttcctgtactttctgtcaaagaagctgaagcaaaatcattatgggacacttgtctagttaaaatcactcctaagtgtgcattgaatataatcgctgttgtttttggaaatggaaccctcattgagtcttgttgtcacgatcttgtccaagaaggaaaagtatgtcacgataatctcattaaatatattgctgacagaccaagcttaattggccgtgaaacacaatacttgaagaagagggatgatgtgtggactcattctgtctcaatctctaaaactgcttaaaatatgtgtgtttttaaatattaatttgatcgaatatatcgatatttgattgttctaacatttttgtttccggaaaattaatttttatgtatttactttaatacaaaataaattaaagcaatctctcgtaagatgaataaatttcaagctttttatatcaaaaacagaaaaatgatcaaacttaatataatccaaaaatgaaaatgtacgaataagagaaaacattgttagttttatttatatattttgatattgggctaactttactatctaatcaaggtaattacgggaaaaaaatattttttgttcatttaaaacaaaaaaaaataatttgtttttaatacattttaactcttttatcagaaaaatccttaaatcaaaatctcatcacactaacaatggctttttatttttcaaaatctacacaaaacttcaactctaaggtaaagataacgtttgaaagagtgtgcaaaatccgtttctgtagtaaattgaatcattaatcttttgaattttatataagtattactttttagattcatgtaatagttgtggttacagctcattagacgtccaccccacaactaggctagcttaacattgagaatattgaacactcagtcattttattatgtctagttctccgttgctacatttttcaatattttttatggagtttcttgatttaaatccaagttcttccaaatagttatacttaatataggttcagtgaaatattttttatgtgtccactgatagagatcatctatttagtttttggtggacgtcttgcataactattagttatggatttcaaccatatccgtctcttttaaatatattattcaagtcccgttaattattatttttagattaaaccaattgttcaaattttctttctaacatgactaccatcatcaaacaaaatgtgagtaagacttttaaaaactcataatgatatatatttaaattacttaatatttgaaccttgtagttattttacttaaaattttatctatgtaaaattcgaacatcatatccactaatttggcatcgaatattgatacagttttaaattttaatccttaagtttacaagctgaacttgatatcactacttgcttttattttgtatttaaatttcaaaaaacagattgactagataaattttaacgtacgatgtttatttatttatcaagaggttaaaaaattcacattaattacggaagttaattttataatattttctttagttacgttagatattcagtcacctataaatagtttacatagcttcatgtctagaataccaaataaaaaaatagacttcattacattcttttaatataataataataagtcgataaattctaaccatacgaaaaaatatggctaaactaagcactaatgttactgcgctattcattgttgtagctttggtgtgtgcgtttgttcctgtactttctgtgaaagaagctgaagcaaaatcattatgggacacttgtctagttaaaatcactcctaagtgtgcattgaatataatcgctgttgtttttggaaatggaaccctcattgagtcttgttgtcacgatcttgtccaagaaggaaaagtatgtcacagataatctcattaaatatattgctgacagaccaagtttaattggccgtgaaacacaatacttgaagaagagggatgacgtgtggactcattgtgtctcaatctctaaaactgcttaaaatatgtgtgtttttaaatattaatttgatcgaatatatcaatatttgattgttctaacatttttgtttccagaaaattaatttctatgtagttactttaatacaaaataaattaaagcaatctctcgtaagatgaataaatttcaagctttttatatcaaaaacagaaaaatgatcaaacttaatataatccaaaaatgaaaatgtacgaataagataaaacatggttagttttatttatatgttttgatattgggctaactttattatctaattaaggtaattatggaataattattttttgttcatttaaaaccaaaaacaataatatctttttaatacattttaactcttttatcagaaaaatccttaaaccaaaatctcctaacactaacaatggctttttataaactaaaaataaaaaataaaaaaatggctttttaattttcaaaatctacacaaaacttcaactctaaggtaaagataacgttcgaaagggtgtgcaaaatccgtttctatagtaaattgaatcattaatattttgaattttatataagtattacttttagattcaggttataattgtagtaaaagttttttatacccccaccccacaactaggctaccttaatattgagaatattgaacacttaatcattttattatatctagttcaatccattgctacatttttcaatatttttaatggagttcttttatttaaactagaacttgtaaggaagtgaattgggtgaaaaaagaaacatagtttgaattaggaaagcttaaattttgaaacataattctctcttctttagacatcacttattagcttaccgtctctgtacgagagtatatatgtaaggaaacatgatttgatcaataacactttaagaaaaactaatgtaccacttgtgaatatgatatcagagctgaaaggaatattgaaatgacttgacgaccaagacaaacaaaaagaaacacacaaagaaagatatagcttatttagtcacctctcttactctgttagggtattcatgcagcaaatgacaaaattttcattgctctcgttttcaatacatttatttgcttggttttacattaaaccacactcaaaacaccttttgtgtttcaactttggtccaaagttgtggtttcaagtaatttgggtggcttattgattagtgaatataactggaaggttactagtgggttggatgttatctagctgtacaactttgtaagggagtgagtttggtatcgaaaagaaaactcagtgcagagacaatgagaaagctttgttagtatatgttttaagaatcacttttgtcatagaattagaaaacataaatattctcttcttaaaacattatgagacatggtttgatcaacaaaaataaaactgtgtttaaagcaagaattataacacactaaggcagttgaaacataaatatctcataataccacatcttcataaaaatactaattcacaggatgaaaacagaaaagggagagattaaatgtagagcttgttttagtaatctcttttccttttgcttccagctagctcgatctgacccaaacttggaacataattaacaataattggcgaatatcctccaattgtctgaactccaaaattcagtagtatgaatttagtatcctccccaacactgtaaacattctcctcgtcttcttcctccatccatcccttactcttacaacacaagacgactttcttctcctcgtctagcaagaaacttaggccatgccaaaaaccaacgtcaggcttcggatacaatgataacaccttgctccacgacaccacattggcctcaccaatcttacttgtcacccatacctcagtcttggatgtagaaccgccctgtactaacaccgaaagcttctcgtctccgacaacggaaagattagaagcctcaaaaccatgcacttgacaggggggaggcagagaaacataaccaaatctctctgttccaaaatcaaatttgatcaaggttatgcgaaggtccggtggccttcgtcttctatctatacccaaccagtaagtgtttcccttcaaagagaaacactctctaaagtagtccatgtagtggggtggcttgataatatcatcaataaccctccatgagtcagagctaaactcgtagatttcagaatccttgtctaaataattaaagctcatggctttgtagctcttattacaggacttgttgtcatatccaagaataaaagccataccttcgttgtaacgatcaccgagttcgatccacttggttacaccagttaaagggttccaaacgacgaatcttgaatctttttgggaggtgcataacaacaagccatcacagtgaaagactcgatctatattgaactgagctgctgaattcttagagtgaggatcgactaagctgacctcatttttaacctctagagatggagtagttccatggagattgacgtttataggacaaatcctgtagttcttcgtcaacgtgagaggttgaaactgctttgcggctttttcaatgtgctttcttgcgaatctcttgtcatctttgaataaacgattccattctttgcaactggatcgtaatcgcttcagagatgtggccggaacaaaacagagtatctcttctactaaatcctttggaagctccggtaacgtcatttttgatcactgaagaaaacggcaagtggctctcaatatagtctagggctttccatctttcatttcaagataactggttatgtgcatttagtttaaaattataacttttaaccggataaaccgataatcaataccaaaggatttggataagtttttttagtcactcactttatctgccagcaagcaacacaacaaaaccgataagttttggccttagaatcctccttgtcctaaattaaaatatcattaataagaatcttccattaattagtggatctcttatcaatagatttagtgcatgatttagcctaaattttttttaaaactttgattacttaccaatcgtgttgtaattttatttttaaacttacagcccagtttttctttttttttttaagttgtagtagagtaaattctcaaatccttattttcttggctgtagagattttaattcattaaataaatacaaaaaattgaaattatcaacataaatatataacaaaaaaaataaagataagttttttaaaaaactgataattatcaaacttaaaagaaaaaaaacaatttattttatcaagaattcataggatttttttctatcatcataatatatttatttaaaatagtaatacaaggcattttatttactataaaaaatatattttattacaattattatatttattaatctattttttataaatatttaaaatcaaaacttacagcaataattctatagcaataaaactataaaagctactattatagccaacatagctacagcaaaatctctatagaatttgttttacagttacagcccaaccaatcactcatttagttccttaactttaagtagtgtatttgtaagatagagagaaaaaacaccaattagtatatttgcaacatagcatgattggctttagtggtagaactgaagaactttaaaagtgaatgagtgatgaattctagttgtacaacttgtaacttgggtgaaaagataactcagataaaataccagtagaaaagctttgttcatgtttaatgaatcacttttgttaaggacatagaaaagcttgaaaaattgaaacataattatgatctcttctttagaaatctgctctacaagaagagatttgatcataaactttagaaagttgtgtttaaagcaaggaataatactgagcaattgaaacatctgacaatacaacatcttacatctgacaatacaacatcttaatgaaatatcagttcaaaggattattcaaagcaagataaacatcgatctgtctgatttggagttattgttttggaatgtttttgattgtgtcagctgctcaacatttgatgtgattgattagtctctgtgttggtattttgtggaaaattttagaactagctttcaagttgatcaatgaagctgtagagatcgcataggcaaaaccatagtcctataaaagttaggttatatgttctgtgtcaaacctaccgaccaactacctttagctgaattggaaattaagttttgcattgaaatcaattcttgtaatctcgtataatgggaatcaatctagtttcttgttagattctgctgattaattgtttatatatatactgagaaaaccaatagatcttctctatttttgtcgtaaaccagatacaaagttataacaattaaaaacagaatatataaacatgatatttctccaaatattgtctccttgttcttaactcttaagaaatgaatagttttttcttatttcttacaaaaatatgaagttattattgaaatatatatttctttttatttataacaacttacagattaattgttttttatttattcctcaaatctatgttcttaacttcttatccttgagaaataaatattcagtaattttattattggaagataaatctctttcctttccaattattaagaattatatgacacttacttttgatatattttttaatattgtcccaaaaaaggagggtgttatttcattttcgtaacagataaaaagatcatttttcatatttattagagtcgcacgcggtggtggtatatagattctcctctaaagctaccgaagtcggagaaaggtaatggcgtcagggaaccttccgtgggagttggaggaagagatattgtgtcggcttccacttggatctcttgttcggctaagatccgtatgtaaacactggaacgattttttcaacgacaaatggttcatcaagaaaagtttgggttgtgcacgtccccaattcataatcctgcccgaatccaagatttattcgataggaaccatcggtctggacggcgttgatccgaagatagaggtgcgtgagctagcttgtcagtttcattttgaggctgagaagtgggcatttaccgcggcttgcgatggattattgtttcgtgacttttggaatcaaggggttaccatttggaatccatggttaagacaggttgggtggatcgagtataaggagaacagagatttccgtttttgcggtgtaggatacgatgctggtaaacccgaaaagggctacaagatctttgggtattttaatcgtttctatgacactaaactgaaaatcgaccatagatttgcgatctttgaatgtgcgtctcaagcagttaagttcattgattccccggaatggccaatgctggcaggtcgaggtgaatatgtgtccttgaatgggaatttgtattggactgcttacaatgaagagactcgtgagcattttctcggaagctttaatttctccacggaaatatccatgcgcttttgtctccttccttgtgcgaagcatgtttctggcttacgagataaacttgtcctcactgtatttaagggcgatcggtttgcattgttaaagcaatctcgtatatcaagtaatacagagatttgggtaacataggacaagattaactctagtaataacgtggtgtggttaaacttgatgacattgtcaatacctgattttccctcgctattccatcagctttctgatattagttacttcatccatgacatgacccttatcctgtgctgtgacgacaatcaaactggagtgggttgcatctttattgcgaggggagacttctgcaagaagattcaaatagattctgtctttcttgggttttctcaatgtgtctatcttccaagtttgacctcggttcctttggaattcagatcactacaagtttagaatttcgatttttcgagtacaaatagtctttgaaatgtgattctgttttcatgtcctttatataatactaaatgaatatcacgctacgagtgagtttgttttgaaaattgtgaagcgtgagtttgttttgaaaattgtgaaaaaaaaattactgattgttcttgctaatttatgtttattttttattcgttattatgtagttaataaaactaaatctatcttatgtaattacaattttttagattagaacttattttcgtacttgaaatataacctggcaaaaagacttacttgtcagctgagacctcttgcttattcgcgtaatatccttcatcgtcctcatggctctaagttgtttttatcctttttaaatgggatttattaaactttctcgtttatattttcagaggatacaaaagttctaactgcacaatacggacctaaagcaagaacgaaaaagaacgaaaatgctgagaaggcttgtttgaagtcatatggaagccttaaaccggatagattggtaatcgtaaacgcgtttagttttcagaaggaggcttgttttgtatagtacaggtgattcttggtttttagattagaatttcttttgctttgaatattgataggaaaagttgaaaaagagtatgaaacgatactaaaaaggacgctacagagtatttgtgttttgagagttgttccaaataccaccacctcagtgataattcaggtgagtagctattcaatgttgtgtatgtatattgtcaacttgagttgtatctgatgttttcattttgtaatttccgtgtaggttgtacatgatggtggttctgtatcgtttttatgttccttgcaccttggtaaacatttactaatgctttctgaaacacatatggtataaacaatgtatgtttgagtatttatagagtttatagtagtgaaagtttgtaatcccataaactgagagtgtgaatatgtttttgtgtaacttttactgtaaatttttcttttgaaatggttatttaattttatatatttcatatattagatatattctaaacgttttttgttaaatattctaaacattttataaactttaaataactataatatttatctttaataaagtataacattaataaagtcctaagatttctcctttttaaaagtaattagaattgatggagatatattagataaggaaatgctaataattaggaatattaattaaattataataattaatgccaatgggattccttgtaaataaattccaacttgaggatttattgtaaaatggctgtaaaaatgtatatgtagatattgaatcaacgtgatttagatgagattgtacataaaaaaaaaatgtcatgtggtgtactggtaattaataatcattataaatcataacctataaatgtcttataaaataatataatttgaaaactattatatataatacataattattaagttttaaaaattagtatttaacaaaaaaaattgtccccgatatattgtgggttaaaattttgtttaagtaatgcgatattagctaaaaaacaatcttgaaaaatatataaaatatatttggccagcttttcagtactttttaattaaatatcaattatatggatgaaactcgattctcgtaggggttgatatattaaaacaaaggtctcaaaatataattgaaatgggaatatgtttaaattcttaagaaaatagcttgcatcattgctttttttttactatcattgaaaactaaacgcaatcttcctctgtattgaaatgaccttatatgcaacaacggtatttataagtctaaagatcaaattgatttaacttcataacatacaagtttattgtaattattaaaacatattaaaaataataaatttgacttaaccacaacacacgttgatctttgtcaccacacattgatctttatgcaaaaaataaaatctaaaaatcgctcattattcctaaacttaaatattttttgggaaatatgggtgtataaccaataaaaaaattataaattaaaaaactaaactaaaaaacaacctttcattatattttttgtgtaatgtatattatttacaattttgtcctcatcaccatcactaataaccaccaccaaatcataacacggccaccaccacaggctaccgtcgccgccgtcaccaccaccacggctgccgccgtcacagtcatcaccaccattgttgccgtcattacagccaccgtcactgccgccaccatcacaccacagtccgtcaccaccatcacctttaatcatcctcaccaccacttttaatcaccatcaccaccacctttaatctctcccatcagcaccacaaccttttgccactcccaccagcaccgtgaccataaccaccatcatcactacctttggtcactagtcactaccaccatcacttttgatcaccaccaccacatttggttattatatttgccctctatgttagtttttttaatttatacatatagtgttatatagttaaatagtttatcaaatatggttattgttgcaaatgacccatatttttttgtgcgttaaagcaaaataaatgaaattagtcaaagatgtttttgtgcaaataaaacattcattcatgtttactctcttgtctcttattatgatttcgagattatcaatgtttcctttcttaatttgttaactaccattagacaatatcaatgagaatacttatcaactactctattcaaaaacagatcaacaaaaaactctaggtctttctagaaggcaaaaatcttcacatttttgttttatagtatatttaagttcacataaaaactatatttaaaaaaaaacaaaatgatttgatgtcagatgtttgatggtatttttggtggagcgtgaataatttattttaatgaatttggttaaataacaaaagatcttttgaaatgttgagtattgtaaaaaaaattatggtattacattttttatcggttgtggattttttctatatatattttgaattattgaaattatgtatagttaattagaatgtttataaatcgtatactattgagaaatataatttatgtactagtttatttaatacataaattagatttatgtgatatttataatgtatgaaaattttaaatacaaacatgcataatcacataaacaaaacatatatgattttattgactttacgttttaatcgattctaaatcatttataaataatattttaatttagaaatatagaataattgcatcgcatccatatcgcaaagctatctatagttttagctaaacatattacttcatattggaatcgaaagcatttacaacggattatcgttaggatctttaaaactttaatgttattgcacatatttcggctaaaacatgtttcctcctcacaactttttttatccaatatccatcattttgatgaactcaatatctgtatcataactctataccgcctcatatcgttttgctgaagagaaaaaaacaacaacgaattacaaccttttttgtttgttttataaaaatattagcacaaactcaaaatgataagtgtggcaagagaaaatattaaaagagaaaccattttgagatgtaccactagcacaagcatgaatccactttgggatatttgtagagcctaagatgcgatatgaccacaatttgagaattattacgaaacaaaatgggtttttggacttgaaaataaataacttgaggttaagtttattaaggtatagaattttgatgacttcaatcaaatcttagaaagtaaataaatgaaagattttaaacgattgttagagaattttgcttattgcatcagtgaatgattagataataaaaattatatttaaattaaataatacaaaaaaatccaaaaataaaccgcggtgtagcgcggatgatcaactagtgtaaagtaaaatttactcaaattgactctaatcttaacaaaagtaactagaatgactccatttagcaatgacgaactaaaatgactctaatcttaagtaaaaagactaattaaccttaatcaaaattaaaccatatttttagcaaaaaaaaaagagaattttgaataaaaataaatacaaaaagataaactaaaaaataaataaagcatgtggccgcattaggttttatttcccctttcagtcttattttttctctttgcatgtaccttctttttcgatttctaaaatcgaaaccctaaactaaattggcttgaatccaattttccgattaataactaggtccatacctagcaaccgattaacgtctagcttttttttaacaaggggtaaaccaatttttttttttaattgggcaaacaataacaaattactaaagagttaattttaaaacagtaaatttgttattactaaagagttcattttaaaacagtaaatttgaaaaaaggtttctcagagaagcatggaacttttaacgaaaagataatacagtattctttaaaaaacaaaacttttggaattttcccattcgaaaaaaagccaaacgtgaaaaatccacagagactcacttcaacattcacacacactctcttccccaaaaccatttccacaacaatttcaaaacaaaacaaaatgttctcttcgaaaaccctaacactcctcgtcttctccgccgtgattctaaccgtagccttaggcggagacagcggaggttcaggtaacaccaacactatctattcaccatgctccgacacccgaatccaaagatccgatggattcacattcggtatcgcattctcttctcgtccctccttcttcataaaccaaacggttcttctctctccctgtgaccgccgcctttccctcgccgccatgaattcacagttctctgttttccgtcctaaaatcgacgagatctctctcctctccatcaacacctccgccttcttcccggtaattaaattccttattatcaatcgaattagtttagttaattcagattaggaaacacttaattaatctctgttcattatatagatttggttgactttagtgttgacttcgctcgattactactaattagattacttcatagtctttactaataatagtaaaagtatcagatttggttttatgtgtaaactattatgcaaaatggtattatagtaagtatacttgaattggtaagtgtatgatttgacaattcatgaacccttaatttgtggatgtataatatcttcaggacaactatggtggatatatggtagcattcgcgggtcgaaaatacgcagcgaggtctataccggcttttattgctaatagcaccttcatcgtaaccagttttactttggtatagcatttttgtatatcatatggttcaagtcttatacatgtatagagtttttatttatggtgttcttatgtttcttaaggtgatggagtttcagaaaggtaggcttcagaatctgtattggaagagagacgggtgtgcgtcgtgtaaagggaatcaaaattttgtgtgtcttaataagcaagattgtgcgataagaacaccgagctgtaaaggtcggggaggtgccgtggactgtagtctcgggatacagctggcgttttccgggactgataagcacttggcggttctcaactcgtggtatgaagttgagaatcttaagcagtattctctttatggtttgtattcaaacctcaagagctctttaaccaatcagttcaataatttcttttgagcttcttgaggagtagtatttgtttgtttgtatcacgtaagttaatctctttggtgacttctctaatggtttatgaaatgtaacacgaaattgcggaaatagttatggtttggttcaaccactacttgtattcagagttagtcgagagtcgagccatagatatacgtacaaatgtaaaagcaatagatactaattcgcaacagtgcaacaccatcaaatcaaatgtgtgttctcttctctatgaaacctgcagcttttcagacaaaactctggtagctgtatataccaaaacaatgaaaacttatacccgtgtaatattacatgatttctaatgacaacactacatttatcttctcaagatctctgtcatatacagcttctccttggactgtgtttgcctcatcttgtggcgtttctggttccaacgcaaacacaaatatatctttgaatcaagacattgaatatgtgcttttcttgattgctttattctatttgactatgttgatgaagcaagattggtgacaccgaagtaaagagtcttctggttgaaagcatttatggcatagtcaacctgaaggtgacccaatggagacttgaaccgtagcccatatccgaatccatacccaaaccctggcttcccttgtctcattgaagggtttcctgaaaccaattccgcaacagctttatcatttttgtgtctcaacttctttatgattcttgttcggagaaggtaaagtgaacttaccggggacaaggcggcttgagcctaggtctgttccacaatccaagaagatggtcccttctgtcatcttgttctgtacacaaaaagacaccaaagctcaatgaaagcttaacaggggaaaccatttaatggttctgatgaccaaatcatgcaacagctccacgtaccaaaggtaacgccaattctgtattggcaacaaggcatgaccgaccggatccaacagcaccctcaccatatccgcgaacactgcctagcccaccaatggcaaatgcttgataaggtgccatgtctcctacaattgaaccacctgtcaagctgtcacagaagaggtaagaaccacggcaaaactaggacatctttacaaagcatcttctacgtgtagttttctagatcaagtgtgtacgattctgtcagtaccttgctaagagaaaagccggtccaaacctgacaccttttgatgcaacaaatttgaaacggttgaagataagccacttggacacaaccggaataccttgttctatttgcatgctaaactgaaaaagcaagaaaccagtatgaaagaaaagaaacgttgacaaagttactgcaaaaatggctgtgtggtttgcctaggctataaaacagaaatgaagagtctcttacatgagaaagaccttggtcggtagcctttgcaaaccgggattcttgctttaaaactaccatactgtcatgggtatttccactgcatagcagagaattctacacatgtaaatatcagttttatgctagtacttaaagaaacaaattaagggaatcgagatctaatatcacctgcatgttataggaaatccgtccagatctctggttatcgcgcgtccatcatcgttaatcggacgcacatgctgcaccaatggaaaatattactcttttataccaaagcaaaacagcaaagagaaaaatattgttctacaatgtctgaagaaggtaatgtgcgggcacctcaaactttatgctggttgtgctgctccattttgaactcgctggctcactcaagtctaaaccaagagccaatttagacagatttacacctccacttcctgaccgagaaaagttgtcgactggggtgccgtggacccctatctcgggtgagagagaatgctgcgccagattaacaaatttaaatgtaacatagctttaaaattcactttctaagatagcttcacagatcagtacaataacaaataagcattgagtacctgtatgaagaaacactgttgtggacgccattcaggtctaggtctcctaaaagccacaagtacattggaatcatacaatcctttatcccatgatacatcaagcttctcgcttcctccaaacaaatttggatgtttgatacagaggctgcaacaaacagatccaaatgaacacttgaatcgaaaagaaagatatgaaaatttagttctgcagattatatgaacaccaacaatatttctgtaagctgtagcattaagtctcgaaacttgcctgccaatcactagagaaagaggactgctagtgtccctgttcaaaaagtaacaaactgagctttaatacgtcgagaaagctaaaggcggtacagtttcatgagtattagctaaaatgtaagtgacgtcaaagtatggatgatgagagcaaacctgaaagcaggaaacattaaagaagtacaaagcttgtgagtgaagtccacattaacatcaatcttggctgcaatcaacaacacaagaatatcaaaatcaatgccgctgctagaaaactacattgcaattgcaaaccagtccgatcttaatctttcactatattcaacagaaagacatattcgacatgatgagttagtaacaaaaagatacagaaaaagttacaacattcagatcaaaatcgatacttttccccaaaaagacatttaggaaatccacatatcaaaaccaatctttcacaaaacccaaaagcaagacgtatcacacataatggttggtaacaaaagtcttagaaaaatgtttcttttaccaaaaaaaacaatgtgtactcatgcctaaaacattctaattcatcaattaccacaaacataaacatcatcataactatacaaatgaaatgaatcatatcttatacattgaaaatgaatgtaagataatagaagaaaaatggaaacaaagcaaagccctccattggttaaggttaaatccacaatcaaattccagaatcgtaccatttccagcacagtatcacattacctactgatccagcaacaacacaaaattcgaaaaatcgagaatctaagataagagtgatgacctctaccagcgtggatactcttctgagctcccatggcgatggaatgagagaagaatcaaccatgaagagaacccaatttaggaattggcattagacaagcaatgaccagaaaaaggaggaatttttatttacttatttcttctttcttcttcttcaggagtgaatgaattagcagagaggttaaggatttgatgctttggatatttttagagaagaaagcaagtttgggtttatgttttatctctttcgtctttattcctttttgggcttttatccacgtgggcctgatctacaactgtcaaaaacacattaccatgagttatgaaaaatattactaatcatcatcatttgttttttaaaacttgagtttagctgtttgagattgaggtctgatgagttatgattcgcttatctttttgagttatatttttgtaaaattgttaagttaaaacttaaccaaaaaaacacatgcaacttctaagaagaatattttctttgtcttaaatcaatttgaataatgggagaaaaattgttgacgaaaaaaaaaaataataatgggagaaaaaatgttgttattatctgaattttattcaataacatatcataaaaaatagtttataatgtcttatatatttgtaacatttttgaatttttgaatttatgttttctattttggttaaaatcaaatcctatttgtagacatatatgaaaatgctgattttttttttgtttaaaaaaatgctgaaattttagatatgtttaagttagtattactttcttatattatttaagataattcataaacttttaataaatattactatagttactaggtaatgaacccagcaatatcgcgggagaacttattttcaacaaatttttgtatttatggattaaattacaaaaacaaaaatttgattgtgtttatatattaaattattatgatgatatattcaatatttgaatatacaaaaattgtgatgtaaaaatgaaagaaatatagtaaagagacgtaacattaaatgaatagatgcaactataaatacacaaccataaagtaaaaaatacaactataattgaacaatataattattggaaaaataaccgtaaatatttttaaaaaaagatgcgattaaaaatatacaacagggaaaaaataaatcatcaatattttgacgaaaaattacgatacaaaagtacaactagaaaaagtaatcattagtatttaaacggaaaagttacgataaagtaaaagaaaaaaaataaccgtcaatatataaataaaaacttgcaataaaaaatacataaccaaacaaaataagttaaaacaataaccttaaatatttcaacgaaaagatgcgatgaaaagaaacaattgggaaaaataaccatcaatattttaacagaaattttgataaaaagacataacctaaaaaaataactgtctgtatttcaacaaaaagttacgataaaatgacacaaaaaaaacaataaccgtcaatatatgaacggaaagttacaataaaaagatacaacgaaacaaaataaccgtaaatattttaaccaaattatacaataaaaagacacaacccaaaaataaccgttaatattttaaaagaagattgcgttaaaacgaaataaacggaaaacaataaccgtcattacatcaatatgcattttataccacatattttaatataattcacatcaaattacaacattgagtgggattcaacgttaataacatgtgttactagtggagccacaatatggaaaactataaaaatatacataggaaaaataaaacctaattcagtttgtaaaaagccagagagacggtacttcgtggtgcaaagtgtctccgcatgtgtctttcccctctttacttggagctgaaagctttaatttggggtatgaagaatattttttcaagaaggatcgactctcaaacattcgaaattgattgcacaaggctaacttcgatggtgcagtcacctaaagaatgtcttgctttctctaatcttttagatgagtttggtttgctctatgcttattttccttttttgatcttttctatttttcgattgagtaatactaaggtggattgtttaacacagttttctaaattattattttctgaagtaacttgtgtaaactcttatctttcaaattgggcaaccaataatggagcatgaacagtttttgggatgtgcaactagagtaaatatgcagggtctaaaaagtatttgagtaaatttgaggcccaaaataaaaaatttgagtaaatttgagggccataaataaatatttgtataaatttgatggtcaaaacagaatttgactaagtttgagggccaatttccttttaagtttgtacatgaaacttaaaatgttttgaacgattctggtcatgaaattatattttaattaatgtgtggttgattaaaaataaaataaaaacagagagacgttgttgggattggttatgggttgtaaacccaaatggtgtcaaaacggaaaaaaattaaaagagagagaccttaattaggaatggagggagagaagaaaagatgtgggaatgtcccgcaaaagattgtaaaagcattattttttatgaaatccggtgaatcaaagtaattcatagagttccgtgctcactgctagtagctggtgtttatatatagctaagtagacgtataatttctagaagcacatgtacataaaccatatttctatttttagtagattgtttatacctctttagtaccaaccaggaagggaaagaaacagacgaaagaaacaaatgaagagattgtatatatatgagtaaaggagcaccgtccgttatagctgttttccctctatttagtgcaccaactaagttaacagaaacgtattaacgagaaaaacagtttccaaaaaaatatttatatataataaatcccaaaaagttgtaacatcgaagataatttatgtagaacaaataataattggaaaaaaaaaaacataatgaggatgaatcacaaaaccctagttacaaattttgtcatctttctcctcgtacaaatctcaaacttatcattagaggtaaattcgttaagtgcgtacaacaagaaagactatagatcagaatttaaggtacggccaaatacggttgtacgaatggtcatcaccaacgatctatttggtgtaaagaatggaaacgcgggttttgtatgcgcaaaaggtggtaataaggtatggaagaggagcaaaccaggagaccgttatgtcgtggtcgagtttaagtatgatggtaagatgaggcacacgttcacgcattgccatctccgttctaatttcgggtttgtcaacttcccagttagcgttcatcctgacacatctgctcagtgttaccctagctacgtttgtggttactcggttcggaaagatggggttttttacaagcctgagaagaagctttatcgatggaagtgatttaagatcatatattgaggatacattgaaacttatgggtgtaattactttaagaaaaattctgtataaatttttgtttcccttttttctgtaacgtaaattttacttgaaatcaatgattttgttttggtttatatgatttggaaccttttttttttttgtcaaagatatgattttgaacctacttggatataaaataaagcaaatttggcggatgatttgcaaggatatagtgatgtactgttcttttaatttatttgcatcaatttatatatacatttttggtagattttttgaccaaaaatccctatactatttactattaatattcaggtccttgcaaattctatctcaaccaaatattctattcctaagaaattatacatcgtaaatttgcattaaattcttgaattaactatttcctaaacttttatccttaatcaaatctttctttattgaactatattcgattaagactaattttctaaaatgtatatcaacattaaataaaaatataattttctgtcactatttttatatctaatttattttgactttataatgtaatactataaaaaaacagacatataaaaaaaaatcaaagatgacaaaattatgtaaaagattctgaataagaatgagtggaaactttgatttatcagacatccaaaattcaaagtgttattcggtttactccgactctttattttaaataattaaaactttaaaagtttcaaaatattagatatatttaatctttatcaaaagttaagtattacaattttttaaacttttttaaaagttaaactttatacaaatgacattcacattatacatcatgtaccaccttgttctaaattcacacaacttcttttcgaatctgctgcttaacggcacaggctcctgattgatagtctcacgacaaattttaggtaaacgtctcctactcgctgaatctcgaagaacacaaaaataatgtcacagctccaagaataagcatctccgtctcagtttctgaagcgtcgtaaaacatcgaaaatgcagatgctacgaacccaaaacagagatcgaaatcctctctgattctgaagatcaccattactaggacaagttggagatagacgctcacacacagtaatcttatcgacaatctcttactagcatctagtttacaacccaaatagttaaagaaccacaatgttagaacttggccaaaactcttttttgaaaagatctaccaaaccaaaataatcataacacatctctttctagtatatagcccaccacaaatattaatttcttttaatatacaccaaattttttatccctcattgactagagtcgttttcgttttttacattgatttaatttgtaaatcacacaatggtaaaagcttctgatatatgaatttaggattccagctttcttaggtttctcattacaagtcttccttcttgacttctcatgttgttgttttgtacttaaatttgcttacatacatgattgaatataaatttgcttacatacatgatttagtaaaaatttgcttacatacatgattgaatataacaccggctgctaagcctattttcgagtctaaaatgttagtcaacatgaaataaaacacgtttttttatttgttttgattattaatcaactttaaaatagcaaatattaagaaatttgaaatcaatagttgccaaaacccgtgtgtgatattatactttttgaggctccataataatgacgtgagatttggttgtgaggaagtggaaaataaagttaagcatgtctttttattatgaaatatcatttgtttaatcctttttcttataataaagtatggatgttgagcaaaaaaaaaaagaaggtaatccacctttctccaaatagaaaggaagtaaaggcaatgaatgtgaatatgacaaaatccattgcatttgcttttaaattcttgtaagaatttgaaagaaaaatatcttatcaacttttagagatgatctttgtggccaaagagagaaccacgcaacttaaaaattataaaacaaataattagaacaaaattataaaatttaaacagtttgaagaatataaaaagattattataaggaaactatacttttaataataaaattatatgtttatttctataaatatagaaattagaaaattattctaaacgttttaattataagttattaactaaacaaagaaatagaaaaatagaaaaaggatgaagaaaattataggattagttattaatctttcaagaaaaaagattgtaaatactcatatttatatagaaaaatatattatcatattttcggaacggatcaggaaagatctctattggccctaaaccaagctgttcatttcggctaccgcaagatctccattacttcagattcacttttgttgatcaaagctatcaatttggagtctccctcaaaagaactctacgggattctacaagacatccttcaactctttcttgatttcgaggaaatctctttctttcatatttctcgttggttaaacttaaggacagatgcaattgcaaaatttgtattcaattctgcatttattgtaccagcctctgtaccggtttaatttaatgaaatctatccttaaaaaattattctaaatgttttaattataagttactaaataaacaaaaaaaaaatagaaatatagaaaaaggattaagaaaattataggattagttattaatctttcaagaaaaaatattgtaaatactcatatctatatagaaaaatatattctcatattttctcaccaaataaattaagtcattgattcaaaataattatgaaagtaggcaaatagccatgagtaaaaatcatttatgtttcattcgctagctttatgacgaataattttaattttagttcttcatataagtataccaagaattattgttatgtgatatacttttaattcagaaattttgagttattactatatgatatatttttcgtttaaattatttttaatcaataatgttagtggtgaaaaaaacaatacaacagtaaaaataaatattttttttgtaacttttgaaagataatttctgctttcaacgttgttaattaattttttgataaatttaattttaattacaagaaaataaatccgtctatgggacgggttcttttctagtataatatacaaaaaaaaatgtactaaataaaattcaaccaattctgtagcacgttttgcaaattaaaataaaaatacactataatttttttgtaacctagttttgcaaatttctctagtaagatcgagatgtggtgaaaagtaaattaaaaaaaaaaaacaatggctggctggctaagtatttgtcaaaaggtgggaaagaaacaatgatcaagtcagtagctttggctcttccaaactatgtcatgtcttgttttaaactccctcaagagttaacaactaagttaactagtgcaatttctaattattggtggagttctaacggaaaagatcgtggaatccattggatagcttgggagaaaatgtgtagggataaaggagaaggaggtttgggctctcattttctagataagtttaacgatgttatgctggctaagcaggcgattaatccaatatccaaattctttagtagctcgggtgctaaaaggtagatatttcaagaatattcacccgctacaagcaaaaaaaaccaagctctccatcatttggatggaggagtattttttcgactaaaacattggttgaaatgggagcaagatggtccctaggttcaggatttagtttatcggtttggagagatccttggattcctgacgtcataccacgccccgcaaatggaagagaaaaattcctccatcctaatctaatggttaaccatttaattaatcctgtcacgaaagagtggcatattcctattctacaagaataaatggatccggtggatattccaattatcagaggtcttcctatcaatcattcttataagccggataggttgatatggcatcacacgaaatcaaggagatatacggttaaatcaggtgctcgagagatgacagatacaatagattggggcccaaattgtaatttaataaaagcacaagcttggaaggtcaaagaccctccaaaaataaaacacttcttatggcaaattgcttcgggttccttagtagttacttcaaaattatcacatcgtgggatacagtgtgatataacttgtagaaggtgcgagatggcagaggaaacaataaattatgttctatttgaatgcccacattctcggaaaatttgggaattatacgaaaagccaatggtatcagataattttcctctaagttcagaacttttaaatctagattatctttattggaagttaccactccctttaggtgggggagagaaaacatattgtcacgcttggattttgtggttcatatggaaagataggaatataaaaagttttcaaaggaatacaatctgaacccgcagatatattaagtcacgctatgagtgaaaaattaatgtgggaagaagctcagttttggaaccgatcgactctaccactattacgagttctttggacaacccaactcaatctataaaaagtcagtttgatggctcatggaaatcttcggattgaaatatgggtttaggttgatggtgttttcaaggaaatgatcaaacaattttgtttggtgctaaaagtcttaggaggggcacctccccacttcattcggagttagaagctttaatttgggctatgaaaagtatcatttcaagaaggatcaattgtcaggcgttcgaaaccgattgttcaaagctagcttccatggtacagtcacctgaagaatggcccgctttctctaatctgctagacgatcttggagtgcttcgcgtctctttcccctttttctctctttctcttatcctcgctcatgtaatgtaagagtacactgcttggcacgctcttctagaattttattttctgaaattacttttgtatacactattcctcctaattaggtaactaatcatagagatattagtttttaattaatgtgtggttgattaaaagaaaaaaaaaaaaaagttaaacaaaaaccctagctccactatcttccaccaaatataaaccacccaaagtctccaccgtgcaggcaaatcaacaacaaagactcaaagctttgaagaagaagttgctgaactgttgaatccgacttcaatggattgtcttccagatgatcttattttccaaatattatccttgcttcccacgaaacaagctggtttgacctctgttctgtcaaagaggtggaggactctgtttgctttcagtcatactcttgactttgacaactccatccttttgcgccctaaatgtcgttataaagagtactgtaggatcgacattcaaaagagtttcattgattttgtggatagaacattggctttgcaaggcggtaacaatataaagaagttctcacttagactttttcataatgaaaaagataatcaacatgacgttcaccgttggatatgtaacgcattggaacatggtgtctccgagcttcatgtacgtcatatccaacaaaaccattaagaaactctcggttacctgtttgaactgtcgttattatggtactgttcctagaaatatttcatttgacacaccgaatgttgttgatttcaactactctgattatcttcgtcgtgaatctccacaatgtcacttggattcacttgccaaagctacattggaccttcatttcttcgaagatgacaagagagcagatgtgacagatctcatcagtgggctacataatgtcaagacccttcacttaacttcttctactgtcgaggtcagtacttgtgtgtatggacaatcatctcatgttttggttaagaacaggacatcattcattgtgtgtgtttcaggttatttcggtatgctgcaaaggtggactaccagtgttcaacaacctcgttgatttagtattttctagtaaaaaagaaggttggaaagtgcttctgccacttctgatagagcgttctccaaacctcaaaaatctagttctctcggtatgaagcaaaccatctacaattcttactttatatatatatgattgtggcatgacattagagtagtctctcttctcgatgcttcagggtctggatggtttcacatgtagacgacatcggtttactcgaattcctcacatgtagacgacatcggttataaagatgctgagtataatgaaatgtcaaggatatccaagcgaaatgaaacacattagatatttattagtgaatatggagtgtcttgaagtggtgaaagtttatgttgcagctgaaatggatgacaccaaaaagatgcaactcacagaggatctgttgaagtttcctgcagcttcatctaagctcaagatacaagtcatgtgatctcataagttattatatgtctaatacaattagtaagttattttgtttctttagcgctgagctatattgcttcataagttatggcttattgaacaactttggttccttttagagaaatcgaacagattctttacaaatcatgttacaacaaaagcaaacaacactccactctgagaatccacaaacaggagagtggaccaaatcaacatacaacaaacgtgtgatgaaataaacgacgaaatgcgcctgcacaagaagaatctcatcatgaagataagcacaatcactcaaggctccacaaggttaggatccagacctcttgccttcctcgtcttcccgacaaacagatccttagatttgatcaaaccaggtatgcaacccgagactgtcatgaatgggaactgagcaaccgagtcctttcttcctaaagatattatggcaatgtccggaccaggcttgtaagtcgacatcttcttctcgttcccaccagacatcaacaactttatgttctttgtagctacagaggcgtgtttctcagcaatgtagccttgtttcatctcctgtcataggaatcatatacatcttcagctgatatttatagtaactaaagaaagaagaaaacattctgatatcacttaccgggacatcagtaatatcaccaatagcgaatacattcttgcgacccttaactctcaagtactcatcgaccataagccttcctttgccatccaagttatctttcagaacagttccttttagccattctgaagacaaaggttttccagtacagaggaagtgacaatccgcgtgtatcgtctctccacccgatgttcggtacgttttactcccatctgaagctgaactcaaatcaaccctttggttcaatatcacttcaactctcttggacttcatccagtctaatgccttgtctgcagctttctgaccaacaaattccagcaatctcggtccattgtgtactatagtaacctttttctcagggaaatcgacagctatctccgcagcgagctccacacccgacggacctccaccaacaatcagaatcgactcagatgacttgatcttctcatgttctgcaaccaaatacttcagatgtaacaaaacatatacctaaccaaatacttgcactcgaagtaagatcatattcatacctgtttggtattgagataacttctcttgcctagttttaggaagcacatcattgtgaccagtagcaataacaagataatcatacccaaagacaagaccatccgcggtcaaaacatcggtgtctgtgatattaaccgctggagaagtcacaacacgaccattttgtaaatacttcttgtggtttatcaccgatctttcagcaaaagctggctctaccattgaccttaaacttgcccaaataatctcaaaatactccttcctaaattgagattaatcaagattaagacacatctaaactgatcaaactatgtcatgtcctaattgaaattaatcaagatttaagacaaataaacacacaatgtctccaacatttgaaattaatgaaccaaaagcttacggatcaatgagggtgagatcggaatcgaattgaagaaatttcgaagcgagagagccggcgattccgccgccgataacaatcactctcttcccctttcctgatacagattctgttttttccatgtcttcgtgattcaaaaatccaaagcttctcgaatgttctccaatttgagtttcgatttctatatcaatcagatttatatacaaacaccggtttaagttgacggagagagagaggaataaacttaattgtgtggtttacgtgttgaggtgacgtcaggagcgacgtcgccgacggcggaaggatcctggcgtggttccgtgatcttacgtcattactcaggtaagccaactcattattattctttttcaaaatattatgggcctttaaagttgggaaagaggcccattagtggtataaatttaagcgggccattgtttgctacccattattgggttaaggtacccggtttaactgtatccgtaccgaataaaccaaatcgaaacgagaaagtaagaaatgtgattggatttcagtttttttaggggacaatcccattaaaaaaaaatctaacaaaaccaacaaatcataattgcaacgaattattaacaaaatattctaactaattcatacatttctcatttaaacgtactcgtacctagtaatattatagtaaaccaataaattaccattgcaactataattagtctgtttgtttcgtcaccgtatgcgacaacggtaaattttaccacagattattgttcgtttcgtcgctgctgacgtataatttatttttgtttgatgatgctgacgccgactctgccgttgccgcagatgtttatgttaagggcaatgcaaatctaaatccaattaactccaatggttatataaagagtagagaacaacatatgatttaaagcaagtaagcattagtgatttagaaccatatagtgaaaaagaccgtaagtattagttccaaacattcagacccattatacagaaacagacatagaatttggaaatttagaataaacccaccaaactaagagtagctaaaaaaacacaaatcaaaaagaaactcaaaattcccaagagatttgaatcagtgaataacaaaagtacctcggaatagatatttaacgtcgtatcagaagtaactaacgacgggagatctaattgagctaaaatcaccgaaaaagcgagattgagacggcggagagagattagtttcaaagaacttgagatcgatgactataagaaagaaatgatgaaagaagaagaaaaaataaggttaggtttgtttgtagtttcccaaacatagtaaggatagtcttgtcatttaccacatataacgcagcttttaatcgtttaacgctgattttaattagcgataataatttttagccgcaacgacttacgtttactgcatcggcatgcatccaccaaacgaacatcaccatttgtgtctgccgctgcaacttacgacgaccaaacgaacacactaaatttatcaagttataaaatacaacacctaagattctctgttctagattgatagttcgtagaggtggcaatgacttgctagctctcttttgttttccaaaattatttaccacctcaaaatcttgaaaacttttaaaccacaagatgtatgtataagaagtgtctctaagtttagcaagtggtatgaatgattaagtatccttttactcaacgcttacattttttttttcgttttttttttccttttttctgtttccaaaacttttaatggtatatcttaaactaagttttttcgtaatttatggtacttttttcgttgattttacattttaaaaaaaaaacagaactttcaatactaaataataatatttgagattttaaaaatgataaatgtatgagttgacctataatgctaaaaacctacaagtctacaaaaacacatgaatcaatatgcataagctataaaacctatatggacttgaccttaaaacctatatatcttgaccctatcctaaaatttaggtttcaatcaccatatgacatatctatcacatttcgagcagaatctaaaaaacatatcctatttatatgattttgatttttggccttaaaacccaaacacatcctaaactttaggtttcaatcaccattgacatatctacaatgttctatcgcatttcgagaagaatctaaaaagaaaaaactgatttgaagctttaatttattatacaattaaataatttgttagacttttaaaggatttagtcacgttgagggatcggccacgtcatttataagaataaaataatatcaaatcattatagttattattagtaacagtggtatagagggacaaggagataagcaggtatcgtttccattaaaacagctggatttgtcggcactcattcccattattgtatttatttcaccatatctgtcttatgaccaaaactacaataaacatataaataaaataatacgcaaataaaacaaataatcctcaacattttctgatttttaacaaaatctgtcttaaattataatttattttaaaatgttgatcacactcaatttaaaagtattacaattttcacaattggaaaattgttattagtgaaagtactacattatataaaataccccaattacgtcttgaataacctaaaagaatacaacaaaaaatagtttgaagaaactcattattgtttttaattaaaaaattgaaaacttgcttacaacagatttgatttgaaaatgtcacataaattttatgttcactttgtttataagcaaatgtattataatcaaattaatatggaaactctttaaactatatctgattagctatcttattatatactaataaataaatttaattagtaataaaaacacgttgcataattactttaacagaattttgtataaagttctcatttatattaatggtacttaaagaggtattttataaaaacaattatagggaaaatctttaaattgattatattgaataaattgaattattaagaaaacacgttgattaattagtttaactacacaaaaacttaaattgacttaaaactactctcctaatctttgttaaaccaaacaacccaaataatttactctgaatctttttttgccgtctagattcgtactctgcaacaagtgaactaaacacagaagaagaagaagaagaagacgagacgacgaatccagaaacagagagagagggagagagctttgaatatcttattgtacacaatcttcttcgcatggaagatttctgtttctcgtcactctgatatccaaaaatgtctggatctgattttgatttcgcggcgtttcgagttcaatgctaaaacatcgaagcggtttcgaatctctgagaatcgaaggaaaacgaagcgtgtaggttagggaacttaagattacgttgaagagaagcaagttctcttaaatcgcaactttggagaagtttcgttgttggtttttggtaaagcgatggagtcacgaatggatcagtacgagcttatggaacagatcgggagaggagcgtttggtgctgctattttagttcatcataaagctgagagaaagaagtaaaattggtttctccatttataaactcttttctttgaagatccttaggtttttgatttttgtgtattggtgtgtatttttaggtatgttttgaagaagatcagattagctagacaaacggaacgttgccggagatctgctcatcaagaggtaaaattcgaatcatttgaatttcgagatttcgataaggactaacattggtgaaattctctagatgtctttgattgcaagagttcaacatccttatattgtggagtttaaagaagcttgggttgagaaagtaagttttacatcactttgatttttatggatttaaagtagatttggttaaaggattttgataggagctagatttgaaaaatgcagggttgctatgtttgtattgtcactggatactgtgaaggaggagacatgtgagttttaactttctctaaagattttgtagttaagttgtctttttttttttttgttgttttgttcacagaagtcaaagaatgtgttataaatcttttggtgttgtgatgggttttggttacagggctgagttgatgaaaaagtcaaatggtgtttattttcctgaggaggtactgagattacttttcacctgaaaggttctctaacaaacaggattttgtggttgattttttttttttgttcttatgttgtgcagaaactttgcaagtggtttactcaattattattagctgttgagtatctgcattctaactatgttctacatcgggatctaaaggtaaaaactttggcgcaatgttagttgtttgaatcactgtgtcgtgcttagttttttatggacttatttgtggtttgtacttccagtgttccaacattttccttacaaaagatcaagatgttcgccttggtatgtttttgatttatgttccactcaatgtgacctgcaatagaatgcaagcggatttttaaataatgtttacatttgtgttgtatacaggggactttggtcttgccaaaactttgaaggcggatgacctaacttcctcggtatgttgtaaaagtctctgcagtttgtgcatgtaaaagatgctgtaggagaacaaattagtcctggtagtggtagattgcggctttataagcacattagcaaatgagcagatttgacatgggttatgcaaacaaactttgatgcatgaagatatctattgcctcgttttcaacaaatgaattttaggaattctacatcgaaaagagataatatcttactatgatttataacagtcataggttactcctctcattgccatttggttaggagatggaacacaacctccataatgattattattcttaggattgctctcaagcttctgaactaatacttagtgtgatagaaaatggtgtttatgactcatggaattttatatttaggttgttggaactccaaactacatgtgcccggaactgcttgctgatatcccttatggttttaagtcagatatctggtccttaggtatgtgtaaccctgtcctttgtaaagtttaagatttttgttattgtgaaactaagcctgtatgctggtgaacaggctgttgtatatatgagatggctgcgtatcgacctgctttcaaagcttttgtaagttacttattcacttagatagtcttaatatctcccgtttgtaacattctttaagagaaggttaatttctctagaagagaagaaaatgttaagagctatatatatagacttgtgtatatcactgaagttaatggatggagtattcttggttcccctgcatttgatctcttcaaagtatcttatggcatttgcttttatgttatatatgatttcaggatatggcagggcttataagcaaggttaatcgctcctcaattggtccgttgcctccgtgctattcaccatctttgtaagattctctttctaatgagcttgtgtttttttatttattagtatgccgatttatacttataacatgccagcaatataaaaagatagaacagaacattttggaatcagcgaaaaggatgataaatgcatctgtaaatgatcgaatatttcatcaagtataatgtgttgaaaggcctggttaaatgactcttttctcttctttttctgtattgttttgttatgatattgcagaaaagcactcatcaagggaatgttaaggaagaaccccgagtatcggccaaacgtatggtttttcatgaaccagaaattgtctgcttaaatgcatgcagcctccggagtcaaattaactaatcataaatttttcttcattctctgttcaggcctccgagattttgaagcatccttatctgcagccatatgttgagcagtaccgtccaacgctttctgcggcgtctataactccagaaaagcctctcaattctcgcgagggtcggaggagtatggctgaaagtcagaatagcaatagttcaagtgaaaaagataacttctacgtgagtgacaaaaatatccgatatgtggttccaagtaatggtaataaagtcactgagaccgattcaggttttgtcgatgatgaagacatcttagaccatgtgcaacaatcagctgaaaatggtaatctccagagtgtttcagcaacaaaaccagatggccatgggattttaaagcccgtacacagtgaccagcgaccagacgttattcaaccaaggcacccaaaaactatcagaaacatcatgatggttttgaaagaagagaaagctcgagaaaatggttcacccatgagatctaatcgaagtagaccttctagtgttccgacacagaagaataatgttgaaactccatcaaagattcccaaacttggtgacattgctcatagctccaagactaacgcaagtacgcctattccaccatcaaagctggcctctgattccgcaaggactccaggatcatttccaccaaagcatcatgtacttctcagtccctcactctaatttctaacttttgtggatattctaaggatttcatatgacaacttcatgtttgcagatgccagtgattgactcttctccaaaacttaagcctagaaacgacagaatttcaccttctcctgctgctaaacatgaggctgaagaggcgatgtcagttaagcgtaggcaaagaacacctcctactttgccaagaagaacgtctttgatagcgcaccagtcgagacaactaggagcagatatttcaaatatggcagcaaaggaaaccgcgaagctacatccatctgtgccatcagagtctgaaactaattctcatcaatctcgtgttcatgcttctcctgtgagtacgacgccagagccaaagagaacctctgttggatctgccaaaggaatgcagagtgaaagcagcaactctatctcgtcgtcgttgtccatgcaggcatttgagctctgtgatgatgcttccaccccatatattgacatgacagaacatacaactcctgatgaccacagaagatcctgtcacagtgaatactcatattcatttccagatatctcctcagagatgatgatccgtagagatgaacatagcaccagtatgcggctgactgaaattcccgactctgtttccggtgtacaaaacaccattgcccatcatcagccagaaagagagcaaggaagctgtcccactgtgctcaaagatgatagtcctgcaacattacagagctacgagcctaacacatcacaacatcaacacggtgatgacaaattcacagtcaaagaattcgtctcctctgttcccggacccgcaccattgcctttgcatgttgaaccatcacaccaagtgaattcccactcggataacaaaacaagcgtaatgtctcagaactcagctcttgagaagaacaacagtcattcccatcctcatcccgtggttgatgatgtcatacatgttattcgccacagcagtttccgagtagggagcgaccagccggtcatggaaagtgttgaagtcggtgtccaaaacgtcgatatggggaaactcataaacgttgtgagagatgaaatggaagtgagaaaaggagccactccctcagaatcacccaccacaagatcgatcatctcagagcctgactcaagaaccgagcctcgtcctaaagaaccagaccccatcaccaattactcagaaacaaagagctttaactcctgctcggattcttcaccagctgagaccagaactaactcattcgtgcctgaagaggaaacaactccgactccacctgttaaagagacgttggacatcaagtcgttcagacagagagcagaagcgcttgaaggtctattggaactatctgcggatttgctggaacagagcaggctcgaagagctagccattgtgttgcagccgtttgggaagaacaaagtttcgcctcgagaaaccgctatttggttggccaagagtttgaaaggaatgatgatcgaagacatcaataataataatagcagtggcagctccaggaattgttcatgaaggtaaattatcatacaagcatttgcaaccaaactctcttctgtgttactttttttctctataacatttatattgtcgtaaaataacaattctttcattacaaaaaaaaatcacaaaagaaatcactcaaaaaaaggaaaaaaaccttcatttcgaaattttgcaagtacagatttgtctacattattgtatatagagactgtgattattggttggttattttttcgtcttcactaacatatatttgttggtctgtagtatattgaacaactatgtgaatggtgaaagaaaaagtggactggttcgactttagtttggtacacaacataccgaccaacccattcaaagccatttttaagaaaattttctttgaggaatataggtttgtttgtttctcaatgctacatccaaaatgtagcctccagatctgcatctacattatgtttgttttctaagtttggtgtaaaggtcttgctcgaggatagtactcaagagttacattggatcatgtgttccagactcagctcttgtatctcactcgggatattagagcctcataagaagcccaagaagagtttcatgagaaaatccacaaacccatgtaattaagttatctaaacaagagaaattataaatattatcaaaattttggcaatttgtgaaatttcactatttattactccctctattttttaaagattgattatttagaaaaaacacatattaagaaatcatattaaaagttaaatataaaattattatttttgtgctttatatttttttataactttaaaccaatgatatttaaccatttttcttgaaacttatcgttcaccaataacaatcaataaatattgcattgaaaaatgtaacaccccaaacccaatcccttgaatccaccctatttgttttgttaaaaacaaaagtcaaaagagtccattgaagcccaaatgaagcaagtcacaaaataataagggttttgttgggaaaatggtcattaaattcccttactatttgaaatcgacacttttattcctcaatttttatgtgaacaaattaattcctcaatgtgtagttgactggacacttttggacaaagaaatagtcaacgtttattatttaacagcaacgttaaaaactcgaataaaaacttcatcagcccagaaaatcccaaattattttttttcttcctccaaattaaaacgtgttgttttgtgtcattttggtttaatcatgttgttatagtctctcttgaatcgacctcttaacatctcctttggttcaattttgttgtctttttggttctatattggaatgaaacgatgagataaaatggttcaaaataaaattgtatttgtcttacagaacaatgttaaaatgaacaatcatgatgaagtcttacacaaacaaatatactgaggcttaaacagaatatgcatggactaaaaagagaacccaaatcttcattgtgatgatcccccttgtgatgctcttacttgagaagagcctccttgtgatgatccagcttgagaatatccctcttgagaagctccaacatgaaatgaatctccctaaaatcaaacaaaccattagaccaattaagcaaaccattacaccaccaaacaattaatcaaatcattagctcaccaaaaaaactacttacataaataccatgttcttttcttggacgacctcttggtcgtgttgcttgaggaggggcagttggattatgacacctagtcttattatgtccttcttttttgcagtttgaacatgttataatacgaccatggcgagataacttgtacttattagatgcagactcatgtggagactttctcctagcatgatcatgtggtcttcctctgttgaatctaggtgggggtggcagaacaggtaaccttcccaactgtggccacatattcatcccttggactggtttaattcctttctcgtacaatgaacgccatcttgaagtcaagtaataatcagagacataatcattaagatttaactttgtggtgttgatgacacacattgcatgcatacaaggtatgccattcaattgccaatagccacaaccacaagttttcttttccatgtcgacacaaaaaatatcatctccacattcaatctcatgcaagtaacctgtggtcatgtaccttttcaagtcctttgctttttgcctatttagttcaatttctctggctgctcttggtgtgaacctcttcttccacctgttagttataattgttctcttggcattcctctccatacatttcctcctcacttctgttacaaaatcaagtaatggcttccttcttgattctctaacattcctattgaaagactctgagagattattcagattatcattgcaacatgatccaagtttgaagaaagcccgagaccatgttgttggtgcagtgcattgtagtgtgtcataagcagcttggttgtacctcttcaatacttctaagttagtcgcaaatgatgccgtagtgtaactccttgctattttccagaacatacgctcaagttcaatatccttatgtgtcttcttccagttttctaaaatgtgtctagcacacaatatgtgttcaacttttggcagctcatcacgaacagcatttagcaaaccctattaccacaagtaaaccttattagaaatttcacaattaacttacctaacatcaaaatgacaaattgagaacaagaaacttacatgatgcttatctgaaatgattgtaatgtcagctccgtcttcaaggcttaaatcttttttcagtaatcgtacaaaccacatccaattatcaatatcctccacctctacgacagcccaagcaattggaaatatcctgttatcaccatctctaccaactgcagctaacatttgccctttgatatcccatttcataaatgctgcatccaatccaataatcggcctacatgactgcctccaagatgatttcgatgcttcaaaacatacatagagacgataaaatctttgtaagccaccgggaattggcccaggaatcgtctcaatctccatcgttgaaccatcattagaggtacgtatctcttcttgataatcccatattctagcaaaatgggattcatggctagcccttctctttttttcttagcaacttcttagctctccgacactgatgcacaatagctatcatattatactctctcttaatttcatctaccatctcctgtgattttattttaggattcagtctcagtctttcttcatacaactgagaaatagttccgctcttcaacagctttgtgtaaccagatcttacacaaacatgctcattccggaatgtgcttattacaagcttgcttttactcttctgaaaagaacaatacaccatccatggacacttttcttcgatgtgttgtgtgcactttgccccaagtctattagatgatgacttaaacattttgatatcatattcggttttaagagaatatctgaggagtgcatacttaatttcatttgcattgttgaatgtcttatgcaatgctaatagatcatcaggttgaactccatcagtgaatggtctctcagcttcctcttggtcatcgtcggataatggatcagggatcttgtcgtcgtcccaaatgtcgtctccgctgtcatcacaattttcacctgttgtttcttcacacgcatcatgcccaaaatggtcttctaagttgttgcagatttcaacatcgatgaaaccttcatcttcttcctcttgatttccagccaaacatggttccacctctgtatatcctctgttatcttccacgataactggacagtcatcttcatcatcactagaatcatgagattcggctccttcgccttcaacttcgtctctctcctttgtgacttcgagttcgattcgggaatcacgttcaaattgattttgaagcttcctctttctttttgtcatggtagtgtcaggaatcactcttaactgaactcaatttatgggttcgtcaatttcagaattgcttaaaaaccctagatttcaatttgggggaagaagagaataattgggaatttttatggataatgagatttttaatcgggcttttaacatagatgttaactaattaatgttgatttttttttggtccaaaaaaacccagtcaactacacattgaggatttaatttgttcacatataaattgaggaataaaagtgtcgatttcaaatagtgggggaattaaatgaccattttcccgggttttgttacatgtgtatatatatatgtttatatcgtcatcttcccgcagccttctcatgtcatcatctccagcaactgattactaacctaagaatatcaaatcaacttgatcccaagtcaccatcaccattgacgttgagatcggagttgttggagcgtatggtttcgtttttgatcacgtacaagtgtggagtgaaagcgaacgtcacggatcatcaccgttaaacaacggcttgattgggtaaggaaaacctaatctatttatgccttctttctactggaattgtctctcttagccattgaatttgtagcagttagatcaagttagcttttgggttttttgtgtgaatatgtgaaagaatgaaacagttcaagtagtggaattggtgatccgtttcccgtcacgtccgaaggagtttgggcgagttcttaacgattctgaatagatcccgttcccacgttttcagaacagttttcggattcaaaatcggaggtaagatcgatcgggaaatcgcgtttaaaattggtgattaatcacagttttcagagccatatttttctaagtatctgaaactttgcagtttcaggtagaggctttaaagatctatttcccgtcgaatctgaaggaatcagatcgttaatttggtgtctatggaaagatcttgcttcaagaaacttagagtagctgacagcttgtccatcggatttaagctccatccgtatttgacgttggaagtttgcccaaaatcatctcaagttgcagaaacctaaatatcagttctgatgcatcatcttcagaagaacgttggagattcatgtaaagtctgatcgggatgaaacttagtggagttattcatgatactactggctacatattcaaccgtgggattaagtttctaacggttagtctttgacttctgcgtatgttttcgagacagatttatatagagtaaatcataaccgagttttattgtttgatgacgcaaatgaactcggcttgagctgaagctttgtaggagcttttatgactcatggattcaggtcctaattgagggagaatcaagttagagcttatgatcatggttacagtaaagattgtctaagggaaaagagaaggagaattgagttttcatcttcactaggccaaggtgagggtggtatttgcgaaacatatcatcattttcttttgttatgcttcttgacgcatgatatgtaggcttagatctgattgtgtagtataagattacatgatgatatgattttatgattgttgagtatgatgtgtgataatgtgatattatgtataatataataaatatgtgtatgttaagtatgattatgagtatgtatgtatgatgaatgtaagactggggagaatcgagctatgggccgtggtctccctagtgatgtggacagtgatggaccgacgggttaacagctggtcaagaacggctgacaagcccagaatgggagtgtctgagccacgagggccagcctccacttatgaggttctagttgtcacgaggatgactggaccttacgatgtgtatgtttatatatatatatatataagatgattgttatgaatttgttgttagaagttaaaccacgtgaggttgattgcgtgtgtctaagtttatatgttatgatgatggttgtatagctttagaaagtgttctacgtttcagtgggcagagttgattcccctcactgagtattctttactcaccctttttttttccttttttcctcaggttagtaagcgtgaggaattgtgtgcaatattttgttcgtgtgtgaaattaaaaaaaatgttttggcaagatcagatgaataacatgccgtcttggcctatatggcagggcgggtgttacagaaaacctaaaacatcaatcttttagaaactatttttttcctaaagaaaatcaatcatttaggaaaagggtgagtatatacatcataaaaaaacgtgttaacacggaaaagcatggtcattttaatcattgtatatggtcatatggatattatcacagtttaacaacacaaagaaaattacatctagatgtatagataaaagccattaaaattttgattattcttttttttttaaaggaaacaaattgattattctaggtgacaatccgtttgcacgtactcgttcgaacttcgaagtaacttgaaacccaaaagctataatcataactgttggaatccctttatattaatattatttgtagtagataaatcgcaaacatagagcttctcaaatttcttaaatctttgaaagagggaatggatgaagattaggtttaatgacatgtatgatcagcctcacaagcttctttggtaggtgcgcataatctaggtctaacatttcggcaacaaaaacatttttttctgccctcacaacggcctggcaagcactttggtaagtttaacttgcttgcctcaaaaccttccaagtttgtacctgtactagattttaacccgcggtacaccgcggagacaatttatttttttaaattagtatatataaaattttgcaaattatatctgtttataaaatatttttattttataatttacaattgttattaagtaacgtccttccaaacccgttccgccaaacccgtcatgtaaaataaaaccgcggtaccccgctaacttaaatttataattaaaataaatattttacgggattgcaattgtgttttagtttatcaaacaaaattttgttttaaataattgtcgaaatctagttcaaatttggagaaataagatttagtgaattgataaaaaatgtatttagttgcgtgttgctcattttaagggattgcaattgtcttttgggttgtcaaacattttttgttttaaatagttgccgaaatctagttcaaagtttggaaaaatctgcgtgatatatgggattggaatatatttggaatatttttcgtttgttaataaatttattgctgaaaaagaccaataattaaaagccagtggcagccattgtaaataagttgcaactccaggatttatttcacaaaatggctgcaaaaatgtatatatagatatatatagatgttaatgatgggttaaaattcactggatatccgaaacccacctaaacttttaagcccatagatctattttttgtatcagaaaaattacgggctcaaaacgagcaggtcttatttacttaaagtcttacacgggttttaccctatcagattatgggtacccgtggtttttttttgtgagttaaaactaagtcgtttttatattgttgatgatatttcaaacatgtctgagttctaaccatcttcgccgccgacattctactccgaccaatccaaacatttccgatcgtttcactcttctccgactctctttccatatctcttaacctctttttcctcactaactattagcaattaaatctcattctcattaatttggaaaataatacaattgggggtttatatacaacttaaccaaaggcctaaaccataagccataaaccaaaacttaaaccaaaactaagattgatttatagaaacatcaatctgtacatactctctacactataagaaaactatatacaataatagtccccctcaagatgggacaaaaagatttaggagacccatctggctcatgaaaagcttgaagggagcagggtatagaggtttggtgaatggatctgcaagttgtaaatgtgtgttaatatgaagtaacttaaacaaacctgaaactaacctctcacggactctgtggcagtcagattcaacatgtttggtgcgttcgtggaagacagcattgttggcgatgtgtatagctgcagtgttgtcacagaagagcagtgtaggcttggacaaaggtacttgaagttccctgaaaaagaaagtcaaccacacaagctcatctgtagcaaaagaaagagcacgatactcaccttcagcagatgatttggagacgacttgctgcttctttgatttctaagatatgagagaagtgcccaaaaacatgcaatagccattggtggatcgacgtgtatccttgcaagactgaaaagaagcatctgcaaagacttgaagttgtaattgagcttgtgaagagtaaaacagaccttgaccaatggtgcctttgatgtagtgaaggatcttcatgactgccatttgatgagcttgacgaggagcatcagagtattggctgagcttgttaacggcaaagctaatgtcagggcgagtgatctgaaggtacatgaggcgaccaatgaggcgtctgtaagcttttgcatcaacaaagtcaccaccagtctctctggaaaaggtgatactaggatccatagggacactagaaggcttgcaacccaaaagacctgtttcatcaagaagatccatggcatacttctgttggcaaacatgaataccagcagcggagcgagcaatttccaagcctaagaagtacttcaatggaccaagatcccgtagcttaaaacagtctttgagttgagactttagttcatcgacagcagcatcattgttactagctataataatgtcatccacataaactaaaacacacaagtaaatgtcaatagatattttcaagaaacaagtgtgatcagaatgagtctgaacataacccaaaccagtgagagtcgctttaaatttcagaaaccactgtcgtgatgcttgtttgagtccatataaggatctcttcaatctacacacaacattaggtggaagagagtccccctgtctgttagcatacccaggtggaagcttcatatatatttcctcatccaaatccccattcagaaaggcattagagatatctaattgatggagagtaatgccatagatagcagagagagctaaaatgagcttaacagaagtcaacttacagacaggagagaaagtatcattgaagtcgatgccttcttgctgtgtataacctttggcaacgagacgagctttgaacctttcaatagaaccatccgaattatacttgatcttgtatagccatttacaaccaataggctttttattcggaggcaaagtgcaaatgtcccaagtatgattagtctccaaagcaacaacctcatcatccatagctccacaccacacaagaatttcttttgcttcagtgtaggttgaaggttctttggttttgtcaatacaagtaaaaaaagcaagatgaatttctgaaattttatgataagaaagatattgggagagtttatggagggttgaagaagttactgaattacagtaataatcttgaagataagcaggctttttggttctcctatgtgatgtttgaacagaaggtttagggacattgataggactagcagaaggcatagtctctatagaagatgaggatgtagaagcatcctgatcagatataataggtgacataggagaattgctaagaagatcagaaaaaaagttttgggattcctgagacaaatctgtcttagcaaaaggaaagagctcttcatggaacacaacatgtctggatattataatatcattagtttccagatcaagcagcttgtaccctttgtatccagaaggataaccaagaaaagcacaagcacgagctcggggatcgaatttaagcctattcttgggtgaggtcgaagcataacaaaggcaacctaaaacttttaactcgtcatagttaggtttcttctttgttaagacctcaaatggactgatgtcctcaagcacaggagccgaaagtctgtttataagatgaacagcagagagcacacaatctccccaataaggaagaggaagatgtgattggaaaagaagcgccctagcaacattaagaatgtgttggtgctttctctcaacaacagaattctgttgaggagtttcagggcaagaatggaaagaaacaattcctttagattggaaaagttgagtgaaattgaattc

SEQ ID NO: 1351 - DNA, 79646 bp, Arabidopsis thaliana
aagcttcatatatatttcctcatccaaatccccattcagaaaggcattagagatatctaattgatggagagtaatgccatagatagcagagagagctaaaatgagcttaacagaagtcaacttacagacaggagagaaagtatcattgaagtcgatgccttcttgctgtgtataacctttggcaacgagacgagctttgaacctttcaatagaaccatccgaattatacttgatcttgtatagccatttacaaccaataggctttttattcggaggcaaagtgcaaatgtcccaagtatgattagtctccaaagcaacaacctcatcatccatagctccacaccacacaagaatttcttttgcttcagtgtaggttgaaggttctttggttttgtcaatacaagtaaaaaaagcaagatgaatttctgaaattttatgataagaaagatattgggagagtttatggagggttgaagaagttactgaattacagtaataatcttgaagataagcaggctttttggttctcctatgtgatgtttgaacagaaggtttagggacattgataggactagcagaaggcatagtctctatagaagatgaggatgtagaagcatcctgatcagatataataggtgacataggagaattgctaagaagatcagaaaaaaagttttgggattcctgagacaaatctgtcttagcaaaaggaaagagctcttcatggaacacaacatgtctggatattataatatcattagtttccagatcaagcagcttgtaccctttgtatccagaaggataaccaagaaaagcacaagcacgagctcggggatcgaatttaagcctattcttgggtgaggtcgaagcataacaaaggcaacctaaaacttttaactcgtcatagttaggtttcttctttgttaagacctcaaatggactgatgtcctcaagcacaggagccgaaagtctgtttataagatgaacagcagagagcacacaatctccccaataaggaagaggaagatgtgattggaaaagaagcgccctagcaacattaagaatgtgttggtgctttctctcaacaacagaattctgttgaggagtttcagggcaagaatggaaagaaacaattcctttagattggaaaagttgagtgaaattgaattcttgagcattgtcagacctaacccccttaactctagtctcaaactgagtctctaccatagttaggaaactaggaaatatatgtaagacatcagacttgtttttcatcaaatagacccaagtagccctagaatgatcatcaacaatggtcaaaaaacatttgtaaccatcatgagtaggagtagaaaaaggaccccaagtatctatatgaaccaattcaaaaggaaccttacatatatgttgaccagaaataaaagggatatgtttttgttttgccaaatgacaagttttacagtgatgatttttctgtatattaggttcttttgaaaagtttaaaagactggaaagagactgaagtttataaaaagaagggtggcctaaccgtttgtgccagagatcatgtgatgtgactgaggcagcaaccggtgactctttatttaagggaagagcaacagattcaatatccaggaaatataggtttgccacttgtttacccaacccaatcattaagtcccgagtaagatcctgaagaacacaagaactctcatcaaaccagactttacaacccatagacttagtcaaacaactgacactaagaaggttaaacttaaactggggaatgaaaaggacattttggagcacaagatttctaaccaaagtaacagttcctataccaacaatgctcacaagaccaccattagcaagattaacattggtgttttcaagagttttgaaattggtgaaggaagttttatcatggcagatatgattagtggctcatgtgtctataacccaagcgttaatagcgatgagattgctatttgtagaacaggcataaggtctatcaacactggtaaaagaacaaatgatagagggatgaaagataccaggtgttggaccagtggctgatatagtagggagggaaggcattgaaacagcctgaacttcaggtgtgggagaagagctatgaattctggtgttgaggaaggagacaatcttctgcatatgttctgtggataggtcatcatttcctatgacattgtcaacaactgcattagcttcaatatctccatccaccaagacattagccgcagtaactggagccttagaagacttgaaacgtggatgaccaacaggatagccatttttcttgtaacatttatccatgacatgaccaacacgtccacagtaagtgcaaattggtttgtcctttcgctgaaactgaaaaccaccagaaatgccctgagctgactgttgagagacttggaaagctgtagaatccaatgtaccagtttgagcacaagctgacctctgagaatcatattgatccaacatattgtagacctcagacaaactaggtaagctcttcttcatcaaaatctgacttctgacagtatcatagttgctattgagtcccataaggaaatcaataacacgattggtttctctttcagctaacaaagcttcaacagatcgagcagtaacctgaagactggatagttcttcccacagagattgagtcttagtatgataagtagagagatccatggtaccttgacgaagagaatgtatctgttgacgcagcttgtatagtcgagggaggtttgatttgtgaaaacgagtatgaagatccttccaaatctcagatgcagtcgcaaagtacaagatgctggagtagatctgcttcgtgacactgttcaataaccacgatttgaccatgttgttacatcgcttccaaatcaggtagtatggatcatattcctcaggtcgaacgatagtaccatccacaaaaccaagcttattcttagcttcaatactagtggtgatagccacaatccaagttccatagtttgttccatctaagagatcgggaacgagaactaaacctggatgatcggagctgtgaagatggtaaggactgtggatgttgtccggtgagtcagagatttcaaacggatgagcagcggaacgagaacgagcagcgagaggcggatgcatagaaccagaagctccatacacaggcgatgcgctacacgatttgtcatcaacgatcggagatgcaataaccggtggatctggtgtagatgagcgatacttggagttagtctttcgttttcccatcgagatcgagagaaagctggaaacaacgcaaaggagctgaaaccgagctagatccgaaaaggaatcgagagaggacaagtcacaagaggtctacaacggagatcgagaacggaatgtgcagaagacggtggcgaacaaactttttcggtgaagaaaagtcgtcagcaggagagagagattgtattttgctctgataccatattagcaattaaatctcattctcattaatttggaaaataatacaattgggggtttatatacaacttaaccaaaggcctaaaccataagccataaaccaaaacttaaaccaaaactaagattgatttatagaaacatcaatctatacatactctctacactataagaaaactatatacaataatactaacttcaccgaaacaatgatcaccacaactacaataaccgaaattccaatcccggttaaaacaatccaccaccaattcttccgaaccaacactggttcgtgtttcggtttgactttctcctggtttaggacaacaagtgcgtaatgcccatgagaattcgtagtggcacactcgtaattcacgctccttcgtattgctgatgttcaacaacaaaccattatccccaaagacgatgcatttgacttttgaacgatcacgagaagcgtgaggattgaatttgatcaagattggcttgtctctcttgatcgaaagattcaaaagattcaatttttttagatcattcatgttcgtggcatccggtgaatccaataaccggagaaataaatgagtaattatcagctaaccggaagtaaaccgatgaagagtgatcaaagaaactctcaaagacaaaagctattcgataaaaaaaaatcaatttatcaaaatcaacattttaagtaatttaaaatcaaaataatatatttcaatttttataaataaaactgaattttttagataaatatataccaagatttagataaatatgaaaagagtataaaatacaaatacatataacatataaatacatataaatccaaagaagaaaaactcaactataagaatttgggtactcacaggtaacccgaaacccatcgttttttttttgggtttactaactaaaactcaaaacccattgggtttttcaaattcggattttaaatgggcgggtttaattcgagtttggactgggctggtttttttacccacagcaacatccctatgtatatatataaaggataaaccatttaaaagactacgtataacgaattactctacaataaatgatgtataaaatcttaaagtttatgtggataatacatacattcataaagactggcaaggaaaaagaggatgataaaaaagatagcaaatttggatgacgacattttgattgttctctttaaaccttttgtggcttaatgatagaaaaccttacatgtaaaaacatatatagaagtttcagtggcacatcttttgtagggtgagccagaaaaaactgtacaatttgtttgactagattaaaattttccttttcattgtaaaatattgaagttaaatctttgttttatggatcaaagaatttattttggattttatgtttcgataccaatttataaatcttgtttgatatatatcactataaatagaagaaaaacacaattagcaaagaccaatgttgtgtgatctccaagacacttaaatttttgttaactaaaggtttaatcattagatcaactcgtcgttgttcaggcaaatcaaatcattgttgagttggttatctgcaccatatattagaagtgatgtgatcattttacagtttaattgaattaattacaaccagaaaagaaaataaatgacaatggaatataatatcgaataataaaaattcgaatcaaaactgaacaaaagaaaaggaaccgagctgaactgaaaccgatgaaataatcgaatagatcctaaacttaaaaaaaaaaaactgaaattataccaaactaaaatatttcgcacatccgaatgaaccaaaaatataaatatatatccacaaatatctgaatagtaaaaattatccgaatatagccaaacagagaaaatcacaataacaatttagctattgtgatatcaatatatatttatatttattctaaaaagacctgaaaaaatatccaattttttttgaaaatacaagaaatagccaaaaatatatattaaatgtttttaaacagcaacaatactactactgcggaataagaagacactaattagcaaaaaaaaaaaacattttttgacttcggcgataatgttttaatatttttctttaatttcttttttggttgcacaaaaaataaacactattaacaaagtagttttttttgccaccgctaattagttcctccctattcatgatctgtagtagtgcgaagaattcaaaaactctaatccaattaatcttagaatgaatctttaatttaaccaccatgaattagtacttcaaacaaaatttctttttcaataagcatgtagttaacccaaatagaactctcctaactaaattgacgtgatcaataaataaataaatatacatttgatttatttttcgtctcacccaccccattacctctttactaagtcttcaactcttcattatatccccacctccaaaaggttaattaatagccaagctaccacttaatttgatacactatcaaagttttaatgacagataaatgtaaaaattacattgcacactcttttctgataaattaatcaaatcatatatatgaaaattgaccaactctcttcatatgagtgaatacatcatcacaccagtgaatgtcacatgttattctaaattaatataattaaaaaataataaaacttaatgataaaaatttaaaaaattcacattgttttaaatcattcattaatctcactcttaacaaaatatcttcatttaaaagaaaaaatataaaaaatcatgttaatgtatcaaacactactttcattttacttttcttattttgctatttttataatagtcattacttgataatgactagaaattttcgtgtattacaacttaactgtttgctacttaacttttcttagtttagtaattttaacttagatttttctttttattacatttttttgtttacatgatatgatctttttgtgtatttatgataaattggtaacattaataatgacatgcatattttttaagtagtgatcttttgagacattagatataccaaaaagttcaatatacgacactttctctaatatggatatatgcaaatgcaaagagagaaacctaaaagtgttaactcaaaagactatttaatttatgctttcttttttttctttcatgtgaaaacttttaaagcaaatgagtagtttatatatttgttattcagattatgtcaatccaaaatttagccatgagtctatcatgatgtgattggaatactagattatgagagaatacatggaacaagaaattgtttgcttagaatcaagttagacaactttcaaaccaaataagtagcataattgcataccattgtatcatattgttgatgtaagtatttcatgatagttaaaaaagtttagaaacttgggtatatagataaaaaaaaactatacataaaaaaaatataattgatatttgaatcaaaagtgaatctaactatacaaatatattacataaaatgaatataactttattaactacgaaaataacataaattagcaataaaaatagttaaacataacaactcattcgtagcgtgggtactcacctagtcatttactaaagtttatgcgttgcttgatttcgttatttgtggtttgtgtttagttttcttttgttgttgtcaacgttagtagtttagctttattaatggacatatcgcattttgttagaattttcattttaatgtgttttggtgttatcgaatagttgttactgtaagaaaaaaatgaatttagattcacttgcaatatatatacatttatatataatggcgcaacgatgctaaggaaagaagattcttcacccacctccaaagtcctttacagtgagtagagaagctttttacaaactatgtttatgtaataaactctttagaatggttaaaacattgcaaattttttgataggaatataaatatattccttagtttttcactaaagataaagttaaaaagtgaacaagctaaagttcacgaatattggttttcatgaattaataatacgttgacaaaaaaagaaaatataaacttacgttttcgcatttgcaaattgcaatgataattgttttttttaatatacattaacttatcatagcaaaggctccgtttgttgtatgatgactctatatatgtaactccatagtaactcactgtctcttgatgtgacaataaaaagaagagagtacctctctgtctttgttatataagaaaacatcaacttctttgctctctcaacgcaacgcactaatctctttccaccaccaaacgctaaacgcaacagccaagatgactgagaaggaatgtgaacatcaccacgacgaagatgagaagatgaggaaacgtataggagcattggtgcttgggtttctcgcagctgttcttttcgtggttttcttggtgtgggcgatacttcacccacacggaccacgttttgttcttcaagacgcaaccatttacgcgttcaacgtttctcagcctaattatctcacttctaatcttcaggtcactctttcttcacgaaatcctaatgacaagatcggaatcttctatgaccgccttgacatctacgcatcttaccgcaaccaacaggtattgtagaattagcgtttcacgtttttaaactcattttgaggatttctttaatgcaattcttacaagaaaaaagtgtttataaagaatggaccgacgaatcttagtattatatgcgaccgattctcaaacgaaaactgtttagttatgtttcataattggttttctccaaaaaaaaacctctatctcatctatttttacaactttaccctttacttccaacatatgtagattaatcttatgaaatctaaaataatacacaatataacttttatacatatattataaacgtttttacgatcgtataaattaaaattttaaaattttgaaagtagagttgaactcttcattgtaagagcttcgatttaatatattataatatcaatattttacaaaattagtggtataaaaaaaaaagtaaaaaagattataatgtgtattattttaaatttcataagattaatctgcatatgttagagatcgagggtaaaattgtaaaactggatgaattccaggttttttttgcacaaaacctttcataatttgagacatcacacatatatataattctatttcaacaaactgattatatatgataaagattcatgtttacaaaatatatatactaatggaccgacgacgaatcttgttaataggccgttctcaacgtagtcttaaacaatatgattttgcatgtgaggtttgaattagttatattttaataatctttgggatgtgaattattaattaactaaaatttgttcctcttttttttttcttgttaatcgtttttttttttttgttataaggtgacgttggcgacgttattgccggcgacttaccaaggccaccttgatgtgacaatatggtcgccgtttctgtatggaacaactgtaccggtggcaccatatttttctccggcgttaagccaagatctaacggcggggatggtgcttctgaatatcaagatcgatggttgggttagatggaaagtgggaacgtgggtctccggtaggtaccgcctccacgtcaattgtccagcttacattaccttagccggacatttttctggtgatggtccagccgtgaagtaccagcttgtccaacgatgtgccgttgatgtttaaacaaagggatcatcattattctttagagagactagagtacttttgttgtgcttttagtgttagttaagtaaattcttcgaaatgttattattcataataataatatattgtttgtcttttttttcttatgagatttaagtttaacataataattactaggtccctcttttccattctttaaaataaataccaagatatataaaaaataaataaaaacataatttaatcaagatttgttgttcaagtgttaagaaaccaattgcgttttgaaaactatttttttgtttactggctaatgatcgtaattactgggagtcaccaataaattgattaatcattttttgcattatttgtgaatatttcttgaattttggaaacaaaacttgatttttgaataggtgacatttgcataaattttggatcatgtttcttggggacatgacaagatcatatatatttgcttggtactaagtaagcagttttgggtcaactaaatttctaacttaaacgacttttgtcttctctttttcagatgaatgcgaacttcccaagtaaatctgttttctagatcctcatttacaaaattgattaaatctttttatttattttatttagtttataaacttcaacatattggaaaaacaaacgagtgaagagagacttgtaaaagttattactgtattgaaacttgaaattcgtggaacatttctttttatcactttggtatactattagttagtttaattggtttataataaagtaagtaaatggattcgtgagatttatactttttttgtcaaagtgatatgtatgcttattgatgacttaatacacgtgagaggtgaaaatcgtggtcatgtatgtgacatttgcacattttcaggtgcaatgcgcatgccatttatgtatttttttatactttagaaagtttcttgatgagatctaaatttcattttaaataaattgaataaaatatacatcggcaaaagctaatttcgttctggataacaaaaacaaaagtgctttctttatcattgaactttaacaaagtttttttttttttttttttggttcgaaaaagactttaacaaagcttaattttgcagatgcttaaaggaaaaatgaaaatgattcatattcgccccaacaaactctctacttgccacgtgttattgtaactttagtgacgttgtatttgattttgtcttagctagcaacagagaattacaaccaaaaaggaaagtttatctaactaaaaacaattcatctatttcatgtaaaggttgataattacattggctctatataatattgtcaattgaaattcaaatttggttaaatacagggaatccttagaaaaaccatatataacaaaataatttttgtaaagcaaggggccaaggggcttccagccaaaattattttgagaaattatacaatttatattacaaaaattatttttcaaacttctgttaatacttttacactaagagatttggggttcgagttccagctattgcgatttattagcagatttgcaaattaatggaagcaaatatgcaagagatctacaacgaagaacaattatagttgttcgccaagattctacgcagagaagatattgaaggtgtctattaagcgcatggagaaggagaagaagatgtcgtctgtcgtggatctaataagggtcgaaaggaattgtccgtaagggaatcgtctatataacagttctcataatttataataaataataaatttagacggaaaattttctttggctacgatgccacgtttctggaaggcattgccgttaattttgtctgaattagttgataaagcaattaacattatgtttatcattggccaactacagaatgtttaatttttattttttaagaaaatgactttcttaatagttgaaaacttgttgaagactccttgtcccattggttgaccaattggttgattcaaaactttaattgcaaaaaacttttttcttgtgtctaataaatccattaaacacatccccaaagttaaatgtcaatggggcagagtgcaaccttgtttactcttatttacataattaatagcttaagtaacatgttggacaatttcgcttgctccataataatttctttttccttgcattttatttctcgtactttataatgttagacaaactctttggtccgatgtggaaaaccacacaagacttaatttagtaaatgtggggtttaccaaaacatataaatagttaaacaaagtagattgggttattagtttgggttaaagaaaagcttgaattggttttgcatgttcctttgcattctaaatatagttagtcatgtttttcttttgtcacatttattccttaggttaatttataataaaggaggtatttcatgtactatcattccttctccctttcctttacaattagttgaaaaacacacaaaagtcgctcaacaacttgtgtaacaagagcaaaatggattaccaaacattagagattgaagacccaaatgatgttaacattcccgatgctgagaactgctttgtggaaccaggttgggctgccctgttcaccctcctagccgtgtacgctatcttattttccatcgacaatttgttttcttgtaaggccaacttctcaatccaatctatatccgtctccgcctcctcttctgaatcggtgtggatcgtatatttcattgtgaagaaacctagctttatgtgttctatctcttatgaacgcgaatacgtgtcagccaatcttagtcccctaaaaagtgccattgtaaacgtctctcactaccaacgttccaatggcttcacggatttttccgtggttttcgcggctgagactgaggatattggaccagccaatggaagcaacgttatttcaggtgtctacaatcttaatattacacttctcatgaagcataaacaaattgccgcgaacaacaaaccaggacatttcaatgttcagtgtagaaattttaccctagtgttctcatcggatatgaagtcgggagtgatgctcggtgacaagaaaattgaatgtcactcatcttttctaaatttgaaagagccttttccttgattgttcttagatttttcatgttattattattaactactacattttcaaataaatacatcccaaaccattgttatcagaatcatttgttagatttacactgactactaactcacaatcctcagattaaatatgtttaaatatggatgaacaagattcaactcatgagggtacaagtaaaagtaaaatattttttgatagaaattgttacattacatacaaaacttattaagatatctatttcttcaaagtaggatacaaaactctcaactttttgcggatctacaaccgaaaattcaacagattgatttcttttcgcgccacaaaaccagcttcacttgtcttaaaacatcaagttatttatagataagttattgttattgttaggaagaacaaaacttatagtgataacacctataaatatttagttaaagaaaaaatatcatgttttctattgttgtctcctgaactgttctcttagaataagctgattataatactttagcataatatgtactaagccttccataattccaaaatgtcgtggtctcaaattgaacctcgtgatcctaatttaacgacttggtctcaaataacatcatctcgtgatccaaattcaacgacgactgaagatgaagacggagatggcgagatagaccatcctattcgaaattattgtagaatgtacgtaatactgctctatacttttggtttttggttgtatctgttgatagggctaatcaacattagcagatgttacttagacctattcgtcgactctgtctccgtctccaacaatacgaactggaacgtctcattggttgctgatagtcctttcacattttgtcagttatctctcttcacagttaacggccaactcttacaaggaggtagggttatggctgacaggctgagtcaaccacaccctactcttgtgagcaattagttaatcacacaccaatttcaacagtcggcttcaccacgcggaagctagacagcataaaagatggccatgtggtttgggacaccggggtcaagatcattgcccgcgtccaagcgggcactagtcttaaaaaaaagggattgttgagggtgacaggcagtgatttgccggttaggtttctgttggatccagaagggaacatgaaaggatcgttggtcggaaacatgaaacgttgtgaatacttgtttaacagcagcttggataattccctttagccttgggctagcttttggttagaatgttatgaacggtgacagtggttatgattgagaggaacatatgtggtggtcccaaatattcgagttatctttttatattgtttgttatctataggcttatttattgttgtttttttaacttcatcgtttattagtttgcaatccctcaaatatgagttttcttagacctcgaattgacttacattgcatagtaaatataagagcttgaaaatccccttctaagagtgacaaaacttttactcatttagttttgacccattcctttaaccacaccatttttttttttttaaaactctatcggctgatccggtcagtcccggtagaaatgcactgaaatactttagagtggacttctttcagaaggatcaccacactgtctgttccgagtttgaatgctttcagactaatgctaggggatagtcaaaccacctacatttctgactaccagataaaccaattaggtcaagacccaactgacagactttccaaacaaatgtaattttttgtttccagagaggatcgaactcaagtctgagagtttcacctttccccaaagtttcccctaccactggaccacagatgcttgggcttaaacacaccattctcatcgcgtatgatctaaccagacttaatacatccttcttgtgatctcacacaatgtttgttctcatctttttagtccaatgttgtataacgtgctaggcgcttgttggtagcacacctagatgaacaaaactattttattaatggaaattctacttctatatagattctttataagttttcatttattttgtagaatacaaattattttggtttcatttaaaaaaaattataaacggtttttttccagttactttgtgtgattagagaattatattttttgtaagaaatgtatccctacttaatggtttattgtctaatatagcattggtattgtgatttgtgttattctttattagaaaaggaaagagtcgttggtttatttgctataagaagatgatgtgcttagttttaaattgaaacaaagaacagaaaataatgtttcatacacgttgtgttaagtttgtattgatgatgagtttcggagagacatttttgggaagaggttgatgtcgttgtaaggatcatagagtaaagactttctccaaggacacatccatgataaaagaggaataaaagattttgctttatataacttgtgtagaggtgttacttctatagtgtacatgtctttctaaagttatccaataaactctttttgtagtttagctatattactatgttggttttgaaccaattcaacagtaaatataaaagatgtcatctcacgggttaaagtttgtgggttgtttctccattctcaaactcatttacaaatatttgaaaagttattctcgtcaacaaaaaggattgcatttttatgtctgttatcttgatcttaaggcatagggcttgggttaaaatattgggcccatatacttaacatttttgaaatacattttaaggaatccaatcgggtcggatttttttaaattttttgacccggatatctgtcaatcggatccttccatatttaaatttttgactcgaatttgtttgaatccgatctctccttaataataggtacctacattaaattcaaacgtcatttactccctgattgttacaatatatatagcgtatatgtagttataacaaatagatattcacaaagtcaaatgtttcctattataatgctattgatttgattgcatttagcatttgttttcaaaaatctaaatcgatattcatttcatctattagataaagaaattgtttcgtaactaaattattttattcttatttgtttaagcatcaatctagcagattctctgttttccctaatttgaaaatatccaaagataccaaattcttactcatcaagattttaaatattctctgaaccctaaaccacactctataaatagttgctcattttccacttttctcagtaccattcgatatatagcaaaagataagaaaccttaccagtaacaatggcagcttataggcttattcgagggacatcagaccttacaaaacatgttgccatgtgcaacaccactggtgaaacgcttaacttagtcttcgctgatgaacatgtaaaaacagtttattaacactatgttattgttaatatagatcatgtttgtgtcatagaaaaatgcaagatcagagactcttacgagcttttgatgtgttttcccattgtgtggccgattctcttttagagtaacattgattcagggttctcgatgtgtcccttaaatgccttcaaccattcagctccaatggcacctgcactaagaagaagaagattaaatttatacaatgatgatgaaagaaccaatgacatgattgaactgaattaccgtctactacgcgatggtcacagctcaatataacaagcatgtacgaagcaaagttgaattgatttggaccgttaccagggacaactctcttttcagttttttttttttaagaatgacacaacacgaattggttattggatgttttggtaaggacgtaaaaactatatgaattatgtactcaagatgataatgaactcttatatttgtatgagatacattcctataaagcgaagctttttagttaggaaaaccttattgtctctaatcattgcatcgtttgaggatgtaaagaatctataagtttattcttatctgtatcaccaaacttgatccattggtttcacaatccgaaggataactccgtattaagagatgcctaaatcaatctagctctagatacaattaattttgatttcaaatcgaagaaatcacatctatatctacaaaagataagagacgaaagggaggaccttacctagagatatacttttaatccctttcaattacataaacttaagcttcgactttaggagtaaataaatatggaagaggtcgattaggagtaaataaataaaatatgtggatgttaactttgttaaagtttccatccaattccaatataagtcatcaactagataaacaaattatactttttagtgttttcaaatataacagataatccaaaaaaatattgacatttctatctgtggtcttttaccaatttctcgtttcccaaaattcaaaattgtcataaatcaattgaactagaaaatatctaggtggcaaaaaagcttaatatttgcagttgatgtataccaaaattactctatgatataaaaatatgttaaaaaagttagtcctattttaggttactgatggtgtaaatcctactatattatttgggaagtacattttaaatataaccttaatttttgtaagtaattacataggtatgccattaggaataaaattttaaagagtaaattaatttatctctttaaggattaaaaagtcaaatactaatttaattaattaaatttaatttaaaaacgaaatacattattaattttcaaaaataataaccaatcaaaatcaacatataagatttgatatctaaattttaattaatttgatttaattagaaaaataaaatacattattaatttccaaaaaagtaaccaattaaaatcaacaaattagatttgatatctaaattatcatattaatgttttattaattattataattcacttctcatctttatatgattctatttttgcaaaaaaataatatcatcattataaaaaaataattagagttttttcgcatatgcaataattagaatttttaaaaacgaatataaactgttaaatacatgaaaaaatattataccgggtgaaaaatagatttaagaaaactttctactgagtaacgggtcataatttgaaatatttatatttaatttcatacatattatattgaaaatttataatcttatatactataataatttttatgtgtatgatgtgattcaatttttaatacaagctagaaaatcctagaattgacgggtttagatcgatattaatataagatggtatactacaggtgaaactcttaaattaacaatcaaactacaagtgtataatcttaaacactaaacaatatagataatatcaacaaaacatatacaactcacagtttactatacatttaaaattaaataaaataatatcatatatttttaaatcatctttacaataaaagtttttagtttaactaaaatataagcctacctgcggtatactacaggttaatatctagattatagggcttattggatctaaagacgggtcatcaaagatttcctaaactgaagcaaaatatactgaatactcaaatatctatctgttaccaaattataaacaaataagttcgtaaaacaatttaatattttatatacaaaatcaattaaatcttaatcacataaaaattagcacaaaaaaaagtattcaacaattaaaaaattatcaaatctctgtgttatataagttttgatactatattcgaataaagtgtaatattccttttcgatttgtattctttaactaatttaagctgactaatatatttgttaatcttatacctatcaaaaccgactatcgttttttatctctatagtatttttgcaacatttgtttggtggatttgggtaaaagtgcattcgggtcatatggtacattcccctattaaataaatatggtgtactcctatgttatcagctaaaatatttaaattataattcagagtcatatcattagtaaaattaatattaataaaataaatggctttttggcaagacggatttggagtgacgggtttttgaatcaacattaataaaaaagtaaaatataattaatccactgtttcaatacgggttaaatctttaatttattattttttaagatcactaatattaaacatatcaaatcatcctaatttagaaaagattatataaaaccaaaaatgttatgtggtatgtataatattactatatatataattaaattataaaatataaatgtattagagaatatacaatttacaaaacttttatatataaaaaagaattcttaaattttaaaaattactactttaaaaaaaaaatcacaggacgggtaaataaattatagaacaggttttattttggaattgggttatatggtggatgtatttgaatcaatatttataaaattttaaattattattatgctgttgttttaataggggttacaacttcagttttttaacaattatctcatggattcgtggtatagcgttatttaataacaattataaactgtaaaatataaatatattttaaaattaaaaattgcaaattttaatatatattacttttaaaatcgtcccgcggtataccgtgcggtataccgcgggttaaaatctagtttatagataaagccaatacatttccttgctaaattcaacatactaacaactagattagtagagctacaattgcaaatataccattccttttacaatataattattttaaaataggttttactagaacgattcatcttaattaatataaaatagaaaagaaagtttatttttaaatttttgcctttttaacatttgtaatcttatcacactaatattgtgatgaatatattagaaagttattttgattttaggaaattgacagtctaaattttatagatacatgaactcatttacggactaaattcaacatactagcaataacagctacaatcacaaatatagtatattctttttgatagatttatctgaaaatatatttttcactaaaacaattaatcttaactaataaaatggaaaaagaaagttcatttatgaatttttgtctttttaacaataagagtctcatcacattaatattgctagtgatgaaatatgttgaaaaataggtttacttttggtagtaaaccaataaaagaataatctgaatttgtagcattgatttcttataatattgtgaattttaaatacctgaaaggtgaatttaaatgatcagtaattacaatattagtctcgcaagaaaacaagaaatttccttttccaaaaccgaaataactaataaaatcaaatccaagacttttgcggcggtgacagactctataaagaagtttcagtcccaagactccctcacattattttctctcgctctcgaacaaaatggtcgtgaaatctggaattgaaataggaacaaggagatgagtttaatagaagattgtctaagaagctaccgtttcattgcaatagacacagagtttccatctactttgagggaaactacacaacatgcgacagatgaggaacgttacatggatatgagttttagtgtggacagagcaaaattgatccagttagggctaactctgttcgatatcaatggaagaattggaggaacatgggagatcaatttctctgatttcggagttgacgatgctagaaacgagaaatccattgagttccttagacgcaacggtctagatctaaggaagattagagaagagggcatcagaatcgagggtttcttctcggagatgttttggatgctgaagaagacgaggaggaatattacttgggtcacgtttcatggatcttacgacatcgcctatttactcaagggtttcaccggagaagctttacctgtgacttcagagaggttttctaaagcggtcgcgagagttctcggttctgtttacgatttgaaagtcatggcgggtcgatgtgaaggactaagtagcaggcttggtttggagactctagcgcatgagttcggacttaaccgtgttggtactgcacaccacgccggttccaataacgagttaacggcgatggttttcgctaaggtactgtctccgtttcctctctttcttcgttttggttctttggagttaagaactatagaaagtgaagcaatagtgtagtgtgtgtgtgtgctttgtgcctttgtctaatcctaagactgatcaatgatatatgtccgttcaattatttttctagtaatgagatgttttcaagactcaagatacattgaagatggagaagtagcagcatacaccaagaataatttgacatggcccaattgaacaagatcattcccatcctttaccatgtcttgtgatcctagcttgtgtttctgctgtgtattgatttgtgatcttaattcaacactagaactttttcttcattacatgttgacttgactaaaatgttgatactaatatactacacaatcatttagatgcatgaatgatcaagttctattctgattgatattgtcttcatagaacttagtgattaactaaattttatttatacactattattcaaataaccatttgtatcgtattctcatttacatggctttgatagaatttagtaatgctcagtttatataaattgccaaatatgataccaaatatttgtgcctcgtcatagatcatgaattaaactactgtatatgattatctagttattatttttattattttaattaagtccgaactgtatttaaaatgtttaataaaaataatttattaacttcaaatatttcataaatatctcatacaatgagctcacaggcagaaaaaaagaaataaaatattcaaaatctaaagttcctacctgctatttttctgcaaattctctcacttcactagatattttttgattaaaatcgagaaaagtaaatggtttaaagatgatattttccgattagtaaccacttttgaggaaaaaaatgagtaggaaaatcgtgttcctctttgttcctaattttgttttagcatttgcaaggtatttttgttccaatttcagacatgtgggtcctacatttttcctcatcattcctaaaaaaaaaagaataatagaacaaaattgtttcaccccaaaattgtagaggaaccaagagtaacaaaaaaaataaaattcgtttttatttattaaataaatttaaaatagcttttatgataatatttatatttctatatataatattttccatgtctttagtatatattgatatataattttttttatcaaactttcaatttaatgaatgttatgaatttattttaaattagtataaataaatgttttaaagtgaaatttattttaaatttgcaaaataatttaaaattttactataaaataaataaatgttttggagagaaatttataatataatttattttaaatttatacagaactttaattttaaatgaaattaataaacaaaattcaataaataattttttagtaattgttatgttaaatattaattcacctttttagttaccatttaccataatcattttgttcaattcctatgttcctcctggttcctacttatgaccattttcctttttctttcttgtttcattttgttctttttcattcatattcctatcgttctttttgttatcaccaatcagagccaaaataaatctttatgtttatgagtttatcagtacgctaagcactcgtaaaagcagttttttcctatttataaactataaagcatcctcattgaggatgcttatggagagtctttaaatataaaatgaatacaaatagtaatagtaaataattgaaagaatcaagaaaagatgtgtgtctttctatggacactaaaaccttttaacacttatttaaagatattttcttccatgtatctcattttaaatggtcagtctatttttgatattaaaatattaactattttggtcttgagacattcaaaagaatggttcaccaatgaggatgctcttatactgcatttaatgcaattataaattagaaaataaataaattttggaatattacttttcaaaatattcaagaacgagaaatgattaaaataatatatattttatttcttttttcacttttctttttaaaattacgtaaaggatattaccgtaatcttacacccaaaaaatattactttctcaagttcttgactttatggacaaaagtaaaaattataatcgctttggatttgttagctaattatcccttgatatgtaccaaaattactctataatatcaaaatatgttaaaaagttattctgatttttagatagtgaccatctaaattttgtagatacaaccaatgcatttagtagctaaatacaacatactagcaattacagctacaatcccaaatgtaatgttcttttaacgaaatgtttatctaaaaatagattttactgaaacaattcatctaagttaatataaaacagagtataattttgaatttttgattttttaacattttgggtctcatcacattaatatatctagtgatgaaatatgttgaaaaacagggttatgtttttgtttagatatcaaaccaagattttaataatctgaatttctaccattattttataatatttggacttttaagtctagtgacactcaaagtgatgactacttttatatatcaatagccaaaaataaataaagatgtcaaaatttccaatctggctcgattcatttattcacgctttgcaaagacaaattgtattttaaattttaaatatcaaaaattaccaaatggtaatcctatatcagttaggaaagacttgaaaaagaattttttttttttccaaaatccaaatcatagtcgacaaaagaaatccaaatcactaattgaagaaaatcacttattgatgaaaaaaaataatcactaattgaagaaaatccaagcctctctataaagctcgagtcccaaatactcccctcacattaataagttttttctcatacaaaaaaacgatgttagaggtacaaaaacaaacgtgtcgtgaagtctggttttaaaatcaaaaggaagagattaggttaatggaagagtgtctatgagcaaccctccagggaagaaataggcgaacgccaaggtctcgaggttagtctctgactcaagcaccagctcctccactctctccatatcaaacgaatcgccctcgtggaagttttgcgaaagaaaagactataaatgaagcaaatcatatttattcggttaccaatttttatatgtatttggttacaaactgtccttcgttcccagcattaggatcaattttattctctctcttttatgtaattgtaagacaacattagacaaaagctatggaaatgtaaccaatcagctgatttattaattttggcagacgaattacagataacaaaagaagattacaatcataatatcactttgctgacaataatcaatcaataaattctaaaaaaataaaattaagatataaaacatccatagtctccctttctttctcttaaacaagaacaaaaagaatgtgagctctattcaaaagaagttgacaaaaaaagaacaaaaagaatcatatatcaataaggctaaccttaaattcttagaagcgaaaacagaggaaaacattacgggaataagatctcagcagtaatttatcataaatatttcacactcatcgtaaatatcccaggtggaggtgtgttcgagacacgttggaagggatctcttctccaaaggagatgaatttatcctggtatgggtcccgcctttgggagatgtaggtgaattcgtcatttaatgtgatcaaatgacaaatttgtgcaaaatcagaacaaggacataggtaaaaggtatttaaaagaatgaattaagagtgagaatagactttgcaaaaaaataaaaaataaaaatttattggacaaacatatttttcaaatttacactatataaaagttgagattattaaaataagattaaaatgaatagaaataactgttcatatttgttaaaataactattaaaataagattacaatgaattgaaatagcttctagagtgaaagaagctcaaaagctttgagcttgagctttccttgaaggtagatcactttggaagtaaagagaccgaacaccttttcggtttagaatatttctcaaacaccgcgactagcttgctctccccaactcccgagtgaatggagctcaaaagcttcgagcattccctgaaagtacatattatcctcacatttactttctttctaatgagcatcttattccacattttgattaaattccagttaggccaatataaaaatctggacacgtttattgaactttctaaatttggggtaattggcataaactgacatcaacttaaaagcacctccattggtaaattaatggaggggtgagtgtctttaaaagaaaaaaaaatactctctctattcctaaataatttattttttaaacttttcacacatattaaaaaaaaaataagaatgattataaatgtattactttttatgatttacaatcatctataatttaaaaccaatcatattcaattatttctcttgaaatttacaattcattaataataactaataaatattacatagaatacctaaacactctatctttttgaaacaattttttttcttttctaaaatctattactccctctgttcctttttgtttaattttgtaggaaaaaaaattgtttcaaaaagattgattttttaggttttcaatgcaatacttattagttatagttgataaattgtaaatttcaatacaattattgaatatcattggtttagagttattgaaaattgtaaatcacaaataataaaacatttaaaagcaacatttaatatgttttcttaatatttgtggttttcctaaaagatcaaacaaaaaggaacagagggaatatttaggaactgcaggagtaataaatttaggttcaaaacacccaatcttttttttggtcatccttaagacaataaagacacctaacatcctactttttagacatttatattagactctaataaaattaactataaaaatgttttagacacccatattgggtatcaccaataaagatgctctaaagaaatagcaatactgtactcccaaaatttaatatctaactccttgaagagcagcatagaagttaattttaacaagttaagcaagttaatttttcggttaaattcttgaagagcagcatagaagattgaccccacagttttggtcttttacaagtaacatttttttttttcaacatcttttacactttaactagattttgacccgcacatatgtgcggggtttcatatttttaatttaatatagattattttgttattttgttatatatattatactataatgtattagatatgaattcacatatacgtgcaaaatataaaaattgtttaatagattttaaaaatatattatattgtgttattagtaaactttataatagtatagatattataaagttaacagtaatgattaaaattcaattgcgttcgtgtatagttacattttaagattcggactcacacggagaaattatattagtaagataaaattaagatataacttaactgtaagttagtgattgtacgtttttattttctaaactaatcaaaacattacaacagtttgattaccggtgtaatataggatatggatttggttttagtttgggttatttcattgctaggcgtaactatctttgaacacaaaatccataatgtgatgtatctattaaaattcttcgtcccataacccgtttgtatatgtgaaataaaaatactaccaacccgtatccattacaaatagaatttgtgtcacaaaatatgtacatacatggttatgtttgtaaataattttattttatatagtgctcataactcaaactaatcagttgaatatttaatttgatgcacagtttggtttcaatttattttatatagtgcttttatctcttttcatgtcgttcgtgtctcataattcgtattttcatttcattctatgaaaaatatgttccaaaattcttttttgcttacctttaaataccatgttatatatgaatatatgactcagttttacggattaacatatatgatgttaaagtttacaaatatatcataaattaaaacacacaaatgccttttcttgatttgttttcttcttcaaattcaaagatatgaagagcattttaacaaataatccttttcttgatttttttttccttcttcaaattcaaagatatgaagagcattttaacaaataattttgtcaaaaaattatattttaacaaatgtaataatgttgatttccttagctacattttcaatattcttctttcccttgtttaatcataattaattggatttttggaatataattaaaattttgaaatacacctaaaaaaacaatttattactgctggataatttgtttgaaaaatgatgattactttacattatttcaaaaagtttgtgcaataatatattatggatttatttaaagaaagatccggttgaaaaaaaagtaaaaagaaaactcaaaatatttcgaaattagtatgtacaattattgtttagatattctaaatgaatgacataatgataattaatttaaattaattatttttagtttaataaatagtaaatataaatctttgtaatttctaatctcgttttttagaaattgtgaaataaatttttgttttatatttcaaaatacttaacccaaaattctaaaattatatttacttatctatcgcaaattatgaatttttttaatggtatcaaggatgttttataatttttaaaataaaaattaatttccaaaatgttagtttaataatatagtataattggatatcaaatcttagtttttcaaatcgtattggttaacaatttttaaaaaataaattttaatttttcgtccataattaataggaaagagaaaatgagtttttttttggaaaactaataattacttaaaagaatattaccattttttaatttaaatcaattaattttgtgattactattgtatccttaatgaatttatttaaaaacactaacaatcaatggcattttatgtaatattttacccctcataaggttgtttattttcaatgattccaattaatagtatagatattttatcaaattaaaacgtacgtttttatttatttaaaagaccatatcaataaaaaataaaatatacaattattgtaagattttttttccgtctaattacatcactagaggtatctgctacgtgcatcatatgccatcatgatgaacagctttcacgaacaatgattccacggcgaagctctcgccacaacatttggatctttaacggacgattttgcatgtacgacatctttgcgatagacatgctcttcccacaatactcagatcactacaaacggctctacatacggcagtttggacttccgaatagctttacaccattaatttacaagaaattacgtttagaagtattaatgaacctttggtcaaccactagcccaaagaaactacgtgtaagattaacataagtaattttaaacatgaaatatatcgattacaagacataataaacgtaaaacaaagaacaaaagaaaaacaaaacccgatagtaaagtacacaaacatatagaaatcttgatcttatttaaacttttacattttcaccagcgatgagaagtttgtatgagaacaagagggactttcttggcgatagcgaacccttcgtcttcttccatgtcaatatcttcaatagtcattccattgggcaaactccaatcgaagaagtaaagaaggttaagaagcccgagctcgaccatggtgatcccggtggccatcccaggacagatcctacgtccagctccaaacggtaatagctcaaaatgttgacccttataatcgatagggctatcaagaaacctctcggggatgaactcaccaggttgtttccaatatttgggatcccgtcctattgcgtaagtgttgatttggatcatggtgttcttgggaatgttgtagccttgaatcttgatgtcggacatagttagtcttgggagcaagagaggagctggtgggtgtaatctgaatgtttccaccatcaccaatttcaagtactcaactttctctagatcttcttctgtgattctctctttgttgggtccaagcattgctcgtatctcttcttggagttttttcatcactctcggatgtctgcttagctctgtcaatgtccatatcattgtgttggctcccccgttcactccagccaaaaaaatatcctgatcaattgacataatacctatcaacaagagaaaatatttttctataacttaagttaacttgcttcccaaggtataatcttgttcttcaagttagaaattcaaaagattttactataattatatgtactcactgacatgactcctttaagatggtcataagtgactttaaacgaatcagcttttgtgggtttattgatcatatccaacatgacactgacgatgtccgagtgatcttgaggttgtccagtcttcaaatgatcatcgattacatgtttatagaaattggtgagtttgtaaaaggctttgttcacccttgaatgttgacccgagatcctatctatgagccaccctccagggaagaagtcagcgaacgcgaaggtgccgaggttggcctctgattcaagcactaactcttccactttttccatatcaacaaaatcgcattggtggaagttttgtccaaaactcatcagtagatttgaggaaagtctttttctccttcacggctagcatcaacaaaatcgcattggtggaagttttgtccaaaagcaagtctacaaatgatgctagccgtgaaggagaaaaggactttcctcaaatctactgatgagttttgtgtttcgtcaacagattttgatattttcttgaccaacaattcgctctcttcctctctaatatacctgaaagatttaagttttttcacgctaaagagctcgagcgttgtgattttcctcatctctctccagtcgtcgccaaaaggagcaaaaccaatgtctttaaaattgtaagtaaacaagccagtcgctgccgttttaggtcgggtacaagtctcaagatcatgagttttgagcacttcctcagctccttctttggaagagacaacgatgacagggactacccctaaacggagaagtaccaccggtccatattcttgggagattttgtggaaagatttgtaaagcaattttccaagctggtgtaagtttccgatgatcggaagtccaataggtcccggaggaagctttcctttcgatggtaaaagctttttaaaaaggattaaagagagaggcaagagtaagaggaaacaaaggaagatagacattttcttgttattgattttgtttcctaactcactttgtatttcgcttttattgtgctctcattgacgtaaaatatggatcgagatagacatatgtatgtgtggttaggtttttgacaaaatcaaatgcattgcgaaaaagaattattgagttctcaacttctcatagacacacaatatatatccatatagacaaatgcatgtggttgggtctaaatcatcgcattgtgagagaaaagaatgtgttcacaaattctcatagacgcaaaatatagatccatatagacaaatgcatgtaattgggtttttgacaaaatcaaatgcatagaaaatgagcattattaagctagatagaaaacgatattgaagatgaaattttattaaattcaatgaaaggcaaaaagaaagaactttaggttgtcaccaagagataaattgattttgattaatgaagtcaaacaactctcaaagttatatttcttgatcaaataacacacataggcttacaaacacattaggattgttttgggattgtcccttgaatggtctaatactaccctaaaagcttggcgtgaggtgaaagcaacacgacaacctcgatgaaaatgactttgacaagagcacgcaatatatagttaaagcaagatcgttgtgatgtagtagagttatttaccatggagaacaaaacattattgtgagatctattcttgcctatatttggagagtatcgcatggctccctcaaagatatttgttgatacttaggagagctaagttgacctctctcagatgtatttattacctctctgtctcactaagagtcatggtttcctttacctgtgtcactccttcatcagtttcattacgaagatctaaagaaaattctgatttttaaagaggattaacgagagagtgtattatagtaagaggagacaaggaaagatatacattttcttgttctttgtgtttggctaactcactctcgcaaaatatggatacatagacaaatacatgttgttgggtttttgagaaaatcaagttcatttactcttcttctttttgtcaccaacaaagtttcacctaattattgttacaataatatcggatttttgtaaatattagatataaaatacttgcagaattgggtagatttataagtttttcataactaaagtctcttgctcgactatatgtataaatattcttctgtttgtttcaaacgttcaataaaattcaatcgctcccttgtttgtaaagctagattatggttggggatatgagcgggaaatataacttttactagattaattatcctttcaattttataaatatcgaaatagatttctttagaaatcagatgaatggatatatcatatcttagtatagatttatcaattattaaaaattctaattaattatatgaaacaagaatcctttcttcttctttttttttctggtttggtaccaaagttattgtcatatttcgctgaaaaatcataggagaaaacacttcactagtgtttcaaatttttattttttttgtcgatatctttattagattaacttaaatgagccaatgctgaaaatattgtttacatatgtaatataagatatggttggatacgaacatttcgtatgttctgagcattttgttttgcatttttcgtatgtttgttgattatgcatgaattataatcatcaagtgtttagacatgttttgggtaatctttgttaaaaacttacgtggtttattggtttatgttttttttataaataactaattcatttgaatctgtttttaaattcatatcgatttgtatatgatttaaatgtggactaaacaaatgaattttcaaatttctaaaatttcttctttccaaagaacgtttaactacaaggatcaattgagttaattaattgacactaccaaaaaaaaataaaaaaaaaatgagttaattaattgaatttgaattataaaaaaaaagaaaccccttaaaaaacctcaagcccatacaaaaccccagcatgtttctccggcccatcttgaacaaaatacaaatccctcatcctctgaaacgcatgccacgtaagcaaactatccgaaccagcttgatgacatttcccaaccgcccggttaacctcaagcgtccttgcaacccggtccaaaccaccaaacaatctcctttcacaaaacttcatcatatgcttcacatcatacacacgctccccaaacaacactctcatcacgcgcttaaactcccccaacgcgccgggcaattctcggcgcgtgagaatcttcatcaagtaaccgaaatcatacgcgctatgaaacgtcacccagctcacttcctcattacaaacaagccccgacgacatcatcagctccgcaaacctctccgactcaacaccgtcgcgacaattccgctcaaaatcgataccttgccgacgaagcaactcgatcgaatcaggcgcgtgtgcgtcacgcgccacgtcgaagtcacggaaattaaactcccagatgaatcctcggtgaagatcgtcaccgaggtctgggaggttaccgttaacatcagagagagtgagaccgacttggattaagctgagagcgtcgacgttagctttaagaagagtataaagatcgtcgggattcgtaaaccggagatcggatttgaaaatcacgccgggaaattctgtgtccattgagataaatggataatcgtcgatgatttcgctgattagttcaaattctgattcgagattctccgcccagacttcacgagtcacgactgtgacaccgtccggtttgagatctcggtttggtttaatgatcgccattgaaactgaatttagaagctttggtttatgatttggtgattagagttagtttgtgttatatatatgtgagaatgtgtgtgtgaaacagagtgaaagagttgcgaggaagaagaagtggggacgagaaacgcgtcaagtggtggggtttgagtgactatgtaacgtaacttgactcggtccaagttggccactctctactgggtttaattcttttatttattgttattcgttttttctattttagtatttgtcattattgggttatatacactgaatatatgtatgttgtaggaaaattcaaatttcataaatgttgttcatcttggattaactgtatctctattattgggaagatccaattcatatctaaaacgaatgtatattttcttatatatataattgaatgagtttatttttgtaaaaaaataacatttttctaagaaagtaactctaatttaaaaaataaaaaataaaaaaaaattcaacagtagtactataagttaattgtgtcaataaacttttttttttaaagttaaattagatattgtggaggtaatggtaagtggctaaaatttcgatcaatattataattccaacagtaataatatttaagtcaattggacagactacaaaaagggaaagtctcaagttgatggatagtccaaacttccaagtgtgttttgcgtatgaaaatcgtgtcgtaaatcgtgtattctttgaatatttttcatttatttaagggaaaaagggtcactatcttaagtaattgatctatttgattttggaattaggtcgatcgtcaaacaaatacatgaattgaaaacatttcttggctctagagtacattagtgttgaccaacacaagttatcttgtttgaaacttttgaatttagggtgaattaaaaatttatgttcagaagacttcaaaattaaaaatctatgcatagtttttatattattagctttctcttcataatttatgtaagttgataaaaatgttcttctatatataacaaattagttatcgaagtttttcgttttgttttacatagatttccatcaaatatgtaagtaagaatatatgataagttatatgattatctattcgtttaacacgataacacaatatatatcaagcaatttataaatatatgatgtgaaatcatattgtatcgcgataactttataattggtatgataatatttatattatcattgataatatttatgctaataaatgtgatatatagataatatttatattaatgtgtataacaatgttaatatgataacaataacaaaaacatgctttattctaattcttttcaccaacaaggtaaatctagaaaacaacataattatgttttctcgccgccagtgtctaatcttcaatcattaactcttccatctccatctcaatctgacatagttttccgacctaacgccaccactgcttgtgaaatcatcgatgttggtatcatcatcaccaccaccaatccaccattccatcactatctccatctgacgtaattttccgaccaacgccatcactgcttgtgaaatcatcgatgttggtatcaccattaccccaccagtccaccacacgtgacatgaaatcatcattgacggtgtcacttttacctcctcatttctcacaatcatcattgatagttttctaaaccgcttatctgataattttattgttaacacgagtggaggatatttttggtattaagttgagtgagatgagagagaactaaataaagaaacttcaagcatagattcttaatttcttgttcttctgagcatatccattataatttcccttgaatttattttttcttttgttagcagttagtcttcctacacaaatactttccaaatttgaacatgatctttgagtaaagaagaccactcacgaggtgtatttttttatgtgtttttttagtggcggaatcaaaaaaagtttttaccggaatcaaaaaactatactaggattatattaatttatataccaagaaaacattaaaattaagaatatacctataatttttgtataattagttcttttttttttttttatcaaacaagatttgtattcattccatcaaatcccataagggcaagtttacaaagttctcaaagatgaaacaggttacaaagatcttaaaaaaacataagctagcaacaaagagagataacttgagaagatagaccaatgagagtcggagacagaggcaaacaagccacataccacacacgacttcaaagtgtgtcaaagacacttccacgaacacttcggggaaatatgaaatattcactatcaaaccaagataaagtgacgttgagaagaagtcctttgcctcatggttcggcgacgcgaaacgcatagagggcgttgagacaagagggttaatatcctgagagatacagataaaatcgggtatgatcttgagttccaaacacagtgggctgggagaaaagagtttggagaagaatgggtaatcaccgctcgatattaacgggatcataatgcccatcttcattactcttgtagaatccttaggtagatctctgatgatgctaagaagcaaaagcgactgaataaattcaatggataggtgcagcagagatgacaatttgaaaagaatgcggtaatcaccgctctttggaggcgagatcataatgccgctcttttccaaactcttacaaccatggaagaaggatataggtgtttctagtggcagggttctcaagtaaatcttgaaccaacatagcaataatgagagagtatgctctaattgacgtccacaatcaatagatgacatgaatctactcaaaattatattaaaggagagcaagagaaagtttgggtcagacctgggcttctgaagaagacgttttggaacacctattctgcaaatgggcctcaaaggtaaggagaatgggcctaagcccacctgggagaaaattaggtcagaacgtgaggcaaccaaagtaattaggtcatcgccgccgctcaccctagctaccttcaccggagagagcgttggccggaggctccccaacagtaagaatcccgaaagctcaaagacgagacatgagggatttggttgaaatgcagggggaggtgaagaggtaactaaaggcgacgagacacggtggagaaaggtttcagggaaagcgagggaaaattagaatcgatagatctgggcaagagggaggaagaaacgtcgttcttcacttgaagacgcatgggaaccgtagatgattgagaaagtggccgcgcaaaggaggaaacatatatcattgtgaagcagagagaagcaaagaaggaaaagtcccgacgccggcaagcatggcctttaccggcgtcggagatggtggtcgagatagtgttcttgattatcgggccatagagcttttaccgtggacgaggttttctgaaattgtataattagttctctttcctcaacttctataagtcggacaaaaataccctcccgctcataataaattatttaacaacacaagaaaattattaccgacgtcatttatctgatttaaatgatattgtttattaaatatataagtaagaatatattatgaattacctgataactactatattaacaaaataacaaaatatatatcaataagtttaaaaatatattgtgttaaactaaattgtatcataataagtttataaatatattatgttaaattatattgtatcgcgataaatttataaatatactgtgttaaatcatattatatcgtgataaatttataatttatgggatatattatattaaaccatatcagagcgaatctaactccgaggattttttggttacagttacgaggaccgaatctagctccggattcacaaatgtttctccaccgttttggaaccggtctgaggttgagatctgagaaactcatccgctccgcccaaattccggtatcgaaaacgcagatgattacatctgatccgcaatcagattctgaatagagtccttttatgtatttgtagtcttaatttttatgttttctggttttataaattaactattttgttatcttgttaacatagtcattagttaattgataaaaaaaaagagaaagaaattataaagggtaaaatagtctaaaatatgttaacaatgacatttatacagttaacaaccggtcaaactaattataaggtcttccatggatatagaatgatattacccaaaaattaacccaaaattaatctatgaaatgccaaaatgatactacacttagatatattctacgttatccataagtgacgaagaggtaataattaatagataaagagtttttatcctacaagtataaaagacacaagaaacaaaaaattagttagcgcatcaataattgaagttctaggttttttcctgttcgggtgaggaaaagttttgttatttttttggcataaaattagttaatttgactgaatttgtttagtaataactcatctatactatataaaaattgaggctatttgcttctaaagccgtccacctaagcttttaaacgacgaatcgggaattaccacgtcaatagttaacatatttaacatcttattaattaacattttgcaaaattctaagtaaaaatctacatcttgcttttcattttgcagggtggcctttgtctttcgtagatttgtggtcgacccaaatggatatgctgggccttggccttttcttttttttttctggcaaaaacaggtattggcttttataatagtgtttacttctttgtttatcaatagttctttttgtatatatgaaaatttattagtaatatgtttcagtattaagaaattgttttagttgattaataggaatttttttaacaaaaatatataagacaaacatcgaaaagcctaaacatgtacatattttgataatttaagctgcaataatttctaaatataatgatgtataatattattaatatgttttacaccagaatttatattaaaatttctgtcttacttattaaaacaaaattttagattaaaaaacacttacgtaaaaagaaaagaatagtccttttgcatctatatcatcaatgtatagttacttatgtgattactaaaatcagaaaattatattaaataatcaataaaaaacaaatccccgcgtagcggggtttcaagtaaattataaagattgtgtaaaacagagtataaagtataaaagtttttcttattctcattcatcaatcatacaatgtttatatacatatagaggatccattactttctctccaagctaactttttctccaaggttaacttattaaaaaactcacatgagagtatttacaagatattcacaagatattcactacgaatatcctccaataatgatttcaaccatttaagctcacacgtagctaataccatagacagatactcaaattcagcggatgatcgatagacaacatcttgtttccttgttttccatgacaccggtgaatctccaagtgtaacaaaccacccaccaactgatttcctagtaatcgggcatcccgcataatcagcatcacaccaaccaaacaactttaaattcgaattagcacgcaaaagtgtgccttgcgctagcatccctttcaagtatcgaacaacacgtaacgaactattccagtgatccactcgcggctctttcataaattgtgacagagcgtgtacgacatatgccaagtccggttgagtggccagtaaataaatcaatctccccacaagtcgtctatatcgatctggattatccataaacggttctttagacagagcaagcttctgttgttgcgccattggagtgctcacggattgtgatcctaacaacctaacttcattaataatatcaagagtgtattttctttgacataagaaaattccttcttgattttttgcaacttcgattcccaaaaaatatttcagagaacccaaatctttcatgtgaaaaaaatatttcaggaattcccaagtatttcttaaagctttctattccagcagaatcattgcctccaataatgagatcatcaacgtaaactaatatatatatttccgagtttcttctccatagatgaaacaaagagtaatctgcacgtgattgacaaaatccatactcaagcagtgaactctacaacttcgtaaaccaacaccttggtaattgtttcaagccataaatcgattttcttaatcgacacaccaagttcttatctccagtttggaaaccgggtggcaatgtcatatacacttcttcatctagatccccatgaataaatgcattatgaacatccatttgatgtaaagcccatttcttcttagcagctacctccaaaaacgtttgaacagtggacatttttataacaggtgcaaacgtttctgaataatcaaccccttcttcttgtctatttccaagtgctactaaacgagctttgaatctctcaatcgtcccatcagcatgatatttaattttaaagatccacttacatccaatagcctttactccaatcggaagtgtcgtcaaatcccaagttttattgatctccatcgcatcaacttcgtttgacatagcaattctccaccttttatcaaccactgcttctcgaaacttctctggttccgtattcacactcacgactgcaaggaacgcaagacatggtgctggaaaaattgttgttcaagaaattgtgacaaaggatacaaactcttttcatcagatttgacttgaattattgtgttcatcacataatctttaaactttgcaggaagttgtgtttgtctcttcccaggtcccaatatcacttcaggtccatttataacaacctcttcatcagaatctgaaagatgaatctcctctgtttcaacctgttgatcgtcctttgtttcaagagaaggatctttgtctgtttaaacaaaaagatctacatcattattcagctcattcacttctcgtgaatactgtcctcgacttcgacgtcgtcttcacctcgcggcgtgatcacttcgcccataatcttcctttcgaccagtaatctcatgggccttactctttatgggcttactctccatctacgtggcaatcttcggttggtcccaaactccggtgcaggatccgacaccaacaatgttggaatctctccaagaacagtgatatgggagagattcagggggaagaagagtcatcaaaccgcatgattctattgatccatcggctgttattcattggacatatgttatgcaaggggagtttgaacagttcaagctaagcggagtgtagaatgttatggattctggtacgatcttccgtaaccagaatactgaagatggtgtggctatcagacacaagactaggttgattgctcaaggatatactctgatggaggaagtctcagttcgttttgttagatttggctccatcaggacactgcttggtatcgcgtgtgcatcaaattccaggatacatcagatggtggttaagagaggtgttctaagtgatgagtctcagaaggaactctatgttgatcaaccaaaaggttttgaaaactcaagtcatccttaacatgtttatagattgacaagagctatacactgtttgaagcaaactccggaaatctattatgaacggttgccgacttttcttgaggatcaagggtatgtacggagcagtcaagacaagatagtgtttgttcttacaaatgatagtgggatgctaatagttcacctctatggggacaatataaatttcggttctaccagtcaagaacatgttgaaagatttatcgaaagcattaccaaggagtttgaagtgagtatgtacggcgtactgaactactttctgggcttgtagattaacgagatgtatgaaggcatcctcatatctcagagtacatatgccaaaacttagattgagaagtttggattgatggccaatgaagaagctagaaaaccaatgggtgtttctgacaaagtctcaactgatgaggaaggagagggtatggtaaatgcatgtacggaagtatgattgaaagtcttcagtatctgactgccatcagaccatacatctgtcaagcagcaagtgtttgtgctcaatatcaggtcaaaccaaaaatctcccatatgacggcagtaagaaagatcctcaagtacgtgaatgctacaacaaacttgggcttatactacattaaagacactaccgggagtctcatgggttattgtactgcggattgggctggatcactggaggacggacggagtactaatggagggtgtttcttcattggaaacaacatggtttcatggcataacaagaaacagaacgacttggctttatccacacctgaagcagaactcattgctcttgaaagctgctgcacacaactcatgtagatgaaacaagtgactgaggactgtggtatgatctttgactctccactaattttgtgcaataatcaaagtgttgtaggtagtttcaaataacctattcgacagtctcatactaagcacattggtcatcaacatcattatattcatgaacttgttgaggcgaaattgatagctattgaccatgtgggtactaaacatcaactcgctgatttatttaccaaacctttggactctaacagattttgtaatatgcaaatgttcattggaatgtttgagatgttacttgtttgtgagttgtgctgatctaaaacaagggcgaaaagatcaagaacaagccatcgaaatccaaagatgaatagaagatcagtactctgtaaataaagatatgtggaaaatagttgtctgtcatgccgattccaattagacgtaaaacattgtcgtctaataggaggtcaaagagctgaggagatcaatgcattgtgtgacccatgtcaagtaaaaaaaaaaagaaaaaaaaaacttgtcaagatcactatgatcagatatcagcagttgagaagtcaagtgatattgctggtatggcaaaaataaaaagggagttgtgcaagtgttcatattatcacacttttgttgataaccctatctccaaaggaaaattccagctgcctgttacacgttgatctgatctactggaattaaaggcatgacagtgtgaaagactacccactgaacatagagctgaactatcgaatatgaatgattatggcagtttcttgttaagtcctgaacaagtggttggcataaagcacttaacagagcacaaggtataggccaaattgaaaattaacaaagttcttggtacccatttgtgtcaattgtctatttgggtcactaaacaagttcataattaagttgttgtgaaatattatcaatgctggaaaaacatgtgttaacagaatgttgagaatcaatggtttgactacttgcaaatgtgcactaattagtttgttaagtgtctcagattaacacgatttttaggtccaaggccatttggagtttcaagagcccatgagaacaaaggaaaattcgcttgggtattggagggaaaaagaggagttagggtttgacagatcaaatcaaccatcctaggaagacgagaaggcgaaagcttgtgcccaaagagaattcatcagaaattgagtgagaaagaatggaatccatcttctccgatcttcagcgccttgtccaccagaaatccaaatcaaattcctccgctgaacaatctcagacgagagcaggctacgagaagcctaaaattccaacacagacggaagcagaatttcaggtgtcaaagccagtcaaagaatcagaggagctagacaatcggtggggtatggttctttaacatctctgccgcccctagtcatcgaggtggaggaaagtgtgcattcttcaattgatcgtgttcagaagactgaatcgactgtaccagaggttgcaacatctcaaccctctatagcatatcgtttgcataagaggaaacagtcgactgctgctcaggttgacaaaaggcagaaaaagggcaagggcaaaggagtagccgcttcatctaccttcgaagaaacccggtttgtatctcgagaggctgaaaagaggtatgcttacttctcccataagaatattattgtggaagaaggtctttctcgaaagactgatgataaggttagagaatttatctatgatgctgggttaatccggactgtgactgagctgaaaccgtttgaagaagaacttgtgttcgagttctgggccaatctgccaacagtaaaggtggactctacatctgttagtgtcatggtgagaaattgagagtatgatttctcccctgaaaagatcaatgtgttgtttggtttggaatctgatgtcagacagcaacaaatggatatggctggtctgctggaagatgaggtggcgcagttcttgactgatgggaaagttaaattactgaagcgcctactgttgagtgccttctctttgccaggacgtgagctgtttaagctatgctgcacaaattggtcaccaacatcaaacaacagttatgcacagccggacagagccaaacttgtgtacatgatcatgcacaagatgccattcaactttgtaagattggcttttgatcacattctccagctggcactgaaaccagaaaccaagttcttcctgccattccccaatcttgtgtatcagcttactcagatacagcatcctgtcaagatcacagtgaacccaccagcaccaaaagcctcaacgattaagaagaaggtgaagaagaactcagctgcatgatccgagattaaaggatctaccaaccgcaaggctatgaggattgtcatcgacattctgaaggttgccttagatgcaggtaagtgttttctcatttctatctcgaattctctatcttgttgttgattttgtatggtttttgactaagttatgccatcaagcagggggagatgtgtcggattctgatgtggatgggggggagattaacttgtgggggagcttagttgttgttttccttttttttaagctcgtttgtatttcagaccaaaacaattgtgtgtgttttttgttgttcttttgaaccgatgattgtatcatcgtaaacatgggtttgtaataatttttgaacatggctttttagactaattgcagtttttttatgctagactgtgcatctagatattttctatttgttgtgtgttgtgtctcctgtttgactttcaggttagttcaaaagaggagtgcttgagtatcaaactgagtcaaaaagtgggagattgaagatgaagattccgatcaaccagctgatagcgatcaggacgctgttgggtttcaggaagctgcatcgaatcacatcagacgtttgagtttttgacatggaggcgggagctgacgtgacaagctaaggcgaatgatgtgataaaccaaggagggaagctgacttaacgctgtatcaaagacaagattcatcgagaagatatggaagatatcctctcgaagaataaggacggaataagcttggaaaacaagaaagatttcttttaggaattcttggagatcctaggtttagggttctggagaatatgtataagtattctagagatgagcgtggagccgcttgagcactctagaatactgtcatatgattgtaaacttcaaagcattgtaaaagcttgaaggtgagtgtgttagttctctttatctttaagtgtgtgtgagaagaaacagaggagagaattaagtttagttattcttagtcggagttgatcatttgggtagaatagattaagtaagatctgagataatacttgtaacagagttgattatcaataagaataaaatttaagcaattctctgtgttgtgttgttctctataccttttacagtgaattttgctattagattttgacgtttcccttgagaccacacttaaataatggtagccttttggatccttcaaagccttattttgtaggtttagaaattttttcttttgcaaccaatggacatggtgaatttccctaatgatctttgtattgattcgatttcgatttatgagaacatcaagctagctctaataagggttaccatggtattgtatcaatatgtgcttattttgatattaattagtgaacacagaagactttgaatcaaagtttgaacaagcaagagataaacgtgcaagatttaatacgattttagaggaacttatgttctaggaaatggaccaaaatataccatcaaattttaaaggccattttacgagatatctcaaaagtcaaaagactatctatacgtatgttagtaacttaggtctcttcgttttggaaaacaagacattataatcttctctaagcacattataaaagcttagtacaaccatcttatgatgccaatcaggactcatgactcaagagtgttaattagtaatgtaagttcacaacctaagcgagagataatcgtaggatttatatgattctacaataagatcttatcaatcatataatgaatagtataatccatctaatattttttttttagtttgcttatgtgtatacataacgacttcaaataaaataaagaaagcttataaacatttaaacattcaaacattataaatggtattatatttattcaatcatcctcttggttacattgatttgataaattatagtgaaaacagaaacttttttttttctttcttaaggaccatcttcccatttaaaacaagaagacaaatatcccccttcccgaacaatacgacaaatatggccgttatcaccatattttcctacttcccacatacattttttacaaactgaaaaatgtcttgttggattatcatctctagatactttaaaaatattaaagtaatgagatccgctattatgccaagtaaagtgacaacgaaatttcgtatttttccaaaagttgacatgaaagctaaaatcccatgtaccattccaaggaatatggacccacccaaaatcatctttactggatctacaatgtacattcaaaatttctctgttttttaccttgttgcggattacaacatgttttttggctagaggtaagaatccgtcaggatcctaacttggtgcttccgcgggagcattaggaaaatgtagtgcagatacaaaaaaaataaaagtagaagagatcataaataatattataaaataagatttattattgcaagtcatgactatgtaaattatgtaggcgtgattagataaaacttgaaaacaccttatttgtagatataagaacatgttaatatatttgagagtgaaggtgactagcattcatgtaacgttgaatacatgtacttagtctatgttagtattcaaagatataaatttttagtgttttcctttttaagttatagatttattagttttaataagaaatatatatatatatatatatatatatgtttggtaagaaatattttcggagtatatcttaatatttggaaaaatagttaatctttttgaatgtcgaaaaaaaggaaaaaatctttttgatgctttgactttgtaaaactattaaaagatcccaaagtcttttttttattgaattttatataagacctatgattttgtttcgtttacacaaaacacaaattaactggtttgggtgaaaagatgacaaatatattcaacggacttcgtcaaatgggctttgcagctgatgggctttacacgttcgttcttcgaccctttatcagtccgatcaacttatatataaatgaacatcaaatcagattttgctaatgagaattatcatggtaattaacgtatcaatcaatgcacattctgatactaatcagaacacaaaagactttgaattcatcggaggttaaacattacacacctaagtaaagagttaagaatatgattccatcgtattaaaatgttccacattacttgggattaagatttttaggtattatataaaggatgtggcaatccttaactcttgagctagcttttgggttaaagttaggtcacatttctaatatgctattagagctcaaggttggcccaacaagcaaattctcagaaaaatggtttcacacctatgtggctcatacaactggcataaaaaatgggacaaaatctttagctcttaagctagcttttaggtgtgagttaggctcatactaatatggtatcaaatcccatggtttcaatgtgtctcaattgtggaccacccgtggatgtccacttccacaaacttcacgcttcagatgtcgagtcctgagcgtgagagggtgtgttagaatatgtcacatatcaagaatttgataatttgtggagcaatatataagtatgtggtatacctactcaaaagctagattttagattaagttagaccacattcctaatacattgaactaccagaaaaatgatattaactcaaattgattcttcgtgtaataaataaaaattgaatctttcgacttcaaaaaagttctatcttcctcgtcttcttcttatgtgacaagaacgaacaatcctccactgacccaaacactcttttcgaaaatttcaacaaatcttcttcttcttattctcctattcatttcttcatttatcacttcatctctgtcaactccgtcgccggctgattctcctccttatctatggccgttatcgacagagttttcgtttggaaacgaaactctcacggtggatcccgctgtgatcctaatcgtagctggaaatggaggtggatcttctattcttttttgaagaatttagatgtgaaacatgagtaaaaaaaaaagaccataggcgaagcttagaggtcgccagttcgagtgatgcttgggatgaaactaatattacatattgtggtttcaggtctagaacgattatgggtttcagcccagaacctcctggtattcaaaaaaaaaaaaccatgtaaaaaactatgaatttggatgggctatcaggcttacaatataattttctgatttcacgtaacccaattttgtttaattgtttttataaaaaataattgaaaaaataaaaacctatgtggcaaattttattggttaggtgacttgtgatatataagataaagaatttggagcatttgcaaaaatactcattttcttttttttttcaaaaatacctttttctattgtcaattttttaaattatcccttgtatttacaaaataactaaactatcttctttttattgataacgaaaaagtaaaaaaaaaaagtaaaaattcccgccaagcgaaagatgatcaattcaacggaaacagaaagtaaaaactcccgttaaacgaaagatgatcaattcaacggaaacagagactcaaaacgatagatggatcatatgaatgctcaaaattttagattttagaaattgaaacaaactcgcatatccttcaaacgttttttttttttttctagaaagcgttcataagctttaaaatattttgctggcttaaaagtcaatattttgcttgcttaaaaagtgactttatcggtcgtcgattattgaaaattgcctttacgttgggttgagcatttaacattggacattgatttagcgaacgacataaaaaaaaaccgacgtcttgttcttgtacaatacaacatctcaacacaaaagttaaaagagtgatttctttcacaacttgtacattaccaaaacagttattaaaataatgttttgtcgctgcagagtttagccttccaggatttgtttcctttcgacctcgatgaattgtttatttatatgatagcttttggtggcattttgggtctcattctctcccttgcattgcagcaactgcaattgaagactcctgactagctcatttagcctctggatatgtctctcttgtgatataatgatctgtaaaaaacagtgaactttgctgttagattttgacgtttcccctgagaccacactaaaataagggcagccttttgtagatggtgactgaaaatacctaagtgagaaccattctacgagcagatgaagtaaacaatcatctgaaactaacctggaatgtgttattatacagatgaaaaagagtacaagcccataacttatatcatgttgagtcccaaaagctacgagctactaatccatatatctaacttcatttcaactcttggatttgcagctattacaagtgtcattgttgtctaaatgaaaacttgtgatcctagcatagataatgatagcctcaagatggattagcatggaaagatatagattactaagatggaagttggtagagaatacattgagatcaagactaagtggaaacccgaggttactcgatggtactaaaatataagatcaaaagaagttatgtttaatatagtcatatagttttgaattcttacttatgcatcagagaaaacgcactaagcaatccaagcaaaggatacaacacatttttgagaaatcttattgaattatttcatacataacagcagagaggaacagaacaagacacggaaacctatccaagaaaacatatagaatcgtagaaagtccaagaaaacgtaatcaattcaaaaacaataggtcaaatggtaatcaatacaccttctaagacagcaacccaaggattaaaaactgatttaatgaatgcatacacttaggtatgacgccaagcaacagatatataaagatgaagcgtaatcatcatgacactaacgaaaggtaaccaaccactacatctaggccataaggtcaccatcccaaaactatatcatgtatcttacatacaactaaacaagctcttcttttaacgggaaaccgcacagaaacatgcatgaaagaattgggaaccagtgccttccaattggatccttatagtactaaaatgtaaaatcaaagaagttatgtctaaattagtcttatgaattttccacttctctcaattagtcttatgcataagaggaaaacctactaagtaatccaagcaaacagttgaacaaaattttcagtattggagaattccaatacacaaccgcatagactaacagaataagacacgaaatccaatccaagaaatcgtttaaagttgcagaaagtcccataaaagataatcaatgcaaagaataaagtcgattcaaaaacaacgtggttaaaaactgatttagttaatgaaaacatatgacccttaagcacgacactaagcaacatatatatgaaagtgaagcttcattaacaagacactaaggtacccactacacagggcataatcccaaaactagatgttgtatacaactacaattctcgtcttctaaaaggaaacacacagagaaagtttggaatcagtaccttctctttgacagcttcttccctatctgaaatttgctgctgtttctgagacgagctagtggctgtatctaactcaacaagtggttgcctccattcaaactgagaggtaactataagtataactagtagacacacgagcaggaccggtttcgacattgtttaatgtttacttcagtttttaaaacacctgccaccccaaacacccaaaagttttagccaattcataatccaatacactatttacaagcctagcaactcaaagactacacatttcctttggattcacaaagcaattttaactatttctaggtaaaacaaaagtggtggattaacaaattcaattttattaatccatcatcatcaaattatatttggaaagtttctaaaatctgcaattactaaagtcaagcaataacacatttaagacctatctatcaacttgggcttttatcggcctctaagatcaaaattcaatttttcttgtaacccttttctcagaatcgacaaaaatgaagacccagtgaagcgattaagataatcttgaacttacaaatcgaatttgaccagaggaagaacgaaacttcatgatcgacctcttcctccgttaggttccgtgaatggtgaaattgaacgagatctttcaaaaatcgaattttgagatcgaattcgcaatcagaaacagagaaatgagagtttttgtgttagtagagaaatccaaaagctgaggtttttatttgattgatgatgaattgcgcaaaatcttttctttacaaaaaagaaacagaactaatgacgtttcagattgaccccataatttaatttttgttctgctaaaagtaatcctagattttattacttttagtaatttagcttgaaatttcaaattgtcacaaacacccctagttccctacccaacattgtattaattgaggagataaaggtaggaaacatattatacagagataataaagtttatgtttatagaccaattttaggctaagtcaaatatatgtgaagtattagtatcattattttcttttggatatttgatctgttacttaaaagatatttttagccataacataaaaactcattactaaaaaaaattatctttatgaaagagacttttaagacaatttagagagaaaaatgtattgtaaaacccaaattaaagatttggaaaataataactaaaacccaaataaatcgatctctataattctattattgatatcatagactcatagtaacaaaagacttttatactacatgaaaacaaaagttagaatagtcggttctctctattctctctattgaatctttcaaaggagactcattaagtttgttgccgtccggatcttttccggttatcaaatcccgtgtaacggactcttttccaacatgcaccagatttttaaggtgtttggttggcttttatcctacatcaattgacttttacagtcgagatgatcaagttggctgtcggcgtttcttgctgctttgctctcggttgttcatgaccgaataaagtttatgttgtgatggtcaactaggtgcccaagccatagattctcgaaatcaaattttgatccctagttctcatgcttcctcaaatccttcagatttagcttctcttccctaggccttcaaccgatttatccacctctctcatctctgagatgagtgatgttgcggttagacggttccttcagtttcctccaacaagatttcacagtcaaatttgggtcaagacctgaaaagtctacttcggcttatcggtcttccatcaaatgaatctcgaatttaccggtgtcaacatgtatttgatgattccaaagcttcatcatcgaagcctcatcaagttggggttgtaagtagatgttttgatttcttaaatctagtaattatcaagagatgacgcgtagttcagagttttccggtggttgtaatgatctccgtcatcactaacaaaattcagttcagaaaagaagtggtgttcacagatggcatctcaattggagcattaggaattaacttttagattttgtttgtttgattctggtttggtacctttaattggcttttgtttttgtgttttagatctgaggaatactcgtttccgccggttaaatatctgtggacttacatgtgtcttccggctttgtatcttaaatgtgtgttttttttccttcgtttgaaagtgtttgattgtaaaaaaagaataaagactcatagtaacaccaagaaatactacaaagtgtaaaagaagtcctctttaacttgataattaaaaccaaaataaaatatacattttccacatctcttttctacctgaaaatctcattgacaatgaatttataaagatagaaaaatctacctgatacagaattcatatatatctcgaaaaccacacaggttcatatacttagaacacatagatgctacacgtaaactaagcctaacaagaacaacatattctctcaacattaagaaagaaccaagcaaactgcctagaagatgtcttctttaacctcacactaaataaaacaccaacacggctatcataacgagtaaccaaacaacaacgtcccatcgcgctcggtttatagacttaatcgagtagataccgataaagcaatttgacatggatatgttgttctcttctccagtgtcattttgtaatggtagtttctgtagcaacgattgcatttgtttgtctaccatgtcaggtaaaggtagtactcttgtggtattggactctgtttgaagccttggtacattgatcagtgtattaccggataccgccggatcatctagctttactatttcatccctcagtatatcggcatagaaatcttcttcactaggaacctttaaacatggaaaaattcctgggaatcaaatcatgaatttagacctcaccatttgggttaatgtgctatgtcaacccgcaaatgcatcatgtgacatacttaatgatacaaagaactaattaaaagaggaccaacctgtggattttgtgaagattgtgaagattctgctatttcactaagtagttcttgccctgactcacttgataagtagaaatcaaccatagtttcccaaccataaatactttctgaaatagcttcattccgcaagtttacgtgcttatccagtggtaaacttggttgtggtggcttttgaattgtactcccttgaaattcagtattcctcctaagtcggcaaataaccagagcatcctatataacactcaagaaaattcaataaacataacaatattctatttgctagttagtactttgaaaagccttgtgtttcaaatatatagtactactattttgtggcaaaataaggcttcaaggatcagaaaaaagtttaccagtgatactccaatcatgcagtactcatgcataagccattccgttcttcctccttttggcgcgcggccaatgtggaatacaagcgttctctttgttccaatgacctcagaacctgacttcacattacgctcttttcctgtggctttccaatatcctatcttggttgctcttctgttctgtgaaccgtggggatacttcttaccgcgagcacagaagaagaaccattcgctatccgatttaacgatagacttatctgcgagaaacatgtagaagaacttgttaagaataaaagggagacacataaatttttctcagacaatggacaagaagattttgttgaacaaagccaacagtacctcaattgtcatagtcctcaactttttttcatgcaaatataaattaatttccacgtgaatacttacaaatgcaagagcagtttgtagcggttcaacgcacaataactacaagtatgagcaaatcaggacaggcatatcaagcaaacgttgaaacaaaaaacgcgtattttgattactttgatgcatttaactagttgcatattagaagctaccaacacaagccaagtaaccacaacttcaaaccaatccatggttttgctacttagttgattaggttttcaacaaatcagcctccaaaaataaacactgtaccatcaacgtgaagaaaatggtaaaaactaattaaccgcatgactagggattcgattcacatgtgtaatgagtaagcttcacagtccagtaaattgctacaatcatataccaaatcagctaaatttcaaaaaaattatgacataccctaagttgttgacataggggactcaagaatcaatgaaattcacacacgaaaatgctacaattagttccaaatttgtgacccgatttttttttttaagaaaataacaaaattcccatgattccaaaatagtacggtctactctttgtctttttcttccgacaagaataacctagtcctaacataacaaacttgaggaaaaaaaattacagaacaagaagattaactttgtaagaagaagaaaaaaagggtaagtatagaaaacgaaccaggtaaatcccaaggctcgaagttgtaaatctcaacctcaggtataatctcaacagatctctccaaaccatccatcttcctcttcaagtaataagatataagttcgatgtcggtcggggagaatttgaagccagggaacgtcgtcgtcaccgccggctcgatcggtggtgcagctgccataagggtagagatgatgcaaagagagtctttccgatcctttggcttctgataaacttgaggagtcaaaaaaaataaaaatgttctgtctcgggaatcggaacaagactcgtgaagaagacaatacaatatagtacaaaagaaggcgatgatcgagtgctttgctcactcacacctgcgtttcagtttttcttttttctccacaggtgttgctctgctattgaaatatttacgtatgacttccacgttactactcctgcctcaaattttaatttattaataggtcactaaggacgatttagattattcaaagaattagcgtctgattgttgtaggcttgtagctctagtctctagaattgttatatatatatatatattttactgtataattatgttggctgtattataagtttttgttttgtaagttttttcgtgtaattatttttaaaataaaaacataaaattgaaatttgtattatcagccttgtgggaaattcctcggctgtaaaaatagacgaatgtatatcattgtagtatgtacgttctgttttttttttttgtgtgtgtcaaaatatgtacgtacgttctgttttacaataaaattttaaattgtattcataatttacctcattatcagaaaaattactgatctggctaaaaaaaatctatagtaaaaactctataaattaataatgttgggaccataaaattttattaatttatattgatattaatttatcttataaatgaataaatattaatttatataataaactaataaatattaatttatagaaatatttatgtaaaatataatactaaattattttaaaaatatttttttatttagtttttcttatgttttgttgtttgtatattcaattatgttaagttcttatttattttttaatttattttcctgcaaagatattgtgaccgtatatctacgacgttaacgtgaggcttaatcaaatttttctttacacaaattttagcaatgatttttcacatataaaaaatgttacaaaaccaaatatgacggatgaaagcaaagagttatgtgagtacaaaagagatcatacaaacaatactctaaaaagggttgtaattgtgctgtgatttgaacaaaagtttcatataaaatagttttagaatgtatgcttaagatttatgattattaatttgtagtattatagagaccatatttttacatagagatttcaaaaaaaattattatcttattatcttatcgattttggttaatttttacattgacccgacttgagaccgacaaattttattaatttatcgtgtttattaatttatcgagtattaatttatagagttcctactgtggaaagaacagctgtagaaggacaagcagaatctaaaaaaaaccagattatagaatattttattttttaaaaaataaaatagattatagaacattttactgatctgactaatcggtttttataggaagagaaataaaacattttcttatcaagaaaattacagattcggttaggaggaggtgggaaatgatcaaatatggagaacgagttcaatctatatattagaaaaacgattatggaagaataaataggaatggaaataaaacgtcttttcaggaaaattaccaattcggtgaagagatgagaaagaactaactttggacggatcaacaaaatctaaaatgaaaagaaaccagaaaatagtcatgtcactcacagactagctcacatacaccatatatataattagataaggcccgtctatttaggcggatgtacgatacaaaaataaatatttatcgataatatttgaatattgtatagcaatctatatatttttcttgatatttaatttaataattattgatttaaacaaaattttggtcttatgcattctattttaattatatacactcaatcttatcaatgatatttgaattgtacaaagtaaccgaccattcttctatatttaatttagtatttagaaaaaaaaagaaaaaacaaatttgtatcttacaccattcaattttgtaatacagtttaactatctatgtcatcataataaactcgatttaaattctacaacttcatattgagtgataacatttttatatcaaaataatatttatgacatatcaaatctatatcctatttagtattaaaaataattaacaattaacaaaacataattaataggcctaggcataatatccaaacccgaagaaccgacccgaaaaatccgatccgaacccaaacccaaaattttcaagtacccgaacgggtctaaaattcaaaacccaaaaaacccgaacccaaacccgaataggtatccaaacatatctcaaatataagtatatattaatattttcacgggttatacttatatatagaaaatattacgattttttagatattttagttatttttgtgtatttttagatatattcaaacaaaactactcgtgttgttttgggaatttttgaaattttcaagtaatttaatagatttgcacacaaaatttgatatttcaatatataaataaactcgaacccgaatccgaagccaaactgaacccgacccgaaattttaaattacccgaacgcgtcctaaacttttaaacccaaaaacccgaacccaaaatacccgacccgaatacccaaacgtttagggctaataattaataaaaaaccaaacattgttgaaaatatattttctatatatgccgtaatctcgtaagttaattttacatcatgcaaattaatattagatgagttaaaattaataaatgaaaataattgaaaagttaaatcctataagttaagctatttttttaaaaatgttctattttcacttatgattacatgagttaaaaacaaatttgttaattttccttttgttgaataaatcttaattgtttataaatatataaacatataaattagtatatgtaaatttgtttactttttaagattttctattttttttagagaataaaaaagttaaattttgaatgacacatgtaaacatctaattgtttgacttgacacgtggcacaatcctatgagttagcaactttgaaaaccatactttatataataagatataaaaatctggaaaattgagaagtttaagaattgtcgttaccatttttttttgcatgaaaataacaaaaacagctattgtacatgctccaactccaccagcaaatgttcccactaaaagtctaactaagtcaaatttctaagtagctatagtagtcgttctacgatgaaaatcataaggatttaaaaagcaatttaaacctatatatcgaagcaagctatcctctagtagtcaactttgcaaactttggcatcaatagtagttaaaatctctttcatttcaatagttctttttcttttataattaaaataagaaaaaatgtactgtgcaatctgtgtacattaaataagtataagaatcaaattgagtatatttatgtacatatggatactagaaaagatatatttatatacagatcacattactatttctatctaaaaattaaacaaaaattattcataaataataatatataattttattattagtggcattattttgtaattacatcatttgattgaggacttgacaatcatacaaattgtgtccaattgcgaaaactgggtattttgctaattttgaatagtaaaaaaacaactactttactaggtatttttcaacttatccctaaaaaactgagcaccatagttataagaaaatgggataaaaacataaaatcgtaactatcattgtagacatagtttgaacgaatatctttaaatttgtcttctatttatcatcatttaaacaattctccttagttaaacaaagaaaattattcctctttaaaaatgttagttaagttgtcgattcataatcatagtcttagcatcaactacagaagaaagcggagatctatatacgaaggattttagtattgagcttttgattacatacttacccaattttctcattatatcggtccaactagattgaagtgtaattcactttttgtgcaattttattatttacatttttaatggaagagttagtaaacaaaatctcaaatacacttgccatgaagagttgggttgaatgaaatatgaatcatatttagaaatatatccgaatatttcaaattagctctaagttatgattaaagaaaaaactaatttctttaattatttaaatgttaattcagttaatcacaagagaaactaaatgtgcaaccctattatttagttagtttatgactgttcttttttctaaaatgtatataaatgtttatcttgaattattattttcaatcaccactaaccattgaaaatcacatccaaaataaaattgaaggtaaacatttatatccattttaattttcaaataaaatattttgattatttttctcctaatctcctatattagtgggtactaaaaacaattatatttcatatttttgtttatcgactttttctgttgcgggtgcaactttgaaatattttttttttacgataaataaaacgaccacatataatcgtaaagtggatgtcttttttcaagtgatcttctagtttctctattaaaaatgataatgtatttagcattatggcaagcaaaacaaatataaaccgattacaaaatattatgatatacctttaaaaataaatttttctaaatattctttatttttatttattttttccatccaataatattatcattgcaaattttttacatcattgtttacaaacggctttaaaaagctaggacatgtttgatataattcaaaagttgtattgctatcagtagctttcttagccaagacactagcgcagccgttaatattctttaattttccatcaagaatatatatatatatatatatatataggaatatttatgcaatttttaatattaaaaaaaaacaaattaacccatatacacaacttatccgcctctaccactgcttgacgttgtgtcggagtgtgatgtacgatcgttaattggaacaaaggattgaaattaggttttcatctactgattgcataacttgtgccacacgcatacgacatactctattttaataatgctttgtgaattagttatttaggtttcaaatcgaagttgaaattttttaattttatgtcacacgctctgtgcctagtgcaaaaaagtgaatgcatttttttttttttttctcaaggagaggtttgaaattttagtaaaatcatcacttaggttaacatgcacctcgtaaagtctcaactaatatctaaacctttcacatcaagttgttgctgaaaactttctaaaagtaaaactgtaaagattggcttatcgatatcgtgattcctacgctcccgccatgccaccgttaaacaactccatgctgcaatctcaataaaacatagttgttttcatgtgtttttgtacctgcctccacttacaaacaagtacgccacaaattcgtaagaacataaaatggcccttatcaagaacataactctcacaaaactcaagattcaaagcttttcttaacaagaacacttctctttggactcatatgatcaagtctgttatgccatgagttggtttcgtctttgccttgttcaatgtgattctttttgacagacccttaagaccctttctgattttaagataagcgttgtagttggtttatgtgggccgataaggcctatttagttggtgaaatacaaggtatgtcggcgccaagcttttctctgtacatcgttggttgatagaccttgaagaaattgaaccgtatccggtccgctaaaccggacaacgtagcttaatttaagtcgagatgccatcggaccgtatttcgattagagtttaagaattatcaacgacagtgaagagaaattgaatccatttaaaccatataaaatatgattaagtttcacattgaatatgtcagtttggttcttttaggattggatctatttaacaagattgaacacccctggcgaggaataagcatgacttttccacagctacagttaaaagagtatgatccaattgcttcttgtggatgatttatcggatagagttgataagatcagattttacacgtaagtgcacagttattgtgtcgtatcgataagtcgataactacatcaaaactacaagaagtaagcaatcatcacacgttgggtttccaagagtatatttaattaagacggaacctttttcattggttttgggtttgtataattatgacttataacataatttagaaattaaaaagaaacaaaaaaaaagtgccatactctgacgaatgtattttgtaacacatacttatacttttgttatagctaattttccattatttaagttaaaatctgtaatcaactaatcatatttatgaaccatagttcatttagctagcaattgtttatatatatatatatatatatgagtgaaacaaagtttgtattttgataaaaacaaagtttaccaaaaaaaaattaatttgaccttgttaaattatatatataacgggtccaataatgtaatattcaagggaggaactcgaccttgttaggaggactcaataatgtaatatccaatgattcactgggattgatctgaaaatgtcaagtttttctaggtgaaaaatggtccgttacaaatactattagttgaacgttatttgacatttgtagtagatgtttgaaaaaagttttttttgtagtcttttcgtattaacgaacattgatttccaagatagaaacatatctccaaaactttcactttcatcagcataattttcaatttagttataataaaaataatgataagaaagaaaaaaaaaacgttttcttactcgtcctaaaataaataaatgcagtcaacttattagatagatatctacatttacattttttcagccattttaccaaataaatactcaagttggaatttgtttacaagaaatattgttaacattaattattattaataattaatattgctaattatttgcatttccttatctaatatatctccatcaattctaattacttttaaaaaggagaaatcttaaaactttattaatataatactttcttaaagataaatattatacttatttaaagtttatcaaatttttagaatatttaacgaaaaacatttagaatataaataatatataaaatctataaaattaaataactatttcaaaaaaaaacttttaaattgattggaattataaatcttttattaaaaaatttattagaacaaaaaaaaatatttaattttaccaaactagattagatggtaagacgggtttaaaatattatgatgtatgaattttataacaattaaataactatttgaaagaaaaaaattaaattaatttgaattatatatcttttaaattaaagtattattaaaacaaaaataacaaaaacaaaatgtttaatttcactaaacgggtttagatggtaggacgggattgagtcgacagtaatacgagacggtataccaaaggtgaaatccattagatatgtttagttttacttaacgggattagatggtagaacgagtttgggtcgatagtaatatgagatggtataccacggatgaaatcctaataataacaatcaaaatacaatcatattatcttaaatattaaaaaaacaaataatattaataaaataaatataatttaaatttaaattatttagttataatttagatttatcttaatgaactatatattattgtttctatatttttaaacagtaaacatcaaaatagtaattgtatactaaataatatataaatataagagttgtacattaagaaaatacaaaacattaaatcatatatatttttaatcgaataaacaaaataaatttttattcttaaaaaaacaaaataatctcacggtttaccgcagattaaaatctcacggtgtatcgcagattaaaatctagtacgatcgaaaaacaaaagtaggaaaaaagaagaaagaagaaaaaaaagattacaccatacgaaaatagaaaaaatgcatggaataatggagtaataatatattttgtttaattgtcagtctatatttgggtgaatatttttccaaattaactgtagcaaataagaaggcaaatataatttgataacaactattagagaatctcataatcttatcttcttacttagtaaccattggtcataatgttatatatattgcgagtcaagtctctcggtaatatcgaagtaagactaaagctcaagttaaaacagaaaaaatgtcaacttcagaaaacactccgtttaatggcgttgcctcatccaccattgttcgagctaccattgtccaagcctccaccgtctacaacgatactcccgccactctaggtaatctattaatcattttcattttaggtaggtcaagtttacgtaacgttctacatgaattttgttttcagaaaaggcgaacaagtttattgtggaggctgcaagcaagggatcggagctggttgtgttcccggaggcgtttatcggtggttatcctcgaggttttaggtttggtttaggggtgggagttcataacgaagaagggcgtgatgagttccgcaagtaccatgcttctgctattaaagttcctggtaaatgctattctgttgacttttttctcttattgtttttttggacaactttaatctttgataaacgtcaaaacaattgtgcttgattatctgaatatccatgtacaccacctgatctcggatcccaatctctgatccaatcatatcgggtctgaaaaattgagtatccaaatcagttttgtgtaaactaggtttggacactgatccgtagtcatatgccctatatctgatctttgcaacaattcactatgtatatgcgttattaccaaaccgaaagatacccgtttaaaactatctctacatatttagtatttacataattacatataatcttatttaagagaaaacaattatatttgaagttagaaatcatggtctttgaaatatgatgttagctttgaatattataatttttggttaaatattctgaaaagaatatgactttttaagcattaaaatgttataaaagtatgaatactgactaaaacgtaacttataaagtattattttgtttatatggtactttttttgtgtgatgaacctgtaggccctgaagtagaaaagttggcggagttggccgggaagaacaatgtgtacttggtaatgggagcgatagagaaggatgggtatacactctattgcacagcacttttcttcagtccacaaggtcagttcttgggtaagcaccgtaaactcatgcccacaagtttggaacgttgcatttggggtcaaggagacggatcaaccatccccgtttacgacactccgattggaaaactcggtgctgctatttgctgggagaataggatgcccctctacagaactgctttgtacgccaaaggtcagctcttgatgcaatttagtttgagtgtttgacaaatgtagcctttaataaaagattctaacacttttttttttttttggtgcgttcaggcattgagctttattgtgcacctactgctgatggttcgaaagaatggcaatcgtcgatgcttcacattgcgatcgaaggtggatgtttcgtattgtcggcttgccagttctgccttcgtaaagatttccctgatcatcctgactacttgtttaccgattggtacgacgacaaagagcctgactctattgtttcccaaggtggaagtgttattatttcacctttgggacaggttcttgcgggaccaaactttgaatcagagggtctcatcacagctgatcttggtaaaaatatatataatcttctttagtttttatcttaggctatagaaaaggataatttttttagctaatcatattttatttttgtcatcaagatcttggtgatgtagcaagagctaagttgtacttcgattcggttggacattactcgagaccagatgttttacacttgaccgtaaatgagcacccgaagaaaccggtcacattcatttcgaaggtggagaaagcggaagatgactcaaacaagtaatcggttgtgattcgtcagttcatgtcactcctatgaaggagtcaagttcaaaatgttatgttgagtttcaaacttttatgctaaactttttttcttaattttcgttaataatggaagagaaccaattctcttgtatctaaagattatccatctatcatccaatttgagtgttcaattctggatgttgtgttaccctacattctacaaccatgtagccaattattatgaatctggctttgatttcagttgtgttcttttcttttttttctttgcatatttgcatttagaatgtttaataattaagttactgtatttccacatacattagttccaagaatatacatatattaatttatttttcttaaaaatgttttggaatgactaatattgacaacgaaaatagaagctatgctaaaccattacgtatatgtgacttcacatgttgttgttttacattccctatatatatggatggctgtcacaatcagaaacgtgatcgaaaaaagacaaacagtgtttgcataaaaagactatttcgtttcattgacaatttgtgtttatttgtaaagaaaagtggcaaagtggaatttgagttcctgcaagtaagaaagatgaaataaaagacttgagtgtgtgtttttttcttttatctgaaagctgcaatgaaatattcctaccaagcccgtttgattattaattggggtttggttttcttgatgcgaactaattggttatataagaaactatacaatccatgttaattcaaaaattttgatttctcttgtaggaatatgatttactatatgagactttcttttcgccaataatagtaaatccaaagatatttgaccggaccaaaacacattgatctattttttagtttatttaatccagtttctctgagataattcattaaggaaaacttagtattaacccatcctaagattaaataggagccaaactcacatttcaaatattaaataacataaaatggatttaaaaaatctatacgtcaaattttatttatgacatttcttatttaaatttatatttaatgaaatacagctaagacaaaccaaaaaaaaaatactttctaagtggtccaaaacatcaattccgttcaatattattaggtagaatcgtacgaccaaaaaaggtaggttaatacgaaattacaaacatatctatatacatagtatatattattacctattatgaggaatcaaaatgcatcaaatatggatttaaggaatccataaaagaataaattctacggaaaaaaaaaaaagaataaattcttttaagtttttaatttgttttttatttggtagttctccattttgttttatttcgtttggatttattgtgtccaaatactttgtaaaccaccgttgtaattcttaaacggggttttcacttcttttttatattcagacataaagcatcggctggtttaatcaatcaatagattttatttttcttctcaattattagtaggtttgatgtgaactttacaaaaaaaacaaaaacaaatcaatgcagagaaaagaaaccacgtgggctagtcccaccttgtttcatttccaccacaggttcgatcttcgttaccgtctccaataggaaaataaacgtgaccacaaaaaaaaaacaaaaaaaaagtctatatattgcttctctcaagtctctgagtgtcatgaaccaaagtaaaaaacaaagactcgagttgatatgtctagtactaaagatatgtcaactgtccaaaacgcaactccttttaacggcgttgccccatccaccaccgtgcgagttacaatcgtccaatcctccaccgtctataacgatactcctgccactataggtaaccaatccattaattcatcctctgacctatttttatttttattttttgatatgtaaaatttatcgaaaacgttccatttcaatatgtagacaaagcggagaagtatattgtggaggcggcaagcaagggagcagagctagtgttgttcccggaggggtttatcggtggctatcctcgaggttttaggttcggtttagcggttggcgttcataacgaagaagggcgtgatgagtttcggaagtaccatgcttctgctattcatgttcctggtattactatttacttccattatttgtattctttttattatcatcttatcttgtattttatccataaaatgatttttgatacatttttaaccaatcaatgactttgaaccatatcctcaattattgcatgcttatcctaggccgagtgtattcaaagtatacaccacccgatctcggatccaagcctaccaaaaatttggatatgcggatctagatgacaatatttatcctgatctttatcttttaaatgtataaattactatatgttacattaaattttataatttttacaccaaaaaatataatattaaatctctttaattaaagattttttttatttctcctttatttggttgctggattatgatttttagttggctatggttggagtcttggtgatgtgtataagttttggacaattgaattttatttggaacaaagtaaacttaactttgagggaaaatatgtttgatttcgagttctctttttttttgtcacgtttagatgaaatttaattggaacaagcatctaattaatgagtgttcttgctctagtttaaatttagttgagcactctcaatatcttggaacacaaaatgactctttttggtttttgtgatgaatcttcaggccctgaagtagcaagattggctgacgtggctaggaaaaaccatgtgtacttggtaatgggagccatagagaaggaagggtataccctctattgcacagttcttttctttagtccacagggtcagttcttgggcaagcaccgtaaactcatgcccacaagtttggaacgttgcatttggggccaaggggacggatcaaccatccccgtttacgacactcccattggaaaactcggtgctgctatttgctgggagaataggatgcccctctacagaactgcattgtacgccaaaggtcagcttttaatgcaatgccgtttgaaacatctaggcttttacaaaaaaatcttacaaagttttttttttatttttcgtttttggtgtttaggcattgagctttattgtgcacctactgctgatggttcgaaagaatggcaatcgtcgatgcttcacattgcgatcgaaggtggatgtttcgtcttgtcggcttgccaattctgccagcgtaaacatttccctgatcatcctgactacttgtttaccgattggtacgacgacaaagaacatgattctattgtctcccaaggtggaagtgtcattatttcacctttgggacaagttctcgccggaccaaactttgaatcagagggtctcgtcacagctgatattggtatgtatatgtatatttacactctcatttgatagtcatcttaggttatagaaaaggataacgtttttttttttttttccatcaagatcttggtgatatagcaagagccaagttatacttcgattcggttggacattactcgagaccagatgttttacacttgaccgtaaatgagcacccgaggaaatcggttacattcgtgacgaaggtggagaaagctgaggatgactcaaacaaatagtaagagacttgaagttcgtatctgctggagttatgtcaatcgtatggagtcaagtccaaaatgttctgttgcgttttcattttatgttcaagtttatttatctttctcttcaatggtaagatctatggagtcaagtaataatggtaagacttatgttgttgaataaaacgaattggttctctcctcttgtattttaaaactgtgccattatgtttatctaatttgggcgttgggcgttgaatctcaattgttgttcagccgtataactatttagccaactattatgaattaggcttttgagatctctgtttttttttttttttaatatcaggaagttctggatcgaaacttgtaatccttccaggcccgaaaccacatcgtataatattagtttcgttccaagcgttactcgaaccgatgaactctagctccgcctaggatctttaccaattgagctaacgacacttggttttttctctcagatctctgttatgatctttctaattttctttgtacgtcaaaaacatatattttcatgttttaataattttcctattgcatagaatcacaaggaaacatatatagtcaagacttgaaaatcatccattcgaatctaatgagagtttgaaaagagtctaccaaattactcaattgtcaaaagccgaatcatataggataatgatggctaaccaaaaccaggaaattcaagtcacatataggataactaagaattagtgagttattaagtctcaaaaattagaacgtcgtttatttattttgtcgtcaattttgctatacttctatggttgtagtattgtttggggtcaaatatatcaaccaccccgctctttacataattaactaggtgttgttccatgtcttgcgtacgtacgtcagattcattttaaatatgtggtttagacatgtgcatgtgaagaatactttccgtgaagaatactccctttaacgaagacaatttggttataacataaatacataatttgaagtctagttgcgatggtgtttgaaatggtcttaattataaatcacaaatttggattgtaattgatgaacatggattttgaaatacttgattgaaaaggaatctatgtcacgtagctttttaacgagtcaaagattgcacaatcgaagctacaagcaaaaagttgtgaatagctgtatgcaagacgtagacgttgcattgcgaaggaaaaggaagtctctataaattggaaacctttgaaaattctaatcaaagcgatcattatataattatgataactcacaactcgagttttaacccaaatacgaacttacttaaccgcgcatattggacagtcaaatgcatgttagtaagtcatagccaaaagggtcacacaccagaaaatattggggtacgtagaacttaagtaagacgaaataagttttttttttgccttcgttgtcagaaaagaatatcaaagcattatgcatatttgcatgaattcatgaatgtacaaacacacaaagcaccaataatgggattaagagttgaaatcgttctagaagtcatataacgaaattagatcaatcttctttcaaaaagtataacctaaatagttcaaatatatatgaatcatgtgccatcctttggatgagagaaatttaagaaaagttaagtcgaagttgaccagttcacagaaaaaaaaaaacagctaaacattaacattgattagccaaatattttttgctcctctaagttactatacgcattttaattaaaatttaggtgatcaatcaaatattagcacgaagatcatcctagatggaaaactaattgaataaatctctaaatcatcatctttaatctaacaagcaaaacaactccttgataatcctaaccccaattgaggatctaacttagtcataacaaaagaacataagaaataaatatagaagaaatatgttaaaatataaaataaaaaatccaggtttttttatttttttggtttttaaaaagttaggtttcataaatgtttttaaataaaaagtgtagagtcaaagattcgattcaccaaactatctctttgcctttctaagaaccagaataaaatacaaattagttgaggtgaaatgatatggtgtaattttgtttttttattttcttggtccacaacataatatgaataataacacatgaatgacactaacacagaccataactcacaccaatttagtataatttgttaaatatatttgcttaaaggtttttgtagtgagaagttacacatgaaaagtacataaataaataaaaaaattacacaaaaagaccttctttgctgtcgattgaattaataaacatgtgcaaattaatgtaaatatagaaacacgacacagccaaaaagaaaataacattttcttagtggtccacaaatgacaaattaagtacatacaacttcttagatagaaccaaacgaagagaggggaaaacaaaattacaaaataaaaaatattatctatcacgtggaaacaaaatgcatgaaactatatatggggtaatagcctaataggaattaaaaaaacaaaaaaaaacctaaacaaaaaaaaatccataagttatacacaaaatgtatttggcttgtcttgtgtccagattctttataatgttaatggtactttttctctttcgttgaaggcatcaaagatggtttgatagtgttacttttttgttgtgcaaaagaaaaacctttagtcctattatcttccattatctttgtatattttcactataaagtcgatataaacgttctttattgtgaactgtaatctttctgtattattgaacatgcgttaaaagaaatttttttttgcaaacctttcactttcatcaatttaattttcaattcaattagtggtcctacgtacaaagtagttgtacagtatacaacttattagatagtatggcgagacaataattagaaaaagattggactgcttgaaaattaaaggaaaaaagattcatagcaaaatcgtaagtaaataaaaattattacttcttatgatgaagcaaaatgtttgggatatgaaataatatgaacaaaagaaaaaatcattaagttcacagttgaataagtggtgatggtctaacggttttttaaataaatgaaatatattttaaacacgatattatcaacgattgatattttattagttttaaaaatgaatacttaaaatcactagttaaattctatttttcttttaaatcttaaatcttataacaaaaatccgaaattgcttaacttttacatacaagtgtgtttataaatttgtagagttttgattactcagattggagatatcttgctaatgatattttttcttctttgggatgtgttgccttcttcgctaaaggagagagaaccccatttgtgaattctgacgtcttcggaaatgtaatgaggctacatttgacaaacttaaaaattgctcagaatcttatttgctcctaaaccaaatgatggagaaaacagtcttttacggtaatttttatctttttcttgtctaatttttctatgagattttttatttaaatagtcagttataaacattaaaatattacttgatattttgaaaattaaaatgatatatgctatgaaataattttgattattttaaatatatcatctgttaaacggtcgtccaatattagtatagtaccactttctctctacaatctctttagctttatatacatttttataggttttctaaacgtctttgtcccacaataatctctctaagtacatttttatacattttctttacaaatatttgtatacattttatatacgtatttttctatgcttaagagttttggtttacaaataatataaataattgagtatgtgaatccgacatccacgagatagtcttaatataagtgacaatagttttaaaatataagtaacaaaaactagaaatatgttttttgcagattttttgaattaaaagcattttatgcaattgatgattaaaagattcaattgaaaaaatctcaaacttgtttttcttttatcatgtaataaagttgtagttccacttgagaatatgttttttttttcctgatatatgcttcgcaaattacatatatatcattttttaaaaatgttacatatcacttattaatttttttaaaaacaattaacgatttattaatttatcgatttatgtcattttttacattgtttcaatttgaaatcgatttttttttattaaattataaaaatgattaatttattgagtattaatttatagagattttattctatataacattaggtggagaattacatttatattcttcttaccttcatattaggtggaggattacatttatattcttcttacataagataagaaaaagaacacgtgaactactgaacacgtgaacgcgtgatccaccaccggttcgttctgcaataccgtctcaagtataaaactaaaaattgatcgacaaaaaaaaaaagactatatataatgcctcccaagtctcttcagtgtcatcaaagtataaagtaaaaacaaagactcgagttaatatgtctagtactgaagaaatgtcatcagtcaaaaacacaactcaggttattggcgttgacccatcctccaccgtacgagttaccatcgttcaatcttccaccgtctataatgataccccggccactttaggtaactaattaatccattaattattccgctatatatatatatatttttttttttgatatgtaacatttatcaaaacgttccatctcaaattgtagacaaggcggagaagtttattgtggaggcggcgagcaaaggagcgaagttggtgttgtttcccgaggcgttcatcggcggttatcctcgaggttttaggtttggtttagcggtgggagttcataacgaagaagggcgtgatgagtttcgtaactaccatgcttctgctattaaagtccctggtaaaatcatccgttgactctattttttttttgtatctcagtttgtagtttcattttattatcttgtttaagtaaattgatattttgatagatttgggactaatttatcagtaacattgaacaaaaatcttcaattattatgtgcttatccccgagtacgactatttcaaaatcaccacccgatcttatcgattttgtaagattggatatgaatgatataattaatattcaggatccgttagaatcggatccatatgtttaattgtatatagtattacacttcattgtctttttacttttggcaacatatgatactctgttattattattattatatatatttttctgtcaatacaacatataaagagtttcttacaaaaattacaaaagtgtttttaatttttttctctgtccacatcttgtttgttttctgcttgtcttgttttgtttgattttaacgtatccggattcgttgctacccataagggttcggaaatccggattatggtttttatttggttatgcatgttagctgctgttgttggagtcttaaggacagttaaattttatttggaacaaagtaaacttaactcttaggaaaaacatgtttctgcttcatgtagagttctctgtttttgtcactatgagtgttatagctctagtttaagtgagcactctcaaagcttggatcacaaaatgattatttcttgcatatgtttggtactcttgtaaatgatgtaatgaatctacaggccctgaagtggaaagattggctgagttggccgggaaaaataatgtgcacttggtaatgggggctatagagaaggatggttatacactctattgcacagctcttttcttcagtccacaaggtcagtttttaggtaagcaccgtaaagtcatgcccacatctttggaacgttgcatatggggtcaaggggacggatcaaccatccccgtttacgacactcctattggcaaaatcggtgctgctatttgctgggagaataggatgcccctctacagaactgcattgtacgctaaaggtcagctttacaatgcaatgtagcttgacatatccggcttgtaaagtaagattcctaataaatatgcgctttttggtgtgcaggcattgagatttattgtgcacctactgctgattattcgttggaatggcaagcatcgatgattcacattgcggtagaaggtggatgtttcgtgttgtcagcgcaccagttctgcaagcgtagagagttccctgaacatcctgattacttgtttaatgacatagtagacactaaagaacatgatcctactgtctccggaggtggaagtgtcattatttcacctttgggaaaggttctcgccggaccaaactatgaatcagagggtctcgtcacagctgatcttggtatatatatacactcttctagtcttctttatattcatcttaggctatcgaaaatgttgactttttaagctaatcatattgataacgttatttttttcatcaagatcttggtgatatagcaagagccaagttatacttcgatgtggttggacattactcaaagccagatatttttaacttgaccgtaaatgagcacccgaagaaaccggttacattcatgacgaaggtcgagaaagcagaggatgaatcaaacaaatagtcaagatttgcaattcgtctactgaagttaagtcaagttcgaaatgtttttttttcagttttaaagttgatgttcaagtttatttttctttctcttcaataatgtaagaggactatttcgatatgttaaaataaaaccaattggttctctcctcttgtattcaattgtcgtgtaataatgttttgttcaattcgagtgttgattaagttgtattctttatttttcctttgcatgtcaaacacagattttttgctgtttaaataagttgctagctaagtctagatgtgagtttgaaaagtcactacaaaactacttaattaattgtctattgcagaatcagaattgaaaacacatataggagtagaactaatatatatcatgaagaagttttctcagaatgtagtcggtgatttccaacaaaaatgttatcggaccttcgttgaatattttgacagatctcaaccaatcgctcgatcttccaatgtagttggtcgtgtgtaattttcgataaatttcaacgttaattgtcgtcggaatatgatccatcttgccattgtcaacatcttatatgcatgaaaacaggaaatataattattatacatttaattagtaatttcaaaaactagaaactttagtgagcaaatttaaacgaccatttcgtctttaggcctattgaatgttttggcatcgttgttgttgtgcattataatggctcaccccagtctttggtctgatgtgtttctttatttgatattctcgagcaaaactaagaaggttccaagatatttcagtttgtttggataacaagttaggtttttgcttaagaacgaagaataagagcttaggttttatttatagatttagagatcgtaatggaagagaaatgtatttccaatatattcagaactgagattacaagcgtttaaataaattacacacactatcttagaggatctatggagattatatctacatcacaacaaactaagaaaaccgaaatatatggaacaacttcttgttctgttttattgtgtaactcaccgcataatccgctctattattctccctcaagttggagcatgcaggtcatggatgcccagcttgatgcagaattcttcgaactcccgtcttcccaacggtttagtgaaaatgtctgcaagttgtgagtctgtcttgacatgtaacaaacgaatgtttttagacataacctcatctcgcacaaagtaacaatcaatctccacatgtttagtgcgctcgtgaaagactggattagtggcaatgtgaactgctgcttgactgtcgcagtagacttgcatcgattgagtgtgtggagctcccaacgccgataaaatcatctttagccaaattaatttatgtttcaaaaacgccattgctctgtattctgcctcagcagaagaacgactcattgttttttgcttttacgttttccatgaacaagaagttgttcatgcgatgagttacacaacaaaactgaacaagaagttgttccaaatatttcggttttcttagtttgttgtgatgtagatatgatctccatagatcctctaagatagtgtatgtaatctatttaaacgcttgtaatctcagttctgaatatattggaaatacatttctctttcattaattgaccaagagaaatcagatttgattgaaaatcctcaacataataaactgagtgaagatacattaactctcgactttctctctcagacacgattaccaaggcaccttatccaaacagcctttccgacgtcggtgaagtctttgctcgtaggcgccgggattccagttgctttttcattttgacatcgcatcctctctttagttatcttctgtacttttcccctttgatgtttttccccaatttgttttctctgtttaatccttctcaaacccctttgaacactttctaccaccttgcaattgcatcgcatccaggctgctatttaatcacaagcgacaaaggaaggatttgggatctgacaaatcacgcttccctcttttacctcgcagctctctccacagatcttttcctctgggctattgtatttcatgccggaaaggatccaaactcttggagctatgcttttgactcgggccaaggccatcgcctgttaccgcagatccgtcatgcatcggtgttgatctctgcgttgcaaatctcatcgtaattcacggacggtggccacaacctcctctcgatctggcaatccacagtgaaactagggttttccccagtggaccttgtttccaaatttgacccatcccatccaagaaggcccaaacccatcaaatatgcaaaaaattcaaagcctaatactctcaggtctgttttcataagccctatgctaagcccaaaactttacttgcgtcgatcttctttactctgtggttgtgactccatcgaagagaggtatcaccattaacgctttggtctttcatttactctttgcaaaccctggtatttgttgctcttagggacttgtggtatgtttacgaaagcttgaagatctataatctatctatctcgaatcgtccttgctggtggtttaattgttgtcttgttctaacctttcgttaatgaccaatgttccccaagcagttcttatgtcgtttacaagttttgtaccttcatcaccatctccatcatccagatcctatgctatccaatgtttggatctatctatcgaagtgatctctaccttccgctttgggttttaaagcctccctcaaccgactatagcaccatagtctcttgaatctctgtcatagcattattgtgggtatcgcaacgtgtcctgacgagaaccttaaccttgattcattcttcaacgtcgcagcgtctttcgaccatgaccaatctatcgtccttcaaagaagacctctcgattcaccgtgatctcacttgttgcagtgcgcttccaagcccttgttccaaagttctcatggatctacaatcgaagacctttatctttcttgtcttggcattggggaacgtcatttattgtatggaattatgttctgggttttctaaaactctttcctctgtacttgttctcgttctttaatgaaagcaagttagtttgataaaagaaaataaaaaaataaaaaaaacaaaaaaaaactgagtgaagtatcaaagttggcccaagccgtactcatccttcttttactgacaatctttgcctaccatcagctaatagaacactaactggttgaatatccttaacatctgttaaatgatgcgaagcacctgtatccattatccaaaggtttacgtaccagtcaattttcagattcgttgacctttccagcattgagaagagtctttatcaccttccattgtgagtcactgaatccgctcacaccatctgtgtctctgtccgttaccacatagtttgagctttcgtagctcacaggctcatgcacttggacatcattagcatatgagacattgttacgacctctcccagccgctctattatgtcctccgtggcaacgtccgtgactcgatgatgtgcaagatcttggcctgtctcctcaccactcggggtaccctatcactccgtagttgctttcactcgaatgactggcgtgattacaatgtttacaaaacattgttggtttgtcttccttatgaaattgttgagttgtttggaccgcaaaaagcattcacgtcttggctttcgtcgacgccctttgtacaattcctcactaaattctcctcttgtctcacaatgttataaacctcctccatgggctgaatcggtactcatgacaccaaggtagacctcactgttcgaaaaacattgtcatcaagtccaaagaggaattgatgctctttgtcatcttcacagtctttctcatgcaactcaccaagattgcattcacatttaccacacttgcatactctcaatggtcgataagctgccatactatcccaaatgcgagtaagctttccgaagtacgcttcaattgcaagtcctctgtgcttgcaacacgccaattctgccttgatttgttagatctttggcccattcatgacagaaaaacgctttttgagatgatcccacaagtccttagctacatctcgatgggagatgttcgatttcagattcgaatcaatcgacatcttgatccatgacacgaggagtgcctgaatcgtccaccagtcttcaaggtctggtgatccttcagccggtcgagctatagatccgtcaaggaatccaaacttctttcgtgtaaggagagacgtcttcattccgcatgcccactcatcatagttcgttccctggagcagaggatgcgagatcacgactcctgggttgtcggcagcagtcaaatcgtacggagaaatcgttcgtcggacctccgtggctgctggtatcgttgtcgggttgggttggtttgccgtcgaaaacaagaaaaacagagtttagattgaaatttcaggctctgatactatatagattcagagatcgtaaagggaagagaaatgtatttccaacatattcaaaactgagattacaagctt

SEQ ID NO: 1352 - DNA, 82316 bp, Arabidopsis thaliana
aagcttggatcacaaaatgattatttcttgcatatgtttggtactcttgtaaatgatgtaatgaatctacaggccctgaagtggaaagattggctgagttggccgggaaaaataatgtgcacttggtaatgggggctatagagaaggatggttatacactctattgcacagctcttttcttcagtccacaaggtcagtttttaggtaagcaccgtaaagtcatgcccacatctttggaacgttgcatatggggtcaaggggacggatcaaccatccccgtttacgacactcctattggcaaaatcggtgctgctatttgctgggagaataggatgcccctctacagaactgcattgtacgctaaaggtcagctttacaatgcaatgtagcttgacatatccggcttgtaaagtaagattcctaataaatatgcgctttttggtgtgcaggcattgagatttattgtgcacctactgctgattattcgttggaatggcaagcatcgatgattcacattgcggtagaaggtggatgtttcgtgttgtcagcgcaccagttctgcaagcgtagagagttccctgaacatcctgattacttgtttaatgacatagtagacactaaagaacatgatcctactgtctccggaggtggaagtgtcattatttcacctttgggaaaggttctcgccggaccaaactatgaatcagagggtctcgtcacagctgatcttggtatatatatacactcttctagtcttctttatattcatcttaggctatcgaaaatgttgactttttaagctaatcatattgataacgttatttttttcatcaagatcttggtgatatagcaagagccaagttatacttcgatgtggttggacattactcaaagccagatatttttaacttgaccgtaaatgagcacccgaagaaaccggttacattcatgacgaaggtcgagaaagcagaggatgaatcaaacaaatagtcaagatttgcaattcgtctactgaagttaagtcaagttcgaaatgtttttttttcagttttaaagttgatgttcaagtttatttttctttctcttcaataatgtaagaggactatttcgatatgttaaaataaaaccaattggttctctcctcttgtattcaattgtcgtgtaataatgttttgttcaattcgagtgttgattaagttgtattctttatttttcctttgcatgtcaaacacagattttttgctgtttaaataagttgctagctaagtctagatgtgagtttgaaaagtcactacaaaactacttaattaattgtctattgcagaatcagaattgaaaacacatataggagtagaactaatatatatcatgaagaagttttctcagaatgtagtcggtgatttccaacaaaaatgttatcggaccttcgttgaatattttgacagatctcaaccaatcgctcgatcttccaatgtagttggtcgtgtgtaattttcgataaatttcaacgttaattgtcgtcggaatatgatccatcttgccattgtcaacatcttatatgcatgaaaacaggaaatataattattatacatttaattagtaatttcaaaaactagaaactttagtgagcaaatttaaacgaccatttcgtctttaggcctattgaatgttttggcatcgttgttgttgtgcattataatggctcaccccagtctttggtctgatgtgtttctttatttgatattctcgagcaaaactaagaaggttccaagatatttcagtttgtttggataacaagttaggtttttgcttaagaacgaagaataagagcttaggttttatttatagatttagagatcgtaatggaagagaaatgtatttccaatatattcagaactgagattacaagcgtttaaataaattacacacactatcttagaggatctatggagattatatctacatcacaacaaactaagaaaaccgaaatatatggaacaacttcttgttctgttttattgtgtaactcaccgcataatccgctctattattctccctcaagttggagcatgcaggtcatggatgcccagcttgatgcagaattcttcgaactcccgtcttcccaacggtttagtgaaaatgtctgcaagttgtgagtctgtcttgacatgtaacaaacgaatgtttttagacataacctcatctcgcacaaagtaacaatcaatctccacatgtttagtgcgctcgtgaaagactggattagtggcaatgtgaactgctgcttgactgtcgcagtagacttgcatcgattgagtgtgtggagctcccaacgccgataaaatcatctttagccaaattaatttatgtttcaaaaacgccattgctctgtattctgcctcagcagaagaacgactcattgttttttgcttttacgttttccatgaacaagaagttgttcatgcgatgagttacacaacaaaactgaacaagaagttgttccaaatatttcggttttcttagtttgttgtgatgtagatatgatctccatagatcctctaagatagtgtatgtaatctatttaaacgcttgtaatctcagttctgaatatattggaaatacatttctctttcattaattgaccaagagaaatcagatttgattgaaaatcctcaacataataaactgagtgaagatacattaactctcgactttctctctcagacacgattaccaaggcaccttatccaaacagcctttccgacgtcggtgaagtctttgctcgtaggcgccgggattccagttgctttttcattttgacatcgcatcctctctttagttatcttctgtacttttcccctttgatgtttttccccaatttgttttctctgtttaatccttctcaaacccctttgaacactttctaccaccttgcaattgcatcgcatccaggctgctatttaatcacaagcgacaaaggaaggatttgggatctgacaaatcacgcttccctcttttacctcgcagctctctccacagatcttttcctctgggctattgtatttcatgccggaaaggatccaaactcttggagctatgcttttgactcgggccaaggccatcgcctgttaccgcagatccgtcatgcatcggtgttgatctctgcgttgcaaatctcatcgtaattcacggacggtggccacaacctcctctcgatctggcaatccacagtgaaactagggttttccccagtggaccttgtttccaaatttgacccatcccatccaagaaggcccaaacccatcaaatatgcaaaaaattcaaagcctaatactctcaggtctgttttcataagccctatgctaagcccaaaactttacttgcgtcgatcttctttactctgtggttgtgactccatcgaagagaggtatcaccattaacgctttggtctttcatttactctttgcaaaccctggtatttgttgctcttagggacttgtggtatgtttacgaaagcttgaagatctataatctatctatctcgaatcgtccttgctggtggtttaattgttgtcttgttctaacctttcgttaatgaccaatgttccccaagcagttcttatgtcgtttacaagttttgtaccttcatcaccatctccatcatccagatcctatgctatccaatgtttggatctatctatcgaagtgatctctaccttccgctttgggttttaaagcctccctcaaccgactatagcaccatagtctcttgaatctctgtcatagcattattgtgggtatcgcaacgtgtcctgacgagaaccttaaccttgattcattcttcaacgtcgcagcgtctttcgaccatgaccaatctatcgtccttcaaagaagacctctcgattcaccgtgatctcacttgttgcagtgcgcttccaagcccttgttccaaagttctcatggatctacaatcgaagacctttatctttcttgtcttggcattggggaacgtcatttattgtatggaattatgttctgggttttctaaaactctttcctctgtacttgttctcgttctttaatgaaagcaagttagtttgataaaagaaaataaaaaaataaaaaaaacaaaaaaaaactgagtgaagtatcaaagttggcccaagccgtactcatccttcttttactgacaatctttgcctaccatcagctaatagaacactaactggttgaatatccttaacatctgttaaatgatgcgaagcacctgtatccattatccaaaggtttacgtaccagtcaattttcagattcgttgacctttccagcattgagaagagtctttatcaccttccattgtgagtcactgaatccgctcacaccatctgtgtctctgtccgttaccacatagtttgagctttcgtagctcacaggctcatgcacttggacatcattagcatatgagacattgttacgacctctcccagccgctctattatgtcctccgtggcaacgtccgtgactcgatgatgtgcaagatcttggcctgtctcctcaccactcggggtaccctatcactccgtagttgctttcactcgaatgactggcgtgattacaatgtttacaaaacattgttggtttgtcttccttatgaaattgttgagttgtttggaccgcaaaaagcattcacgtcttggctttcgtcgacgccctttgtacaattcctcactaaattctcctcttgtctcacaatgttataaacctcctccatgggctgaatcggtactcatgacaccaaggtagacctcactgttcgaaaaacattgtcatcaagtccaaagaggaattgatgctctttgtcatcttcacagtctttctcatgcaactcaccaagattgcattcacatttaccacacttgcatactctcaatggtcgataagctgccatactatcccaaatgcgagtaagctttccgaagtacgcttcaattgcaagtcctctgtgcttgcaacacgccaattctgccttgatttgttagatctttggcccattcatgacagaaaaacgctttttgagatgatcccacaagtccttagctacatctcgatgggagatgttcgatttcagattcgaatcaatcgacatcttgatccatgacacgaggagtgcctgaatcgtccaccagtcttcaaggtctggtgatccttcagccggtcgagctatagatccgtcaaggaatccaaacttctttcgtgtaaggagagacgtcttcattccgcatgcccactcatcatagttcgttccctggagcagaggatgcgagatcacgactcctgggttgtcggcagcagtcaaatcgtacggagaaatcgttcgtcggacctccgtggctgctggtatcgttgtcgggttgggttggtttgccgtcgaaaacaagaaaaacagagtttagattgaaatttcaggctctgatactatatagattcagagatcgtaaagggaagagaaatgtatttccaacatattcaaaactgagattacaagcttttaaatagattacaaacactatcttagaggatctatggagatcatatctacatcacaacaaactaagaaaaccgaaatttatggaacaacttcttgttctgttttgttgtgtaactcaccgtataatccgctatattattatttggtaaaaattgcggatcttttacatacaaaagactccctattttatacaaaagagactatttcacgatatataatacttccttctttcccaaaacggatatattttattcttcttgtttttttcgattttagttttatcttttctatttttactaagcagtcgagtccgaacttaatttaaatttgttgaccgatcttcacgaatctcggtccatctacaaataatgttttctcgtaaaattttatttatgtcaaatacggatcttttgtgtttttcactattttaaatgtttgataaggtgctaaattgatgactgaatactatttaagtttgaagtcactacaaagtggctaatttgtccttagcagaatcagacattatatagtgacagactaaccaaaaccaaatgaatagaaataaataagtaacatgcaattatttgaacgtcaaattaagatattgctatagcagtataggcttttcctttcaagaaggggtttccgatttaaggcataaagaaagaaaaattacgaaagactagaccaagctttagtgttttgtttggctagcaactagcaaggccaaaaacatatagtagtactagtgtagtgtagttagttacatcttgactcttgtaatggtgcagtagttgtgggttcagtggttgagagataccgattcaattcctctttgaataaagcaattccattgaagttttgaatcaaaacatattatttaactattttattagttttttcataatagctactaaatttttatgcataaacagataaaaacacaaaaggaaaccaagtaagaggacggcgatccagcacgccgccgtctccatagccgtttctttccctcgccgccacttcatctccgccttcgcggtcttcctctccatatattctatgtacttctctttcccttcttcttcccctcccgccctaaacctacgtttcatccccatggccgccaccaaaatttccaaactaaccttccctcctaaattcctcccatccttgtcctctgctactaggctcacctctcttatctgcatcactgctgtctcctcttccctccggttaaacaccgccagcaccaccgttacagtgaactccacttgctccgaccttttcttgttgcccacgacaaaaatagaggagaattttacgtggacttctccggttaaccaatgacggtgcaccgagacaggtttacgggttgatacatccgccgcacgtttacatgtcgggtcaatgagtatccagctcaaggagagattctcttccaagtcacttttccacgtgtcatccttacattggtccgtaaccaaaactctggtcggaattagttctttcggttcgacaagatcgacacgcataggtgagcaaaggaaccaaccagagactgtctctgtaacatgaacccttgagaaaatcacgtcatctttgtagaatatatcaacggctgagattaactccgaggtatcaacggacggtgggagattgatcccaacatcatgttcaagaaacggaaaggaatcggaaaaaaacgtccggtgaccgtcggggaacgttgagatgatgctttggacacgtgtatccgaggtagaaggccatgtagcggaacattgttgcctccagagggactcgtcggagcaaaaagagtttaggttggagcacgtgcagcttagggcggcgagagaggaaccgtcgaggcgggttaggatgttagaccgtaaaacatcggaggacacggcgttgattcccggacttccgccacgtgatggttgctccaccgttgacgaagacgaagacgaaagcatgagataaagattgagttgaaaatgcaagaaaagaagaatttattgaatagtccaagcattttccattagttcattatttatggtgagtagtagtactatacagataaaatctattcgaatttataaatatattaatttgggagaattagctaaaaaacaaatcttttcttgatataataaattaataatacacctaattataaaatgttttacgcacgtagcttaagaagaccgtctacgtggtctacatatgtttgttaattggttggaattagcattcttaaataaataatactattaaacgcgtttgcttttgtagcaatacagtttcacgttttttatataagaatacaaatatacaatgatgttgacttacatggtccagtttgtattttgtatattataaaccaaattaccaaatattatacacgatctataatgatgggatcgatgatcttctcgttgtgtagggaatcaatcaaaccaaaccaatcacgatcttctcatattcaatataccatgatattgtttttattttgatcactaccaatggccaaagttagttaggtacttacttatcattaatgtacagtatagaaagaaacaaatctactttcagttttacagtatacaattctattatcatttaaattgcctgtcttgtaaaacatacaaactttgataagtagaaacaaatctactttcagttttacaatacaattctatgaaatttataacttctttatatatatatatatatatatattacaaatgacttatgtatacacaacaggtatgcttatgttttgagaattcgaatgatgatctgaccaagatgtgatgggcattagcacccaaagccacataatatgtcattataggttggtgtagccagttaggagaacttgaagattgcgaaatcgacttgaaaaaaagttaatattttaatttgtatatattttcttatgttaatatttgtatatattttcttatgttaaatagataggtttcatattatcgaatatgtaaaagaacttgtcaacaaatcttgttatgatcatgtataaataggctagtgtctagtaaataaaaatgagagtgatttgataataggaagcatcatgacttgtgttcattgtttgaagtatttatatactcaataactaggaatcataattaattaagctacaaactgagttattctataatcttgatccatgagagaagaagtcaataacgaggaaccataattaattaagatacaaagtgagttattctataatcttaatccatgaaaggagtcaactaagtagattcagctcaaaaacaatcaaggaagatcaattttcgtccatgggaaagactacatttagttatgtctatttttctcttacgtgcactttagagtttgattttcatcttccaagagtatgttaagcaactattatggaagaattgcttgtaattactctatataatgaggttcatgcaatgaataaagaaaataagcatgtttgatacttttggaatatttgagtgtgattttttatttttcatcgatggtgtataatattattggtttggttaatgatgtgtaatatccattgatcaatacatgatccgtcttgatgcatcatatccaggaggatttgtcgagagtggttctgattttcaacaccaaaaaagaaaaatttaatcattattctaattgattagttataatttagttacttggttagaaattggttgacccaaaaaaatttacttgcttagaaattaataatattagttaacaatttaaaagttggacaagtaaagttacaaattaaaactaaattgttttggtaaaacttgcatcctacattcatttttataagaacaaatttcaattacatgaaatttattaaaactagctaatgtaagaaaaaaactaactacatattaactttaaaatttttgttgtgtatataaactcttatattgacaggactttaattatcctcatatttagatctccaactaccacattatatgtccaatatagaataatcttatcaagtatcaagtttaggtatgattacacttgcattattctttcttttacaattgaaacgtattaaattcatttttaaaatacgaattaaaatctaattgtggggttttccacgtttatatatttgtaattagaaaatttgaaatcgaccaatatcgcgcactggataaagttattgtattaaaatatattgataaataataatgctatcataacatatcaaatatagttggctcttagcatctttagttaggagataatttttaattagaggatgtcaaagatcaattatattggatattcttaggaatatagtaatagatgtagagatttttgtgaattaataattcagtattcatatcctctatgaatattttattgatatgttgtagatatggtagattagagattatatgtaatttgttattcagattttcttaaggtacaacacgcatcgttgattcttttagttctttatcaatatctagaaaccccgaaaattatattttgactttgaatggttacatttgtaataatttcgaatatatgaactcttatttatttgaaaatcacattaaaggttataacttttcatttttaaaatactacacaaaatgactgacatttgtaaacaacaaatatgtgatagttccaaagatatttttccgaagagaggtgaatttttgtttaaaagttcgagaattaaaggtaatattttttgtttaacacataacatttttgttataaaaaaacagattagactaatagatgaataatttcatttggaatacttttttgtttttgttttaataagtactagattcgtaattgcatcctgaaaaccattacaccctaacgggctcagcccaaaaagctcattgtttcgactaaacccggctagtccacaatggagagccaaatttataccaacccaacatggtttattgacctctgtacaagattaaatccaatttgacactaaaaaattatagggtagggcaaaaaatcctaacttaagtaggatccaatccccaacccaaaaagctcgattcgaactggttttagagaaatacaaaaatggagtttagagactagttacttcatgtatcgagtgatactcaatccaaactaaaaatgtcgaagtttcgggtaattcatatacttttgagtctttgaaaaaaataccttaatcggaactaaactggaaaaataaactaaaccgaatcggaatcaacgtaaatgtcagaatggatcctaaactttagaaataaaagaattagaaccaaatcaaaatatatcagatatccaaaatactcaaaaatatatacactcgaataattaaacaaatactcaaccaaaaatccaaaaccgaatgaactcaaattgatataaccaaaagtataagaaaatactcaaactcaaaaattcccgtattcttttggatatttgggtatcttaaaacgagaaccaaaatatacgagtttttaatcggtacttaattaactactcaaattgaatagtacttgaatcgaaacataatcgatttcctttcggctcctatatggattctaatgttgagaattgaaagaacaagaatcaaatgaatcaaaaccggaactaggccttggcattcagatatttgggtcagatttgggttggtttttcggattcggatttttcagatttagaaatctaggacatgttcgaatattttaaaactttgggttcagatcggatatttcgggttcagattcgtgtttacccgaagtatccaaagataaaaaattttgtatccgattctatgcaaacatttgaaaataccctaaaaagtacaaaactcgagtattttttacccgaatacaaaagtagctaaagtactcaaaaatttattcacattgaatattttattcacttagattattacaataaacattataagttacttatctaggtaactgggttcgaactctctggttgtgaagtttagaacacgttagaatattataaatttttgggtttcggttcaggttgagttttgcaggtcgggttcggtttagttcttccgattcaggtattatccccatgcctaaccggaaccaaaatgaataccaactgcccactactactttcgagtattttcaagcagatggatagtttttactggtgttttgggatattttagatacttttcagtagtttgggttgtattttaccaatttttttagttaatccaaaaacttttcaatatttttgtgtaatccggaaccgacctaacccgaaccggcgaaccgaaattgatatatattagagtaatccacaccaaaccaaactaaactaaaaaaaacgaatccaacctgaaatttagaaaaacccaaatgaggcttatgagcttatcaccccccataaaccagaataaaaccgagactcatagttcagaaatgtaccgattcagcactaataaatgaacgtgcatagatcatctttcatctaaaaattgtatatatttttcttggtaaaaaaaaaacaaccgaaagtgaaaaaaaaagagaaaaacccagaagtcaaataacgataaactagtggtgactactaaaactcatataatagcttcggatcaaatcccagatctcttctcttcttcttccacatttacacaaaaaccctagatccacaacaatggcggaagagaagaaatcgaagcagagacatcgagtcatggtcttcgaatccatgtatcccatcctcgctcttatgcttatactcgtcgcttgcgtcgagctttgcgatgcagctactgttgtagatgtttatcgtctaatccagtacgatatctctggtgttccttttggttctcgtttctcttctcttaatcatcatgctgcttctcttagcttccaacgtggtgccgatctatctcgttctgtacttatacttcctcttcgtgagcttgacattgcttttgttcaaggtttggattttgtggattagcttaaatcggactttgatttggatttcttttgcttagattttgttactgttggcagattacatctcgcaaaagcagtcgcttggtggattgttgattttgcttcctcagacgtttaggcctgggaatgttggtggtggaagtttaagctctgaaaatgatgggtttaggagtttattaggtcaacttgagaagttacttgtacatggaaacatacctgtgagtgttttgtttcgtttgtgttagtgaagttgaacagtgtagtactacttaacatagcttcttatggtgacaattgtttatttttttatagtttcctgtgtacttcgcgtttgagaatgaagagactgatgctatgttggctgatgtaaagaaaaatgatgcacttggtcagcaagctactgctactactggcgggttagtactatcatgaaatgttgtagcgatatgccctctggctaacatttttgttatatactaagtataacaatgctgatgtgtgagttcaaagattgaggaagctacatattaaatacaagtctactactagcacatttgtatatataggtagatgcttgaaggtgtattgaactgtgtatcagtatttgagtatgctcattctatctacgatattgctcatttccaagaaatgctgtactcatggacagtaatttgagtgtgtaaactatttctttctgtgactattttcagatataagcttgttatctctgtatcagagcctaggaaaattgcatctccaaccatcacaaacatccaggtacctcattagtcattacatataatttagttctgataatgccatgactagctttgatatatctgtcgtgtcttcaactatttgctaatttagttttggaacctaggctgactgtatcttaagatgagtaggattagcatgacagcttgtgtagacacctcagttgttaaacgctgattgtctggtttttggtagcatgcatatgtgcatccccttgcaatgcagcaatcgttttcgctttcatcatctttatagatcagtttaagatcttccgtttttcagcaattaggaatttggtgtatagttccttcatgtttagtaccgtcgaacctagattgaacattattactttatcttaatattgatctgcccactccttgtagttactattagtaactgttacttattggatctggacatgtgctctttcaccctcttttacttgttaatattcgatgcttgacatacagaacaactaagacgatgtggtttgtgtgtagggatggctgccaggattaagagcagaaggagattccagccagcttccaacaattgctgtagttgcatcgtatgatacctttggagcagctccggtatgtaatatgagtagtggatcttcttaccgtaatatcaagtacatacctgacaaacttgtatatgtaggcattatcagttggaagtgacagcaatggaagtggggttgtggcgcttcttgaagtggctagattattttccgttctgtactcaaatcccaagacgagagggaaatacaatttactttttgcactaacatctggtggaccctacaactacgaaggaactcaaaaggtactcgacctaacttattgattctactaaaaccatatccttcctgcttcttctgtttggtgcatttgtaaacttggttgtatccttcattaagcatcatatcttctgcagtggctaaagagccttgatcagaggatgcgtgagagcattgattatgccatttgcttgaacagtgttggttcttgggacagtgaactattgatccatgtgtcaaagcctccggataatgcctatataaaacaaatttttgaggtaaacaaaatagtgcatggattattgcagtgactagctatgatgatagtttattggttaatggattcgtctctgcagggcttctctaatgtggcagaagacttgggttttcaagttgctctgaagcacaagaagattaatatctctaattcacgagtgagtcaatactccacattttgaaagtcttgcgtgcactttttcatcttgatcctggaaatcgtaggttccaacttccaactgactgttagaactgtcctgaaattttgatagtcagaattttcatgtcatgatctgaaaattctaatgttttgtagcattaaaattgttatctccagtgagtaggcactgcctttacaattttcaagttctaattctttataataacctaccctttgctggttgaacaaaaagaaaagacctaccttgtgcttagttatatgatattattttcacttcctttaattagcttcctatgctggggttattgagagtagtttgactttactatgttctctctccgtcaatttatagaccctttctaattgaattgtgttgctgaattatttaggttgcttgggagcatgaacaattttcaagactcagagtaactgcagccacattatctgaactttcaactccacccgagttactggaaaatgctggaagtctgtctgacacaaggtcgcaattacaaaactaatcatatgtcaacccatatcactttttacttttctgttctatccatcaagaattttcattatccttcagactaaatctggcgatgctttttctgcaggcaattggtgaatgaagatgctatcattaagggtgtcaagttggtggctgaaagccttgcggtaagacaaccactcaactcaagtacttacttcttattctgtcgtttatttagttggaaagaaaatgtgtttcaggttcacaaatcgttgaaatttgtattcttgttatgtttcctgataactgacttaaataacatattgtctcccgcagaaacatatctatggtcaccaaggaaaagacattaagatttttgctgatgacagtagtttggctgtaaatccattctatgtgagatcatggttggatcttttgtcacaaacacctcgggtagcaccgtttctctcaaagaacgaaccattaatcatggctctgaagaaggtatatcatctattctcactctcaccatgttgtttgcggtttctctctacctcatcctacccatcaattgtatatgatttctggtgttgactacgtgaggtgcctcttggcaggaactagaggattatactgctgaagtgagtgttcaacatgaatctttagatggaagtttcaccttttacgactcaacaaaggctagccttaatatataccaggtactttcatcagtctctttaatattttataacactagctttgctcaaacagagtttattcttttctcgaaccactgttttgatccgtgtgtctattttgatgtttgtgtttgtaggtggcaagtgtaacgttcgacttgctcttgcttctggttctaggatcatacttgatagtgcttttcagtttcctcgtcatcacaactcgggtaactataataaactgatttatcgatacatatacgggtatgttaattatggaatcaaatttaagtgagatttatttgaaatgatgacagggtctggatgacttgataagcttatttcgccggcctccttcccggaaagtgaaaatgggatgattttcttccttttccggtaactttatattcttctcatacctgccttttggcgattcactctcagatatgttttgtgagtcgttagaatttgaatcatgaagaattcaaaggagaagaggcaacaagaaaaaatgagtgttcgttgagttttggcccccctttcgactttttgtttggttgtatgcctctctataggctatatggcttctgattattttgcgtgggcggcaaagaaaataagatcgaacattgtagttttttctttggtttaaattagtctttttccattacctcgtaattggtcgcccaacaaatttgcaccaaaagatcctaatgcaacatattcttaatatgataatttgtggttaaaagataggaacttggggtcttagttgtaatgaacaaaacgatcagcaagaattaaaatgaattttgtaatgttatattgatggccacccaccatcgagccaaccgagcttccacatgactgagtggcaagatttttatggcgacctctgcctccactgaagcactattgtaacaatcgactctgtgagatccagttgacgctgtagcgcatcaaccccaacctctctcctgtgggtccatctggcccacatataggttattggtgcgcttggcgttcttcaaacccaagatctcactttttaacaacttttctacatgacaaaattaattggtaacagcttgtcctctgagaaagttgtggaccagatcggtcgatgcgctgcagcgccaactgggtcccatatgactggttgttacaactttaatgatctcttaacacttcactaaacacgatggtatttgaagttttaactaacacacaaaaatgcctcgattatttcagtcgacgaaattaatttttgctatttcaacttgaagcaacagaaaaaattgcaaaatagcagataacaacacagggatagacccagaaaacactgtcgtaatgtcgttaaatattgtaaaaccttttttctgaagtatacgccactacaaaaaaactgttgtataaataaaaatccacaaaaaaggcagaagaatatctagctctctctctcaatctgtctgtctctgctctctctatcttccattgaatatagaactttctatcaagcacataagaacttgaagaataattataaagtttccaaccgaaagtatgtacaaaggaagaagattgtctttccttttcttctgctttgctccagaggagactagagagacctatcagttcagtttgtgttggatttgacggtgaactgaaacgagaaaatccacgtacgaagccccacccgatcccctgtcctctaccatatacgattggaacaacatatttcctgagagaaacagattacaagattgatcaatctctgctgaaccgaaagtgatcaatggttcattaaaaaaattaactcaccagctggatctcctttcttgcacaatttaatgctgcaaaagaacgaacacgaataattttataaggttagaacggtaatcattccaggagacaaaaaaaaagaagatagatagtgagattttgtttgataccgtaggtaagaacttctttgcctccttatttcattcaccacgtcattgaacttctttgatagctgattatcatacttttgcagcacatactgtgaaggaagtaaaacacaaagagtatcattttaagcaggtttcactaacttaagtaaatatgtagaaacaatcattttcgagcgtgtaacatggaatgagcaagtaattcatgatctgttaggtcaggaactatggtccgatttgaatcggagaggtcaattccgttccacttaaccccgtatggttttagttggaagccggtatgggcgggcaagtttaggcaaaactcgacaatatcaaatatcacatataaaagtgtttcttacataatgtaagctaagcatcattggcttggtcaaccaatcaggtaacagacagatcctacagaatatatataccatgtgctaagatgatgattagtttacctgacttggaagttcagcagctgagcgaacattaaagagcttctgtaggatatctgaatttactgattctccaatatatatcaaaccatcttcaccgttctcaagaaaatagactccctcatcgctaaggtgttcactttgtaatgggattggacaaggaaccacattttcttcattatcctgatagattaaagaacaatcatcaaatcttttgaaagttagtaaattaaggaatgacaatacctgagctataagtttagctccatacatttgcatcaaggtcatggacagcaatcatccttggataaactagcggaatagccaaaggagtggacaatgaagacacatggtttatccaaaatgatcggtcatcaattctcccgtccattcgtaaccccacacctttggttaaggctgaaaaaggagaaataatgagatcactagttgcattgaaaaatggacaaagcaagaattgtacccataaatcacggaacagaggattaaatacatcataatgaaaaataatgtctaacttgctctcgcatatgaccagtatcaagcatgtaacaatgtctcaaaagttagtagaaaaggagtacagcagtccctaaacgcttttaatgcaagcacacatcttttcctattgtatattaatatcccaaataaatctaaggcaagaattagctagcttttgattcaagacaaggcatagaaaatgccttgcacacaaggagaaaaccaacctaaaagttgtgtaaaattcttgttttaaatggattaaaagggacaaggaaataccgagagtatataatggcaaaagcttgagtgcttcaggtagaataagttgtccagttgatgtaactgtagcgcagaatttacgataggaatgtagtatggtgatgcaatcattagttgcttgctcctttaccaacggaagtgccttcgaagggatctcattagccgctacataagaaaaatatcataagtatagattatatattacactgaatggttttttgcgctaatatcattagatggctagcagtagaatcagagactaaataaagaaacctaccttgtttcagcatacaagcaaattgggaatctaggtcagctgagcggaacaagttactgagcatgtttgtacaagggattgataagttaagaaccctaattctcctttctccagatatggtggtatacagaagggcacactgaaaaccaaagaaaaatcataaaacaaacgtaaacattttataaaatgagacagtgtaccaacatttcagcaaagtagggtcttgccaaaactatttcgaatggccaattaacatgagtacaaagtatacctgaaaaccgcattcagctccatcttgtagtttgtcatcatgctttaatgtcaccattatagctttgtcacagtcaatctgcatggcactcaaggctcgtcaaaaatgtagtaaatttataccaaagtgcttctccaaggtaaacttgcagcaaaaacatgtgtttccctcttgactaatattatacgttttaggtaacaaagcaacatgaacataatgttagccccgaaaccaaaaacgagaaatattcatttttggtattgacacaataaacacatacatggaacgcatcagagacaattaatcgtaaattttgaaggaggatgcacccaccgcaggtagatcgatgtcagttggtatgcgcttacagaagttccctgagtattcttgcacttgaataccctacaataatcgacaaaagtggtatttatcaaataacctcaagctgaaatttgacttggacagagctctctgccacaaaacattacctgactgcatctgactcgcatgacagcctcaaaaccttggggcctcgtgatattccatctaagatcgttgtataactttggggggtctgaaagagctgagaaagggtaataacaataaacctggaaacaattacaatgggaagttaaaatcaaaacatagagcttaaaatccataaaagattcccaggaagacatatcaagtaagaaaaactttcacagaaattttaagaaagggtgatgctcgtgccacagtaatacaatagacacatgctttctttcgaaacaatatacacatgcttccatgggaaaaataatcaaagtatagagatgagattccactatgttaacaagtattcttattgaactatgtaagttatatcaatcattaatggaaagaaaagcaagtcattttcaactaaaagaataagtaaaaacctgaaatgataaagaatattgaatctacctgtcctccagttgttcttgggatctcagaaattgaagccatgtcaacatacgcttgagttgtgataaacaaatctacacagacctgaagcatgtctggatgcattagatagggaaaatattgcaacaactaagagaaagtgatacgcagtagatgattgatatgcagatggtaacactattggttaattttttccgacatagatctatattggtatacctggtattcagcaaattcaatagccatggtccttaaagttttgtctgcgggttgtagtaatttatgggcctcctgaaatcataataaagaggatttactttttagtaatggtacagagaaatcttaggaacagaagccattcaagtttttaaacaaaacaagccagcaaaagaaaccaaggaaagcattaaaaaaactataacttcaagacctctaacgcaaagagtcagaatgcacaattagaaagaaaaaaaatgcatatgtactttttcacccgcagaggcattagctctcccatcggcttctctagaagaaagtgctccaatgccaacagaaggcaaaactgtggaggagatggtaatcatatcatttaagctatacaggtaccaaacagtagactagtaagaagaagaatgaactggtactaaacaaaaaaatacataaccatcaaagtgaatagatatatttcaggttattcaagatacacaaaagaattagtctgatggcacaaacagaataagcagacctgattggaacaccatgagctttcctccagtgctcttcatcgctaagaatgcggcctagcaggaaaaagatagtagatacattagtcaatggcagaggagagtaatagaggtaatcttcatcatttgctaatagaaaatcgtgattacattaaaaagagattggccaattggtccacaaaaccaacttaacttcctttattgtttttcaaaaatgattaaccgttttacgcttactaattaacttgtaaaaattaaggataccatctacctgcatccaatttatacttcaaacatttacattaggcaatcacataccttaactgctgcaccaaaagcagattcaggactcttactttcctgaaacattgttgggatactttccagcaaaatctctaggtgttgacggcactgaaatccagtagaataacagagaataagaaagagattaggaattgacactgtaagaaatataagcagggcgcacccggaacaatgacaagagcttacctcagatagctgaacaatgacatctgtttctaaaggtgtatacacatcttgaacatccggaacaatgagcatcaatggctgcatgtaagcagaacaaattaaattcaaatggaatccagcaaaaccttattctaaaaagagagcacacattctggaaaactatagcgacagggaagtgcctttcaagtgagaaaacaaaacagtataaatttattcagccaagtgacagaaaagaatctttgctgcaagataacatcacatcaacgatactataggaagaaagatctccgcagaaaaagatcactccatttccccttttatatggtttagcaaaagaaacaaggatataaaataacgtaacaaatcacctgctgcagtgcacgcttcaaattataaaagtgaattgttgagtcaaacgtggcaattccaacaaatgtcctaggaccttcctgcaaaatgtatacaagactttgttaaaataatgttgaagcaaaacatgtctatttagaatcattactctagtgaccatatcctagcctcatttcccaactcaactgtttataagaaataaaaaataaaaaatacatgtctatcactggaaagagcgagaagatttacaggaaggtctgagaggacttgctggattgcactgcaagcagctgcagttgcacctgtttgaatcgcgttcattgagacatcaatgaggaagaaatatactgctggcattggatctcgtacctgtaaaaaagatactgatatttatcttcacctggttgcaatggataaagtagcttgcttcgcattaccaagcaaatataatcatcatacattccttcatagaaactcaatctcttagctcaaaaccaaatcttaatttataagggttgtttttaatttgtggatcaacattagtaagaggtctcgcaataacacagaaaccacaatttctgccttagaaagttccaatcttctgaaaaacgaatgaagatgagtactgaccacttcgtaaaaaactatgatgttttgtctgagagccaataaaagaagacatcttataaaggcatcacataattttgacgtaaaatagtcagaaacgttaacaaactaaccatatattcttttgtagcaacaaagtcaacagttcccctacacagctcaggcctttcatcagcatccctacgtctaccatctggaccgagattacactggtagtcacgaggagtctcatcagtgtatcctgtgcaaagagagttgatgagaaaatggatcacaaaaccattccacattatcaaaatcctaaagtgattaggatgatagcaattcaaagggagtcctaattctaggtgaattccaaattcacataatatttccttcaaatcagtaaagtaaaccagactttagttctcgcgtatagtaattatagtttctttcataacctggtactcattattgcacttgatatagcagtaacccattttatatggcttttctatacggaaagagtaataattaccacacaagttacatatgaacttccttccttggtcaatgaacttcatgaaaggattcacgtagcccttacaacgtgaacatctaacagggccactctcaccaaagtccacaacctgcacaataacataggttcatgtcagcatgaagtttttctaaaattcttagaaagcattgaattctgatttttttcatcaaaacataagattctatgctcaattagaaacttatagactggtcaataatagaagagaagacagtaaaatataaacagtgcaaacaacgaatgccaaaaagctctaagtgatcagaaaaggcagtatgttaaagagtttaatcaatattacttggataggctcttcagatggatgagaaagcgccattggttggactattagtgccagttgcataccagatgtagatagaagatcaacagtgcatgggatctatggtggataaagggaggcaaggtatcaatatccgaggtcaaggggcacagtacataaagagttacatttggctcaagaaatttcgctttacagttacctgattgattgtgcatcgcatgtaacgcgggctggaatttccagtgtctctagttatataatcaacagtagtaggcttcaaaaaagaaaaatatgagattcaggggaaataaatagcagatttacactctcacttgagatcaaacagtaatttccaaaattagagttatatgacatactggtggaggattagccttattttccacacgagtttcatacacaattggactggagcttgaacctggccttggtatctgattaagatcaatctttgaggggctagaaacagaggtcattgactgattttgcattggacccatgccatagattgaaccaggagtgccaggagcagaaggtagctaccaattttcaaagtggtaaagcaatcataacgtgcaacacaaaggaaatacatcagttgtgaaatagatgaaaggcaaaaatctaaagatactacataaattgtcccctattctattactaggcagaaagatccataaataaaataaatattgttcccttctggaaagatccccaagtcacatcaagaatatgtttcactgtcatctctaaaggcatcgcctgtttcatcaattcaaaagtcgactgggcaattactgctagacaagaacatacataatgagcttcaatggatgtacctgttgtggtggtgctccataaggaaagcctcctggcatgggtggtctgccataagggacaccaggaaaatttgtcggcgggggtattgaatgagcaggaggtgaagataatggtgaatttcccgtaaaagggcctgcattaggaggctgtccatatggtggcggtggagccatcataggaccacttgtgaattgtgatcctctgggaaatgcccccggacccatcatcggaggaggaggtccattactcaacggaccgccaggcatgccagagggaggaggcccattgctcaaatgaccgccatgcatgccagagggaggaggcccattactcaacggaccgccaggcatgccagagggaggaggcatggacataccaggtcccataggtggaggagaaccaaaaccaatcggacgtgctcctgaaggaggaccagaaggtacacctcctggtggacctgaagctggaaaaccaccaggctgaggaaatgacgaaccaccaccaaccaacggacctgtagatggtcttccaccaaacggtggctgattagaaggtggagcaacgggtcttccaactggcggaaaaccaccaggttgcgatacctgaggaggtccacctggtctagccatagcagcaggaggaggaggtccaggtctagccattggagaaggccttggttgttgttgttgttgttgaggaaaagattgtggtgactgaccaaaaggtggagatggtctaggacctgaaccaggcataggaggaggtggccgattaatgttcaaattctgcatattagcagctaaagaattggggtttccttgtgaaccaggaacaaaattcggaggaccaccagagttttgctgattgttattaggtctatatgctcctggaggcactggagcagccatgcttgtttaccaaagagatcaacaaatccaatttcacgaacgtttacaaatctacgaaaatcgaaaaatcatgatcatcaatcatcaacaaatgcatcaaaacaacaagatcaaattccataaccgtaagcgatcagtgatacagaaatcgaaaattgaagaaatcgaaatacctgtaaacgaagagaatcctcggatctgtgacaatgagaggaaataggatcagatctgatgaattcgaattgaaacgattaaggtttaagagagatcaagagagtaatcgcaatttggtgatgaataagagcaaatgcaacgaagatcacgaacctggagagtagaaggagattacgagctttgagtatcgatgagtgaggaaggagaagaagctatgagggccctttgaagctatataatactgtcgcgttttaattgaaactggtaacggtgcgttgcatcgaacccgagacacttgatatagatccggttataatagaaccggacgctcgtctacttttttggttaattttagtccggttctcatgttatttgttcggtttaagttcggttatataatgaaaaggaaagtatatcatgtaaagggaaagtatgacatagtctatccaattagaatttaacatatcatttctattttgtatttaacttgatttcataacaaaattagaaaaattctattctctctgttcctttttatttgattttctaggaaaaaaatttgcttcaaaaagattgatcttttcctaatttctatgcataaatacctttatatttcctattatatctttctttattctttgtatttgttttcaaatttattagaataaaataaattaagaatatgaagaattttattttgatgcttaggtttacgcgaaatcagcactaaatgaaacaaaatgttaattcacataactattatcttgattgttttatagagtatatgtggaaaaacgaatgctattttgatcatcacaagtttttttttcatcatcttcctcttgttacgtttattctctttgcttccatgattaacgtttcttcatcttattattccagctattgattgttttttcttattttcctctctttgactcaaaattctttttgatctgtttttttcaaattcataaaatattttcaaaacaagcaataatggcaatggtcaaaacattcaatggtcaaccagaacaagcaataaggcagccgatcgcctagctaaagctcattataatggcaatgtttcttatgtatctcattcttatgtaccaacttttcttgtacaaatcctccatgaggattacacatcatcactctaataaagcttcatgttgatgttagaaaaaaaaaaatattttcaaaacaagatgaagacggaagaaggttttcatgttaacaatttcaaagttaaacatgaattcgatttgaacaagtttcatgagattaacgacgacatagaaatggtggaaattgttcaaccaattcatggagatcattctaaagtaaatcatcaattcgacttgaacaagcttccaaactcaattcaattattgagaatatatatagccatttgattaaacaaaacatactagttttgccggtaaacaaaattggagtagatttctaaaaaatttggctccaaattttagttttttaaaaaagtttacgtgagtaattgaaccaacgtagaagtgtgtagaatttgttaataatgctgacgatgttgacaagaataattgttgtaaatgcatggggatcttacacatgggaaatggatacataaatacaaaaataacccatacctgcctttcttcttttttgcgtatgtttatcagatttataattttattaaataaaattttaataattcaagattaattaaaattgtcatttttaaatttactttaatatgtgtgtttttcctaaacaaaaaaatagagtatatgaaattaaaatggatcatttgttagataaaaattagtttataatttatagaaatgttgattgacgatgaacttttataattattaatttatgatattgataaaacaatcagtttacatagaattttcaataaaactttaatcattaatttccagaaaaacgaattagacgtggacaacctaactgacatccctaagcacttgaccttattttttgtaagagtaatttgcaccatcgataaagcataagccatatttcaaaatatgtacacctcactcaataaattaatttaaaaaaaaatgttttcttgtctcatgtgttctttctatattgcaaacataatgaaaaaaaatctaagaattgttttacagtttttatttcgtggacagaagtttgaacgactaacaaagagcttcaacgtgatcaaagacatgacccggttgagatgcttatactcattcagtcatccttgtctttttgtgtcgatctaatgagagatcacatctctatatatataagaacacctctaaaacagatggtgagagttaaaatgatcacacatacaatactaaaatggaaataaagaaagtgcaataagtgtcggcggatttatattgaatgtgagactgatctaattgattgaagctaatttctatcgattttttttttttttttaagaataatacatgcaaagtaatctaaatatcttccatgatcaagtagaactaacctttcaaaaattctctactcattcaaaacaaaaagcaaaaaaaaaaaaaaaggtacacatgaaaataaaggaaaaaagacttgcgtgaaaaataatgaatcttcaagcttagcctaataatcaggttaggcttaaaaatgtcgtggtcatatactactagttggcgactgaaaagaacaaaagttgccacaaatctgacgacttgttctttttttttcttatcttctattgtatatttagtaacaaatgaacataagaagtaaattaatacgtttaagaccaattcatttgttcccactcccaaaaaggttgcgatagctcatcaaccatatctgagatgctttgtgtaatagtagtagcattcaccggtaaatcaacttggtttcctcctgaatgtgaagtttctggtgaggttgatattgtggcacgagatgatgtctcaactccattgctaggaagatttctctctatcgcataagcttctgtgggacgtctgtcaaaggctctcgagcttcctgactttatgtagattcgacagatactgaattcgggcctcaactatattgaataggaacaaacttcgttagaacctgttttgataatgaaagcttaactattgttttactaaaatattatcagtaacttagatattataacattatgcatcttagggaatccctaatagggatggtagaaattctataactctaatatataaccaatagacaaaagaatgcatgcatgaatattttggtttttatcatttatgtatgcatgatatttaattggatagtttcaaatacttaaaaacacatgtaatttttcgcacactcttttaccacatatataacttttgaaaacaacgatatatgtaagacaagattatatatgtgagatataaaataaccatgataaagatttttgacatgaatcaaagggtgattcgtttttaataatctctgtttgtaataattgtattaaagattattctgctagttcactgcacatgcttgtccaaaaaggtgttgagacatcagttatttttatattggaatcccacaaatagaatttggtatatttgagaaaaattatttgatgaaagtcttcattttaaagaagtgattatgcacctttgggatggtagatacactggctgtttcaactgctttatattcattcatcttccactttgtctttctcccagtaggtgcttttccggtatagaaaaccatcgtcttctttactccgatcactcggttatccggcgagaacacgggtccaggtgaaccagttgctttccagtatcctgaaccagtggtcctacttggtctgcctcctctagcttcacgctcttgtcttggcacaaagaaaatccattgttctgcatctcctcgacacctctctcccgcaagatctacaaacaaaaaaacacacaaaccaataacacacctctcaattttttttgtgtaaatcctcagtttatgtgtatacgttttccttaattacatgtaaagttaaactttgtcgaaaatgaaattgtttaattttagaaatgtgattgtttgtaaagtttttttttgtaacttataattaaccacgaaatcaagaaacacaaacctaaatctcatgcatacaatctcaagataacgttagtcacgttactctactcaagaaacgcaagaaggaaaactctacagtgaaagactacacatatatacgacaaatatatcatcgacattatttatatagctaatgattgcatacgtacttggaagctgagtaggctcaacgctaaacacatcgaggatcggtatgagactatgaatggtggcatttcctccaccaagctggattcttaggtaatacgtaaggagctctacttcggtcggatagaaccgaaaccctacagaaagctcttctcccattttttggtgtgttacaaatttgcttcttgaataaagtgaaaccacatggactcatgatgagtttaaataggtgcaagtagagattagttttctccgagtgaaatgagaaaagttttacgcgtttggactttagttttttgttcatgtattattacttgtcttttcatattttgttggggaattggacacgggcccatctttgtgataatttcgtgccatttctatcatctatacgtgagacagtgagtgcttttcacaaaccacgtactttatcattgaataagtcaaggtttattcttactagtcttcttctaatattctttattatatcctcctatttttttgttacctcaatgaatgtctgtttttcgtagaaacgtagaaaataataaatcatataaatatatttgattttacagtttttttttactaaaaatatatggataaatgaagtaaagtaaatatcaatattgcatatatttgatcttacattttacaatttgaaacgaggtaaaatcatcttcaagtgatttttgctgaatttcgatcatttggtctactacattttaggtttggatgagctatatatattattgaagttcaaagcataaatcatccattctagtggcatttagttttagatgttgtggattaatacaatccgccgaagctacttaagctaaaaaaaacattaaaggaaattaatactactaccattttagttgtacggagtcgttaggcggggtatcacattgacacattgggatgtggaggtactgtttttttacatcagctatgacgtttctttgtttgaaatcagctattagtctcaaatttatggtttaagaaatttctttcgccttttatagagaaagagattgttaattgttttatgcgacacaattgttttatcatgtcgcatattaaacaagtctacgagaaaaataataggcaaaccaaaatatgtattgtgtgatacaaacatgcatgattatccacatacctattcagaattaaaaaaatttgagagttgaagacattattcgaataatttaaatatgcctgaattgaatagtagttgattaatcaatgatttttagtgtgaagtaaaatataagaataatattgtgtagaaataataaactgatgccaatataataatcttttcaaatcgaataaataattcatagtttttactttcggttttaagattttttaagttttaagggttagtgtccgaatttagagttctatgatttaattttagtcttatagagttcaagagaatgtggttaaccaaatttctgtatgaacaactattttttaatagaaaaattcaatagttcttggtaaatggattaggccctatgagctccaaatccaaattgacaccattaataaaaaaaaagctattgtaaaaatatcttgttatttaatttatattgtcaaaaatatttcttatttaacagatttattgttggagtggaccataacaacaacaaaaatcgacataactttgtgccaaaaggcttccacgaacaagacaagttttggaaggaagtatgaaccaagaagtcaagagacaaggcaaggtgagatataagtgttggtgcggtcttctgaacattaatccaagagtgaacaaaagataataaatcggttgaaaagtttcaattaacaggtgataccgtacaagtagtgaattaaaaaaataactaaatggtatcgaaagaaagaaaaaagaaaccccaataacttaagtgcaagtgtcaaacattccacgagcagtgaacgttaagactaattggtccacaagacctcatacttgtgtactttatatgtatacaataaatttagttgtataaatatttattggttgaaaatttttaaggtttcatgcttgtgtagtaaatcaatctttcaagcagttccatgattttcttaatatatagtgtttccgattagtcatggggtttatagtaatgttagaacatcacaaaattttcggaaagcactactataatcaaatatttaaaaaagggttcgtatttctgtagaaaaatggtctgcaatatgatctattttttgtttgttttttcgggttttcactaatccaaaatgctttagaaaatagttggttcctctcaataaatatttgatcttttaaacattggatagatgaaagtatatatatgaaaaaatgaaaataagttagatatatatgagctataacgagctttttgttttgttttgacatcagctctgacgtaatgaatctcaaacttttactcgatgaatttatatagttccttcgtattagtccacacaagactctttcctagtgaaattgatggttttatcatgccgctcaataaattttctcgtagacttcttatatatatatatgcatccaaaaaaaagacttcttagatacataaatagtcaaccaagatgtacattgaaaagaaaaaagaaaaaatatgtacagttagccataaacatattttttttgttaaagagccataaacatattgcagaccatttctcgacagaaatatatatatatatattagccataaacattttgcagaccatttctcgacatatatatatatatatatatatatatatatattaaaagggaaaaaaattcaaaaaccaaatttaatatcgcatacgattataatatctttgtaaatcttattatttgttaattattaagaattataatagtaagactaaaggatggttcctgctatatatgcatgaaacaaaaataatattttaggtattaaacaaattaaatatttttattttatgtttgagaatggtaatgatattaatttaatccgaattttaagttacattgagactagggttagtataatcatagggtttattattatattgacccaaacaattatcaatataatttatgacatataagaaagtagtaaaatcatcctatttacgatggagtggataaacctaagcaatgtggctcttgcttaaatagactcagagtaaagaaaaaataggaagctacaagttcatatcaagtgggttcattatgtcctcaagttcacatattcataaatcagtaaaagtggtgagtgttcaaacatatgcacaagtagtgaacgtaagactaattggtccaagtgtatatcgaactttaaagtttcatgcatgcgccgtaaataactttattattttatctttcatgtagatccatgattttttttcttgattgtagttttactcggaacatacaaattatttaacaaaaggcgtcagtaatgtatgatacgctaattatttctatacatgtaagaagtctcctagtcgcaccatataggatttatgtggatatatgttacacaaaaaaaaaaaaaatcaagttcatcattaatgcagtttaggtcttaaacaatgtaagattcgtttaggtctttacaaatgggaagtgagtttagagaaaagaacagacaaaaagttgcatcaagtacatgtaaaatagtcatgcccgattttgatttcattattgcacaaagtaagttgtgaaaaaaaaaaaataaataataataataataataataataaaaagagttgtgtggaaatgataatttacatgttttcatgtaagacaaccgcagaaattttctcggaaactgtctttcgcttttgattgcggagacccaaaatgcaaaaagtcttgtttctttggtctacattgcggaaagagatgacgaaaaggtcaaatcaaattctcttcttcttgatcttcttattttttcggaataacagatcttcatattgattatatttttcatatttttttttcttttttttttggtgaagagtcttagcttattcaatgaggtttatatactattcaattaaaaaaaattatcgtctaaatttatatattaaacaaatattttctcacataattattgtgtatgcagttttatttttttactataagtttaaattgaatatatattttgttataattcttatcaaccgaattttttattacctaattagctatgagatcaaatcatctactcatctcttcctcactctataaaattcatatttctaaaattatcattttcaaactacatatttcttaattatacttttaaaatgaccccttttactgtaaaaacacactcataattttaacttatataacttttttataatttgataagatcactaggctttcaaagcacaatttgtataacggcatcatacaaaaaattcataaataaattcataaatataaaaattcattttacaaattcactattttaaatattcaaattggatctcaaaaaaaacagaaaaaataaaattagaattaatcaatagatttttttgataataaaatatgaatagtttttaaaagagttttgtaattgtatgagtaaagaaaaaatatatttgttttgttttattattctctctcaaagtgaaagtctggtttatgagactttagaagaaaaaaacaaaaagaatagtaaatggaaagagaaagactttaaaggctttaaaaactaaatactttgcttaacacctcgactagtttaagataacctaattgtatttagccgatctgcgtttgcttattcattctgtattctaccgatttccggttaagttcaataagaagtatcttgtttcggttctacttacagttcagttttaagttcgagttcggctaaacgatcattagactgaacaactatttttaatatatatgtgatactaattctaaaaatatattattacaagttacaataacaatatcaaattctacttccagtcttccactataatttaatacaactctccctggttccttcacatcaaatatgcttcgctgtcatcattgcattgattttccatgggtagtcttggatcttccgaaaacaaaaagatgaatgtccatttataaattccatatataaatttaaaaaccctaaaaaaaggttttgtgggtttatacaggaagtaagcaaaacacatatgactcaagaaaaagctttgatctccaaattataaagaaaatatacttatatgcgattaagataatatacgtataaaaaatagatatatatggattcattttcttgcgacaaacatgaaaaaaaaaaaagtatagatctttcgtcgaatctcttaaactatagataatatgaaaggtactagataccttaagctgtgtaaaagcttactgatttcggaagataaaagaggccatggaaaattaatgagatgatgataatgaagtatatgcagtgtgaaagaactatcttttctacaaaacaaagaacaaatttgattaaaaggagagaaatgaagttatatataccactgcaagatttagtatatagtagtgagattacggattcaactagtgaaaatagaagtgtttataatggtatgggaggatttgaattggttaacaaagagcaatgagactgataccaaacacctaattattaaatgtctacattgagatataacgggtgagtatgagctgtttttgttactattacatgttatgtgtgccggtaaggtaacatatagccaaccttatttccttaagagaacaaacagttacatatgtagcttgatcggttagttttttagactccctagatgtagattgctcttggtagagaaacgttaacattttttgttgacaaagatgattttcttctttctccaatccaatcacatatttacttcaggaactttcttttttctccaagtccaaagcatgtggaaatcttaatgtgtgtatcaagccgttttacattttgaaagtaaatatgtctatctgcttttcttctcttgtataatcatatccgtatacattcttattacaaatatagtaaaagaaaataatctatccacacgatttaaccaaaaaaagaagaaaatggtgcaaccccaagagaaaatcagtaaaggatggaagaaagataccaatacgaaaaaaaattaaaaaacttatgaagttttgctggtagaattagatgaagaagaagtgggaatggtatcatcttcttcgcattgtttcaacaattcactgaaggaaggatcataagccaccactcttctcaaatactttgctgcttcctctctccttccttcgttgaatatcgcactgcacacataatgataagaacaacaattctcagattcacatattctcttagtatttctgaaattacatgtcacaagaccaaactcatgagaataatttacttgtttttgttttttaccttgagtagagtaccaatgcatccaagtaatgagctttgctcttaggatcgtcgggctctttcatgtttgctactctttcaaggtgtgtgattccttctgatgtcttcccctgaagccatgagcgaacatttctttgagtattttcacatcaatgagaataaaacgataagacgaaaacaagctatttgagaataatgcacctgacgtatattggagacacctgcccattgggatgcaacaattaaaagatcgacttcttcaacttcggttggactggtatcaagaagctgagaggatcataattaccttcgattaatacgattataggtttcttatcagatgtcctaaagaatgagatcaaagaacatcaaaagctcacctttgaagcagcctgctctaagcattttgcagcttccgcgaactggtctttctgatataaagcctgtccaagaataatcatagcttgaaggtattcaggatccttttctaatgccaatctgaaaaaacacaacttaagtcactggaacagccacatcgacaaagacaggtcaaaggaaatggttttcgcaatgagaagcaatcatagctacatagttaccttaatagcggaattgatttatccttgtgccctccggataagtatttagcagaaagctgacaagaaaagctgctaacgttagtaacaaagatgtggaagattaaattactgttagaacataatgatccatgacattgacttacagcaaccaactccttaggggttaagttatgcactgagatcaaccgtcctttcgaggatggatcagtgagtttcccttcatttatatttgttaatataggattgccagcttctttctgtacagagtcatttgcttgtaggcccaactttgcacttacaacgggatggttaaggattgattgctacaaagccattgcgctttataagataatcgaaaggctacttacatatttaatgttaaagggaaggtagagttgttgtgaacagagattcagaccataagaatctaagaaataaaatcagattattttgctcatatgagctggattgaacgaggagttcctcttagataaacttctgtctacccataaccagcacaaagaccaaatcccctaaacatactaaacttcttgaactaattactacactatttcagtaacttagaaccaacgtctaagaaatgatgttgaaccttaagtcaaaagcccgcatcattccccctgactcaaaaagccactctttaattgggtgtttagtttacatgaatacaagattaagtacatcctcagaaatttattaatatccccattttcacaaattaatcatcttaacaggtttgactaagatatcaagttttgcctgaattcgagacagaaaagtactgagctcctctcttatctggtccaaacaaagcttgtcccaattgacaccatatcacacaaagaagttaataaaccatagatttcaatcattagaacaaacctgagcaatgctgaatgacaaattggtagcccagtagagtagacttccctgagaagtaattgtgaaacaaaatgagaagaaattaaacttttgaacaggtagcagttaaaaaatacagtattttcctaatagaaagaatggagagaaaatagctgttccagggggtaatagtaaactgagagcagcagctcttaaacagaactcactcagatactagattaataataaactccatgtgactctgaagatggtgtagtttgaatggcatagtttcaagattagtcaccattaagggttttaacaaaagagtaagagtcaagtaatttgaacttttgcattttaagagacttagttgaaggaccttaagctaaaacagaatcaaaatatagtcatggccacaaagataaagcatacccagagttcgcagtatcatacactaacatgttcaattagaagatgtctttattagaacctctttgtaccaacaaaccggaaacaagaatatgtgaacttcaaaaggcggtatattatcagagattaatctacctgaggcatttggaatgaaaggaaatacagagcacatgtcaaaagattcagaaatgtcttgtaagcctgcagaagaaaaatgaacacccatcaattgttaagtagcataatgaacacttaagatgttcttctttttcgtcagaatttggtatttttacttaatgccaggcaaccaagtcccagttactttttcggccaaagttctttgaagtatatatgatcaaatatagacatcctataatcaaactgcacaacaaagtagaaaaaaaaactcacttttgccaattccgtgaatttatcaactttgtgaactgaggatgctgtaaaagttatctgcaggaaaatgtatatataattcaaacaagcaggactgcagaaaataacaggaagtatagttcaaaagaaatgattatagttgatgagatgtagcataattgttacttaacgtttcatgatccaacaaagaaccaaacagtacatacctgtgtgtttgtgtaatgcaaaccagctattaaaaaggggaaaagtggaccataaagaccattgggaatttcggtcaaattctgaaaccataaagctccaccctgaaagcaatggagcaaaggattctatcaaagtgtagcagaagacattttccaaaaacattgactaaatgacagtagaagggcagatatacaagaaaacaatagtcctacaatatacaattcaaaatatgcttaaaagtgatcccaatatactggctggcgacttaccgaatcaaatccaggatgatgatcaagtgacattcttctgatgctagttatccacaagaaaaaacatgaaatctgcaggaaggagaacgggggagtaagcctacaacttcttgccactcaaagaattatacttcatgatatctgtaattctgtataccatatatttacactcattgttgatgttactgtaacaacccgccccgtgggacccgctcacgtggccactctctgccacgtggcgtccagttggcgctgcagcgcatcaaccctaacctctctcctgtgggcccttctggcccaccaggtaggttattggtgcgcttggcgttcgaccaactggacgccacgggtaggttagggttgatgcgctgcagcgccaactggacgccacggggcgggttgttacagttacaagagtggtaatagctaaaatacgcactaataacacaaaactagccatctaagctctataaatatggtctcatgattcactcatgctctcaacagggctgcgaaaaaataacagtttctaaatttctacagaaatatgaacggcattgaacaacatcatatcacggtctagttccacaagaagatacgaagcatcacctggatggagaaataagcaggaacccacaaaaacgaagggcacccgatatcttttctttccttccgaaaaagcttcaattgatcaagaacactccttcctgaaccttgtggaggccagaaatgcggtactacaaaaaaaccactatcaaattatcagcatcaagtgaacaaaagatttcactttataatgctttaacaaccaccagtgttgaagaaacaaagggataaaaaaaatgctcacgcttaggtaagaactgtgagatccttttagtttgcttccgttgcaaaatcagtataggaagcaaagccgttctaaatgccacagtagacgtagcaataaccacccacctgaccaattcatctgattcaaattaacaaaactaataaacttcgcaaaacttttcaaaagacacaaactacgaaactgaaacaagaatcttaatttgttaattaagatgtgaaagatcgaaactttcgattgagagctaatcatacgataaaaccccaaatcagaaatcagagaactttgtatttaccaaggcaatccagtgatgtcatggtatgaatcaagcaacgagatcacaggttgagtcaagtaatcatagtttgacaaatcctggctcaagtcaccgaactctaatccataaccattgcttcccaagctaccgattgaatcgccgaactctaagccatgaccattgcttcccaagctagcgattgaatcgtcgaactctaagccatgatcattgcttccaacgccagcgattgaatcgtctctgaatcgagttagctcagaatctaggtcagatggagtggaaaagaagcgggattggaaaagagcgagcgcgattgaaggttgggttgtggcggagacatggtgaggagagagagaggagcaagtgtggtgagatcggcggaggtgagagagtaaaaccctacgaaatgccatttccggtgaagaaaactgtacggtgtagctctttgatatgtggaaagtaactccgttcacggtaaaattttaattgactattgaccatttaagtgtaaattgtgtttatctagttaaaatatatgtaatttaatcattggatttgatttgtaaattgaaatcatgtgtttcagtaattaacgatattaaaatataatatacatattctaccaaagtgtcaaaaacaaaaattatgtaggcaaagactcagaaaataaattactaatttgaaaaaattaaaaaatatttttttatcattacatatacatatttcactaggacaaattctacaggtcaattggctaaattaaaaagaaaagagtttacaaaaatttacattagtaaacgtaattatctagtttacaaaggaacatagtaaatttgtcttacattacagcaaataatgctatttgtatcctaattttatttttctatatcagttataattgatgtaaatgaaaattacattatttgtataaatgattctaaaaatagttatgcaaatatattgaatcgaattgatataaatattttatatgtaactatgtaattaaagagggaaaaatagtgatcgcctattacaaaaaaaaaaaagaatatctagtgatcgcggcaaggtggtgatgatgtttgcggtggttgcggttgacatggtgattgtgaaggtgaggacatggtggtggtgacttcgtggttgtggtggtggtggtgctgctgctggatggtagtgatgaacctactaatgaaaaaagaaaagagggtataatattatctttctttttctgttgcagatttcttaatcctaataataataatttataagcccaaataaaaattgttttctaaaaaatttcaaaaaatacttggggtttttccataattaacaaaaatggttagcatttggaagaaatgttgaattaaaatctttttgctgcatcgtttatatcgccgttgtataattaatagtattatatctcgaatttaaggttaactatagaattcaaaagactttttcaattactgaaaaatagtaaactaaataaaaatggtacaacaataattattttttaagtaagaaacaaatccatctgagacttattctcttgaccaataacatcaagaaaaacaggatcaacggtgacaaaactatccacgtgaaccctaaaactatgatcccaccacaaaaccttagccgctccttcaatagtaagcttagcctcaagtttcatctctctattcgccacgtcagaaaagaactgccgcgcgtgttgcgcaagctccataccgtccagacgcgccggtagccggagaagctgacaagatctcgccggttgcgagccagctttgacctcagctgagccaagaaccgtgccatcgtagaggattgtcatcttggtggaggagtaatggatggctgcgatgttagggttagtgacgtgtacggtaagcattagctctgcgtcgaggacagggaggtttagtttcagtgaggtaaggtctatggagataaggtggaatgttggatcttttggcttggcgcttaggagtgaagctgctgctgttgctgatgctgctccgattaaggctgagctccagctccattttaccttttggtcccttgaccccatctcgaaattacagtctatgcccttgcgatttgaagaggagaagttcgattttcaattgtgccgaccagaacgaggaagctatcgagatagagaagagttacagacaaaacaaaactactcacaaaagtgtcaaaaataccaaaatgacctacgattctgtacttgttgtcgtaaacgtgacagaggtgtttcagtcatttgttcaactagtgggtgttatttttagtggtgtttgtagggcccactaaaaaatcacggaccaagggttatgtatgaattgcagttgtaggctaataggtattggttttggacattttgtttagattaacaagtttacatataatttgcaccccaaaaaaagtataattctgatatcagatgacatattggaaagaaacaacccgagtgcatcgaaatacactatcccaaaaactctcatttaaacatatcactgtcaaattcagctagtagtctaaataattttggatgatatttaatattttagttagcgtaggtaatttatagagaaattccttaaaataacactaaaacaagttttattaacaataataacacatgtctctttaactttcaaaatagcactatttgatttactatgaagtttttgttctaaaaatattatcactaatttatttttttaataataccacaatttttatataaaatctattcaaccaaaataaatttaaaatattatatttgggttctctatttccaatttaattataaatttcaaccatttaaaagaaattttgattcattttaatattagtttggtattatatttgggttctctatttccaatttaggctatatattttcaccatttaaaagagattttttttattttaatattagtttgtagtattatatttgggttctctatttctaatttagggtatatatatccattattttaaaaaagaatttgattcaatttaatattagattagtgtttgctctcatttttattttctatcttatattttaattaagtttaattaaagtttatagtgctatttttgaaattttagaaatgttgtgttaattttggaagaaaaactttttttggtgctatttttgtcaattgccctaatttatatgtgtataattctaattacttctatgatcgcctttgttatgtgctcatgaaattgcaagtcaggtggtcttaaattctaatccttgatgaagtatgaataagatggcccaaaaaattttaaccatgcattattgaaagcagttgaaaattaggcactcataggtgatgattgtaatttaaaagcatagatgaaacaaaaaccaaatgaaaaaaaaaagcgactccacatagaactaaaaggaataacgaaaccaagttatgaatgaatcaagtcccagggagaaaccatcgagcatccttgagaatcaagttgtctagtcgagggaagcaagtgttgtttgacggtcttggttgcaacattgaacacacaaatgtccagatccaaagggacccggagacgggaacggtcatgatgggtgaaatagatagagtttggttggaaaccaatggtatggttagcagacacggtagtacccaagtcgacaagcagggcctcatcactaagagaatctaactcaccaagatagggcccaaaataattatgattatgaaccttcttgaagaggcagaagctcctatggttatttgcagaactttgtttttagtttaacagatagtgattaacaaataactaaaagaacgatcattttattggaagtattaataatataaattaccgttacatgaaaaacaatatctaaggattgaaaaaatgtgattaaaaaatgcctaacctgaaactcaaaccagaaaacattcagtttatatataagtttgtacatttgaagatttttagaattatgttttccttttatatcacccaagtacatgcatataatcctaaatggtattccaacatgtttaactttaacctataaatatttacaataaagatctatttgatatcattcttttggcaccttaaaaatgagacaaaaataatctcataattaatgatgtacaagaaaaaaagaatgatacaaagtgataaagtcttaaaaaaagaataataatgaactaaacactggtaatttgtaagaaatcttagtcttttgaagaaaaatagataacaaagggccaaaaaaatccatgctgttataaacagagaaagagatagaagaaatgagtgtattattccattgagataaagggttctttatataggagtacaaggaaagggtaaaaccctagaaacatctagatgatgggcttagatgatgggccttataatgggcatccatctttattcataacactccccctgatgaccattatagtatcataactcgtaaagtatttgaaatgctgcctcattaaaaaccttaccaggaaaacccaatgggaaaaaccatggttaagggaaaaagagtgcaacatacaattactcccccttatgagtatattcgtcgagatctttgagacggcgtaatccgatacgatagactaacttcttgaaagtagcagtaggtagcgccttggtgaataagtcagccagattatcattcgaacggatctgtagaactcgtacatcgccgctcttttgtagatcgtgtgtgtagaagaattttggtaggatgtgctttgttctatcgcctttgatgtatccgtctttgagttgtgcgatgcatgctgcattgtcttcgtacataattgttggagtctttttccctggatatataccacagtcttcttgtatatggtgaactatggatcttagccatacacacttgcggctagcttcatgaattggtaaaatctctgcatgattagaagatgtggcagagaataaacagtatttgagaataagtctgccaaatcttctcttaaacaaatttctggataaagtacaacgccattcttctgctcatgaatcttttagatgattcatcttgaccatcttatttatttctctaaatatcattagtgtataatattcatttggatgattgatagaatttcttaatattcatcaagtgtattatttgcgtgttctttaatgtctcgttaaaaaccttgtcatagaaaaatcatgtgggataaaaactatgataaggaaaaagggtacatccacgtatatcattcaatctccccctcggaaacatcttcttcaggagatgattttcaatcaaatacaatatctcgttggaattaataaccataatcttaatgatcaaaattatatggttttcatatagacttataaatatcattatctagtgatattttatcatacattattgtcatcgtattacttatgataactctataggagttttaatgattttcaaaacaaatattagtttgatcaatatattttgacaaactcaacataaatatacatttatatgattatatgccatgttacatatttctttttattcgatcgagtagagttttagagaacataattctcatataattaatccttcagagattatatctttcaagaatttcatataaatgtcatatccagtgttccatctcttattgccagactttagacttaaaaaaaaaatattacatccaccacaagagaatatatctcttcataatacatttcttatctttgtgaaaatctcattaatttcactattctttcacataaagactcatttattttccactggttttacacatcatgtgcatagactactagtccaaatatttctactagagattataattatatgtctatttcttcttttccatttttggctaatcattactttgtgtacacttttcaatagactttctttcatgatcctcctttttgtctataatatcaactgctcatagcatgcaaatatattacgacgtcgatttgcttttgattccattatattttgacatgacatagctagctagatctcttcattgtcaagtacttgaatgttttatttgtcatgtttatgtctcttttagagatcattcactctcttcaagagatcatcaaaatatttatttcctcaatttggtcatttttaattttgtgctccttcacttttacgaggatatttatatttggaaccaaggtctattacgcttcatgcgatcttaagactcaatagcagtttgaaattggtccttacaggacattcattatattctggagcatttaatttacaactggtataagtgacttcatcactttatttgggtcagcaaatgcgtctggcaattacaatgctaaatagtaaattctgtaattgaagtgacttcatcactttatttgtgtattaaagttaataattttatatatgtacaattaaagaaactgatgctgataaaatattaaaacaagatttaaactgtattattacttttggttgatgatattataaatttgtattaatatcgatccaaacccgtcccaccatataactctcgtgagatattactttttataagttttaatatttcaataatctatttcaaaaattaatatttttttaccttttacgtaatgacatattttgtaattcttactaaacaaaataactctacaaaatgtagttcaatttttttaatgtagataatgttataaataaatatttagtttagtcataatttgtgattgatatgtacttgagtttttggactacctgtatttcacgtcatttaatagcctaaattgggtagttttgtaacattatttgaaacaataatattatcttaatacatgtacattttactaactgaaaatatgagattgattctttatattacactgaaaatgaatgattcaaagtaaagatcagagtgtaatatagtttagcttagaaaataattaaaacgattttatttatatatttagtttcctaaattttagtttagattcagaaaataattgtttaacttccttagaagatgataaacatatatggaagatttgaatctctattcatatatatttaaaaaatcaataaagtcaatataattaaaggatagattagaagaaattttcttgaatgctaaataattaatttgttatttataaacgaaatattagatgctgtaaaaaacgaaatattaaataaatatggaaagaaaatcataccttaaaagatttgtataattgaaactgattttttttacagcaaattaaaaccaaaaattaataaatacttatgagaggttttaggaatgataatttttgaagtaatgctagattttttttgaagtaatggtggagttaatatagagagattttaggcaatatttttgttaggtaaatatttgatttaaaatgtcgattgaaaaaaatatattcagtggcattgactcgtaaataagtttcaagtccaagatttatttgttaaaatggctgcaaaaatgtatatgtagattttacccttatttgaaaaagttgaaggttaacaaaataaaataataatttttcccgcaaaaaaatttcgacaataattttctgccaaaactcttaaaaactcttgtaaatccgacttttaaaaatcttgtatatctttttaaaaccttttataagggttcacaagagttttaaaatagttcaaaaatatttacaaatgttgtaaaatatttataataatttttttgaaaagttaaaaaatgatttacatatgtttttgaagactttataagagttataaggattttaaaaactcttgtatatgattttaaaaccttttacagtggttttaaaaagacttacaacgatttaatggatgacgataacaggacgatgaaatttttaaatcgacattaccaagttttaaaaatttatatttacatattttaataagcattaacacaaaattgattaaacaaaagatatttaagcggaatcttgccatataaagtatggttttcaaagttagtaactcataagatcgtgacacatgtcaattttatcgatcagatgtttacatgtgttatttaagatttaacttttttattctcttataagaatagaaaacctaaaaaaagaaacaaatttacatttactaaattctatgtctataaattaataaaaatatttatttttacgaacaaaaacaaaaattaacaaatttgtttttatatgtgttattggtcaattaattttttttagcatgtatcaaatataaaacaaaatcatttagtatggatattaactaattaaaaagaacattgaagtttcaaataacaaaataatttaattaacattatattaattgatttcaattgtatttatcaatgtaatataatatttttatttgaatacttagagagaatattagtatattcatacttgtcttagtctaagaatttcaacgcatgttgtcattagtgaaaacaccaaaaattaggaaaatatggtttagagggattgacttttaattatttaataaatttgatgtcatttaaattagtttgacattaggtaaaactaacttatgagattatggcatatagcaaaattatatcttaacaatgtttcctttccaaaatattttttgaattattcatttttgttttgtttattatgttttgtttattatgttttgttatttgttagttattttaatatgagctaatatatagatttgatatgatatacatattattttgatacaacacttaatttttaataaaactccgtacttaaaaggtgatttgcattaataatttagtaagatgttttatattgactgattattaattgaatggttttttcattggactttcttacatgagggtttttttaattaaaaattaagtttagggttttttcattaaaattctttaatgggcctttgggcttcccagcggcccatatccacaacgatttctacaaaaacgacgggtccatattcgacctccggaatcgattcgccggtaaacacaaaacctccgtagaaaggtccaacggcaccaatacggcaatgtcagacccatttaagagaagttctctctatctctcttatcttttttttccagagatccttcactttttttcttctccttgaggtcaaaaactctatttcacttaccggcaatccaatcttctctttggagagtgtattcaaattagaatttaaaatgatttgagctttcttgagttatctatcgattttaaaatttcattctcgacaattcactgatgcttgtagatcatgtttgttttgatggtctaatctaaatttgtagggatttggatcattgttcaatactcaagtcttgtttaagtttatgaactatatcaatggataaagcagaactaactttggaacaagtttgtgatttgattttgcaatatagttaattattcattatgtaagtaaatctccagaattgataggatacaccaaatttaattcaatctctattgttgtttgtaccttgtaggtctgttcgtttgctcatttgggatgtccatccaaatgattcatctgactaatccatctaaatgatgttcgtttccatttttggtggttcagtaggatgatccatctaattgtttttcttaaaaaaaatttgcttgtttgttcatggatgatccatctagatgtttctaataaaaaatgtctaaaatgccataatttcatctaattatattttaattcttaatctaaccatattaatttttattttactgatcaaatccatatttacaatcaaataaatttcaaattattatatttgatatttaaacttccattttcatgatttttttgtttttatataaaaaccaaagcatataagcatatattatgaaattaaagaaactccaaaaatcttaatatcttcagtgttatataagtttttaccaaacatagataaaacatgatacatacgcatgaaacgagcatatctgaaacacatgatctatttattgacttgtgatgatctctcagagagaaaaagaaacagatttaaccaaacaaacaccaagagacgcaaagaaaacactgcaagcaatcaagctcattacagatggaaaattattaccaaaaggctcacttagaagaaagaacaagtccagaggctgaagcaggatttggatcacttagaagcagtacgtgatacccattcaacacacaatggcagctcctattaaagattttcaatcacctgcatttatcacatcaatgatatgtcatcaaacatagacgaatactaaaataatgtacaagaatcagatagaattagctcaaatgatgaaaccaatcaaatttgataaggatgaagtcgattagtatttagaaaagaccaatcagattcattaaaaacagaacttgcaaccaaaaatgccaacaacatacacaaataaatcaaacgcaagaaaatatttgcaagaaatattagcagtttaaaaagtaacatgtcattatataactacattagcttgccaaatccgactcaaatgattaatcaatgtgtagtttgcaaacggtttccagtagctagacacaatgtttatgatacataaataccatataagtggtctttagaacactagtaaatactcatacttacgactaattgacaaaatcagtagaactaacctatctaaattattgtcttatcttacacatcttggaatgtggtaattaaagcttctttacttagactagcgattgtgtccatcacaatcttataagtttgctttgtttttgaaaatttcctaacactaacatatataaaaaaggcacttattacagaagacaaacaacaacaacaaccacaacaacaacaaaaatgccagagaattagaaacttgcaagaaatgaaaccagcaaaatagacatatccatcaatcaagcattatatgactttacacgactttcatggctaaacttaagtcttattgatgatcccaatcactttcacaaaaaccaatcgaaagtatttggttagataaatagcaaaagacaaaacaaaaaccacactgcagagatattgaaagaggcaaaaaatagcaagctttgaacatcaatgtttcatctttaagataatccttcgtagctatctatacagataaaaaatagcaagctttgaacatcaatgtttcatctttttataaatacacgacagatacaaaaacccatgaaaaattacagcctataagcatcataaactcaatacaaaacccatgaatcttacttttccaaaacgagctaccacatatttcacagctaactcccattcacacaaaataaaaccaataatcgaatccatcgaatgactcaaggagaaatcaaacccatgattcttacctctcaaacagtggtcctagctagaaacatctgaaacccattaggaaaaatcgaatcattaaccaatccatgagacagggagatagaaggggagagtgtgagagagagagaacgcacgagaagatcccgacgagagatccggcgaagaatgtctcctatctatctttggagtatcccgcattctcctatcttccaattgcttctgaatgatatgaactcaaagacaagctccgtggaagtcacctcctctacttcaagttcaaatgtgtatatatgctctgttaaaactggatatatatgatgatagcttggtgtacactgaactttgatagcttggtgtacactgatgacaatgtcaacgctcatcgatctctgatcataactcatttcttcattaaccttaacaagcatgatacaagccttaaatctcaaggttgtaggaaaaggcgactccttcaacttgattttcaagtaatccccagaagtagctcggtgaatgaagcaggcaggcacttgtgtaccgggtaacatcgcaaatctagaagtcgatgtgtgcatgatgagatctctggcttcttgattcagtttgaagcaattgggaaaatatagactaatctctggattgttaaagcaacagtccagtctctcgagggacttacaattatctgcatatatgtaatcaagggagtctggaagttgggggagtgataccagattattgcagttgttgagtgtcagaacacgtaaacgagacattctcttgacccatgaaagagggagctctattagacttgagcaattttggagcttcaattcacggagattagtcgcattctcgatagcagggagctccacaacacgtgaacaatttcttagagacaattcctggagattattggcattgatagatggtgggagcttcacaagactcgaacaattttcaagatctagtttctcaagtttagttgcgtttccaaaagagggaagctccacaagacttgagcaactgtggagatctaatatctggagactggtgagtttttcaatagaggaggggagctccactaaacttgagcaacgtctaagctttaattcttcgagattagttgcagttgaaagattgggaagctctttcaagtcttcagaatcactcaaatccatccacttgagatttctaagttgctgcatttgacaaagaagatcatgttgatacaattggctaataaacatttacggaaacaaattatagatttaaaaaaaaaaatgaaagttttcatcaaaatcacttactttagttccttcccatagcttccgaagcttgctggaactcatatctagttcgacgagaaactctggattaaaagtagaaggcaaacatatattctggtaaccaaaccatttcaatgatctaattcgtggagagtgataaatcagatcttctagtgctaactgcactctctcaggttgatgtataatcttgaagtgaagcagtttctgtctctccttatgagtaaatacgtcattgattctaacgaattgaaaatcatgcattctttcaagtgttttctcacttattttcaattctttctcattcttacgtaaatccaaatttatccctataaaacgtctattatcctgaaacatgagccaaaaaaaatattagtaatcaaataaactcaattaacagggggagatgcaatggcaaaacttactcttgtatcatcgtcgagcacttcacatatatccctttcacctaccaaaagttgatgtttcctatagccatgatgaacgaattgcttacaggaagtttctcttccaaattgttctagcagagtatgcatccgtattgtttctccataaaaggatatgagagatttctgagctaatacgtgaagaccttgtttcacatccaagaactttccaagaagctctttcactttggttgttgattcgtagttaaaaaggcaggctatataaagaaatagatatttatcttcgtcacataaggcatcgtaactgaactgtataatgttcccgatttttccgtcgaggctagttcttaaccttggtagtgttctttcccactctggcttggacatcccccgcaaagcggagcctagaaccttcaatcccaaagggagttcaccagctaatgccttaacctcccaagcaaggtcacagaaaccttcacatggttgtttctgaccaaaggcattcatacagaagatttgaaaagcctcgtcatttgatggatatcccactttgtaaacatgattgatcccatgggccttcaaaactcctagatcttctgttgtgataataatccgacttccaggaccaaaccatcgagtttctttcgccaaggcatctagttgtcctaagtgacccacttcatcaagaacgagaaacactttcttgtctttcaaacgttctggtgccactcctaaatgagaaatcatggtatctttctgattgaaaatctgagacaacatttgttcttgtagtttcaattgtgcattgcgctcattcaaacaaagtcttggatagcattctctgatatccgtcatgattgcagcaaatggaaatctcctggagaatcgatcaaacatacatgtagcgatggtcgtcttaccaatcccaggcggacccaaaatcccaatcatccttacttcatccaaatctaggcgtaacaattgttccgtcctttccatatgagctgccatcccaacaaaatcatcgaaatcttttgaaacatcagtggatatcttttcaatcatctccgcttcatcgcacctaacattgatggataacaattagtcatgaaatattctcatatatacacatccaaaacatatgtatatttcttgtcttaatattttttaattaaggtaattaaggtaagtataaatcaagaagacaaaccatttgtgagaatgatatccggcgattgttgccacatcctccaaagcttttctccatctctcaatatgctcttttgttttacctctacatgtttttgtgaaggcttttccgaattcaccagtctgtttctttatgtcagttggctccacttcatagaaaatggtcatgacaatctgacccaccatttccctgcatttcatgatctcggccaactcatcaagacaccatgacgaagaagcatatttccttgagagcaaaacgattgcgatctttgatcctttgatagcttctttgagctcaggaccgatcgacttactcctctctatattattatcaatgaatgtgtcaattccctttcttctgaacgattccttgatgtgactaagaaaggttcttcggacatctgccccatggaagctcgggaagacatcgtgtttccagtttcgagacacagaagttgcaggagatggaagagataaagaagaagaattactttcttggaatctgaattttcgaaaaagtatgaagaagcctatagcagctgcgactacgacaaggaaaaaagaagaatccattagaatggtgaaggatggagcaagatcctagatggatggaagaaggattttaacaaggaagaaaaggatccgtgtgaccgttgactattggcacagaaactccatggatgtttcctagaaaatgttacaaacgacaaaatctttaacatccccaattctataattagtagttgggccagtttgttgttaataagttgcagcccatttagcccaatgactaaatatgacaagggtttctttgttacatttgtgtgcttgtgtatatcgccgtctctgattttggacgaaataaaaagaactattttgagttaaaccctaagccaccgttagcgtgatcgagactatgcctcaccgttggttatccagccaccttctttaaagccacaaccaccgtgattatgagagagacgattgagccaccggtattgttgtcatcgtgctgttgtgtttgaatggatcgaggaacttgtcagaaaggagagatctttgtcgttcatcaccaccaccaccgccgtgtgttgccagaggtttccaacacgagtcacatgacgttagccactgtcaccggagcagtcgtagacattgtcgaggccgttaagggtaagaaagccctagatttaatctgtaacttgtgctggaagtttctggcttgctttatgatatgttgatatgttgttgtttaactatcgacccatgagggctaaccaccatggcttgaaccgccacatatcagattgcttagccgtccacttcaccgttccagccgccgtgtaaacagtcccgccgagatccagtgttgtcgagaaggtatcggctgaaccttatctcgtgtcgttgatatcagatggattattaaaccgatgttctatgaggtgattgattattatagggatggattgaaccagcctaaatcatgagattctacgtgtaattgattcctttaactgaaacttgacgtgtagtgattaactatgtgaatcgttgacgtgtagtgatgggttctctacagtaaaattcgggacttgtaggttacttgggagtggcaatggttatgccattctaaagtcctatagactaaatcaccattttgatagacaacctctaatgactaatttggagaaaattttggttttcggtatatataacagagctgactggtgagactttccaacgtcaccagttaagaaatgaaattgggacattcaccactcaccaaagttaaggtcatttgcgtatctgctgagactcttgagatatgttgttagtgtaacattgcttacagaaatttttaagttagtgattgaaatttaagtgatgatttttgtttttgtttcaggtatacttacttttttgttgtaaatcaataccgatcgtcgacaacctgattcatttaactattaagacttattggaaagaaagacagaaagctttcgtcgaatttactcgagaatttttcgaatctggaaacccttgtcttcgaagtacaaccacatatgacatatcattgttctgcatcaaccaggaatataagcatttcaatagaaagactcattaagagaagagcaaactaagccacgcatctatcgaccgagctaactgccaaaacgaccttcttttaaggagctacctagctatagtaacttattgacttacaactaaataagctctaaaatgatgcttggggagcaactttctaaacaacaaacactaacggtacctttttatcttgatttcatcatgctgtgtccgatgacgtggtggagatcatgctgattaaaaaactttatttcacttttctatgtccgatcttatctttttttttttatcatgctgatttcaataattttttaaaagatattggaattgcgtttgctacttgatctaactatttttaatatatttacagttcccggatgtttgtagatgagatcgtatttgttatgatattaaaaatggtcaaatttgttataacctaatttgggtagtactctttatataacaaaatttgttattttgtggtttaatctcagagtagtatttgattttggtgccttggttgtataacatttatgtaacatacagcctcatttacatatagtgctaggctaaatctggtaatggtgttatttgttgatggagaagcttcagggttttttttttttttttccgtcgaacattatttatgtattaagtaatctggaagagactctcttctatagaaaaccattcatgaaccgatttgcttacatgagaaaacaaactattacgagcacgtgctttgttccgaggcaatgccccctcacattaaatcaacgagaaaggaaattaatactaaatgaaggaaaaaatcagacaagggaaccaaaagtcgctatctcagctactaacgtcggccactccgaaagtttctcaaggatagagataagatctgcacaatcggttgcaaaggagcaactcgtaacacctatcgagatcatacattccattgccaaaacaaggaatcaacttcagcatgaaggggtgataaacttctacgcacactcttcaaagaaacatattactacaattgatgaacattcccaattatttggtggagtagcttagagcgtctccatcagtagtctctcacatggttttttattaactaaaaaatataaaataataataaaatagaaaagagataggagaaagtttgaaaatagtttctctgcagataaactttaaagtaatgattgagagattatgtgtatagatgtgtgtttataattggacagaaactaaattataataaaatattattatatattttttttgagaaacttttaaagtatctcaccaatggagatgaccttagtgctcaggtttcttcttcttttctcttactctccttcctctttattttatttaagggggtgtattgaactatgtattttgaaagagtttactatttttttgaaatcatctcgtattgaattagtgattttgaaatacattcacaaatctcatgttattgaacatggaattcaatttaaaaagattcgaagtgatctacaagcacttgttattcaatctgtgatttataaaactcttacaaaatctggtgttagtcaaaagtttagtattatttttagagtaccttttgataaggatttgaggagacttttgatacaattttagttaaaaatatgggtaagaaattatcatctcctgacatggaatgtggagattttgtccaaacaaatgaatacgatgtgactcatacaaaaaatgcataaattttttcccattagaaatcttatctttccaccattatcaaactcattcttaagcttccacgaaatctggtttcagccaaatcaattagactttgggatctgtagaacaattgggaacaaccttttcacgatgccacaaaactattcccagtgaaaaataagtctctctccatgtggaatttgtgattgaatcttaccaaatcacgaatagaattgacctttttttcaatgaaaacccaaattagtcacccgaacctccttaaaattcatcataagtcccaccaaatctaaaatccaccaaatgacttcaagtctatgttcagtggtatagcatgtagatagtgggactgaagcagttaacatttttttgtttttgaggaaatcagcaataacaattctaattcatctctccatgcatgcctttgttaggttacgcaaatcccacacgagaacgctgagttcaccaagaacgcctgcttgtgcatccagatgcttcccttgggtgctaagtatgcttttatgtactttggttgcatggttttagttcagatacgattctgctgcttgttatgtgactgcaacaacaagacttacattttttttagtgcaatcgattatcacagcatattagtcaataagaatctgctcaaatattattattttaagaaaaaaaaaatcagagaaagaaacgatactctggttttagtttggacaacatgcttcctactctggtttcagacatgaagctaaaataaaatgggtatttggtcttttaacccaaaaattgtgttaatcaagtaaaccacaatgtttgagtgttaatttacttattttttctatatctgggtcaagctaggtaaattccagtaaatcaaactagtaaaagttgctttacaaactttatttcacttttctgtatccgattttatctttttttatctttttttatcatgctgatttcaatcattttaaaagatactggaattgtgttagctacttgatctaactatgtttaatatatttacggttcccggatgattgttgatgagatcgtgtttgttatgattaaaactgatcaaatttgttataacctaatttgagtagtactctttatatagcaaaacttgttattttgtggtttaatctcagagtagtatttgattttgctgccttggttgtataatccaaatttattagatacagtttggagcagatctgtacatgcagaagctctttcaggatacatagttacgggttttgacttttataacatttatgtaacatacatcctcatttacatatagtgctaggccaaagctggtaatagtgttatttcttgatggagaagcttcgggttcaaagaaacatattactacaattgatgaatattcccaattgtttggtgaagtaattactctccttcctctttgttttatttattgtatatgttcagtggtatagcatgtaactagtgggactgaagcagttaacatttttttttttggaggaaatcagcaataacaattctagttaatctctccatgcatgcttttcttagattacgcaaatcccacacgagaacgctgagttcaccaagaacgcctgcttgtgcatccagatgcttcccttgggtgctaagtatgcttttatgtactttggttgcatggttttagttgagataagactctgctgcttgttatgtgactgcaacaacaagacttacattttttagtgcaatcaattatcaacgcatattagtcaacaagaatctgctcaaatatttatattaaataaataaaaaaaaaaaaaaaaaaaacagagaaagaaacggtactctggttttagtttggacaacatgcttcctactctggtttcagacatgaagctgactctctatgttctcttttcaaaaacataaccatggttttttagattctactcatgacttctcctcgtctctatctttgtttttattttttttccttatctgcaacttaagccaacattagctacacattgataacatacacaagttcaacacaagatgaaaatggtagagaatttcaatacctcctccatcgatgccatctagaagctttcatcatgctcatgaatatgaagggacctccatgatttggagtagcccgcattctctaatattccacttgatactgcttgttcggaactcaaagacaagctccatcgaagtcacctcctctacttcaacttcaaatgtgtatatatgctctgttaaatatatatctacttcatggacgcttggtgtacactaaactttgagatcattttgtttgtccttgacgttaatccataccaacgtcgaagactcacgaattttatttgcacgtataaccagcctgatacaagcctgaaatctcaaggatgtaggaagaggtgacacattcaacttgattggcaataaacctccagcagtagctcggtgattgaagcatgctggaatttgtgtaccgggtaacatcgcatatctagaagtcgatgtgtgcatgatgaggtctcttgcttcttgattcagtttgaagcagttggcaaactggagacgaatctctggattattaaagcaacaatccattctctcaagagacttacagttatttgcatctatccaagatagggaattggaaagttgtgggagtgataccagattgttgcaatcgtagagtctaagtacacgtaaacgagacattccctttacccatggaggaacttcttgtatatctttgctcaactgcagctccgtgatgatgtcaagggcatgtgggaattccatgaggctttcagagtatgacatttcaaatttagaaagacgagaccacgacgtgaccgacaaaggaacattcaaagtacatcagttcgatcaaagtgcagattttggagaatttgcgatacattcaacacgctccaagcgtacagatgcaggaggtaaactcagatcatcataggacacattgatgctttaatctatctaacacggatcagtttttttacttgaatctcttaggttccaccggatttctacataccggattttgatgaagacgaatgaaacccggatgtactttgtaacaacccgtcccgtgggacccgcccacgtggccactctctgccacgtggcatcccgttggcgctgtagcgcatcgaccctaacctctctccttggaccccaaagcccaccaggtaggttattggtgcgcttggcgttcctcgaacccaagacctcaccttttaacaactttccataggacaagctgcttaacctgaaaattcaatgaaaatattctgaatatcttctaaaaagagttcttaagtccataaaggtcaatctggcacacacgaaaccagaaagtgttcaatcgtcaacagatccaacctgaggaaatcatgctccttgctatcttaagagtgaaagaatgacaaaaagcacaaaccaacaaagctaaagggcaagtgatcaaaacccgaacctgtaccaagacttcccatcccgagcttgtgatctgcaatacgaatgcagcgtggaaggatgatagagccacaggtttggcttgggttttcaagagatctgagatccaatttggaaaaggatcaaaagggattcgaaatattggctcgccattaatggcggaagcttcagcagtcctctcggcaatccaacatgcaattgagcttgggattcgccatcttcacttcgcttcagatttgtcttcactaatcaaagcgctaaattcggagactctctcaaaagaactccatgggattcaatacgatatccttcacctatcctttaattttgatgtactctcatttaattttatctccagagcttcaaacaaagcagcagatgtgcttgctaaggagactctccgtgtatttctttcctcgtcttgaatgagaaaaacgagtgtttgccaaaaaaaaaaagtccagcaaacaacaacaaacacctctaatggtataaaccagaaattaatatccgcattcagcttctccagtctcttaatggaaattaccttctcaaaactttgagctccaccataatatggatcatgaacaaacttgtcattgtgtttcttgcaataagaacacattagcttaacctgaaaattcaatgaaaatctatcaactaaatagagttccaaagtcctgcaaacaaacaccgacggtaccttcttatctgcatcaggcgggaaattccctctcgctttctatacattgtaagccttcaatatatcctctgcaaacatcaaacattcaaactcatattcactacaattctccataactaatcagatctaaccacacaattcctctattaagttaaataaattactatttgttctacgtttgttttgttcatccattgcaagaatgagatcaaactctatgatcttataaagtctgcaaaccattggtaaatcattttaaaaaaaaccctcaagtatcagcagatccattttaaaattctaaactatattattaataaaaacccttacctaagagatttaagtgacaaaaacccttaagtactaatcgatctatttaaaacctctacactattaacaaaactaacccacaaatatttacagatatattttagactcctcaagtaaagatcttttaaccaataaactcacttgtctatagtatcgtcataatcctaaacgactgttatcatataaatattattgtgttttgatttaataaaagatgatgtgtatatcgtcatgttacatcaaaacattctgtaattaaaaagtgggtggaggaaacagattttcagtttggatgcttgttggagacaagggttaaggagaagaaagcggagatattaagaagtaaaatgtttatggattggacagtgataacaaattacgagttcaatccaaggggacgtatatgggtaatgtggagaagtagcacgaggctaactccattttttaaaagtgctcagatgataacttgttcagttaagcttgttgatcgacaagaagagtttttttgctcttttgtttatgcgttgaacacagtagaagaaaggaagaccttgtggcaggaactgaaagatcactacgattcaccaattatccggggaaaaccttggctcatttttggtgatttcaatgaaactttggacatagaggaacactcccatgcggatgtacaccctgcagtaacgtctggtatgaaggatttccaagatacaatgagttattgttctataacagatatgttgtcacatggtccactttacacatggtgtaataagcgggaacatgatctaattctgaaaaaactagatcgggtgctggttaatgatgtgtggctccatgatttcccgcaatcttacacgttttttgaggctggaggatgctcggaccatttgcgaggtataataaacctccatggtggagaagaagacaaaacaaaatgtaggagaccttttaagtttgtcaatgttattgcagaaatggaggagtttaagcctttgattgataactattggaaggaaacagagccgatattcttgtccacttctactcttttccgcttcaacaagaaattaaaggggcttaaacctaagataaaatcgcttgccaaagaaagattaggcaatctggtgcagaaatcaaaagaagcatacgaagtcttatgcaagaaacaagaggaaaatttatctcacccgtcattgcatactatggaagcagagaatgaggcttacacgaggtgggattttgtggctggacttgaggagaagtacctaaagcaaaaatcgaagctgcattggatgcaagtgggagacaaaaataataaaactttccatagagcagtggtagctagagaagcaaaaaaccagatcaaggaaatccaatgttcagatgggagtgtggttaaaggtgacgcagtaaaaaaggaagctgaaatttttttccgagaattcctgcagttcatccccgaagactatctaggttttgagcttaatgagcttcaagatctgctgcctttccggtgttccgagaatgaccaagagatgcttactagtgaggtgtctgcgggagaaattcagagggtcttgttttccatgccgaaagataaatccccaggcccggatggatatactacggatttctatacggcaacatgggatatcatcggacctaaattcacaatggcaatccaatctttttttgctacaggtttccttcctaagggaataaattccactattttgtctctgattccaaagaagttggaagccaaggaaatgaaagattatcgacctatctcatgctgcaacgtcctctacaaggttatttcgaaaatcattgcaaatagattaaaagtgctattgtcagagtttatcgcagggaatcaatcggcgtttataaaggacagattacttattgaaaatctacttctcgctacagaactagtcaaggactaccataaagattcgatctcaagtcgttgtgctatcaaaatagacatctcaaaagcgtttgactcggtccaatggtcttttctcattaatgttctagaggccatgaacttcccacccatgttcatacattggataaagctttgtattactacggcttcgttctcggtccaagttaatggagatcttgtcggttattttcaaagtgctaggggtttacgacagggctgctcattatcgccatatctttttgtaataagcatggacgtcctctctaagatgttggataaggcagcggatgcacgtcggtttggtttccacccgaaatgcaagagcttaggcttaacacatcttagttttgcagacgatttaatggtcttatcggatggcaaagtacgttcagttgagggaatagtggaggtgtttgatgagttctataagcattcagggctgcggattagcatggagaagtcgacgatgtatatggcaggagttccacaaatcgtaagacaagaaattgttgggaaattcccttttgatattgggcatctgcaggtgagatatttaggtctccccctagtcactaaaagactcacggctggggattatgcacctcttattgagcaaattcgaagacgcattgcgtcatggacatctcgttttctctcatttgcaggtcggttaaatttgatacactctatactatgatcagtttttttacttgaatttcttaggttccaccggatttctacataccagattttgatgaagacgaacaaaatccggatgtacgtgtggatcgtaagtatcgataaccaccttcaagtagtctactttagtccctttgttttctcaatgactaatgttatatattgtaaacggtttgaatgtttcagagcgttcacgggataagcagatccagagggatgatgaatatttcgatggagacaacgataacgatgcgtcgtaaaacatcgattcttagaaattgttggttaatttttttgtttagttatgagatttgtaatgatatcaacattttaacggctattggggcaccaaaaccgcttctgattgattccatcttcttcatcttttcgtcttggtgtatatgaatgaagctttttggttcactttctcatcattgtgacttatatagtgatcaaattcgttatatattgtacagtacaatttgcacttgatcaaattcaattttatttttaggcacccttgttagtaaaaaacactaaagattaatagaaaaaatagatttaaaaacgctagtgagaaatacgcagagaattattaagattaaacagaaaaatacatttgaaaagcaaaattcagtgattattaacaaaatctgagaaagaacagaaaaaaaaagatcaaggatatgatttttcttgatcaaaatttgcatcagagtcatggaagttttagatttccaacactgctcaattgagcttcttttatcaatggtgatttaactcatcatttgcaatcagatggatgtatatgtatatatataaatcgagcaacttaagactcgatgttaaataaaaaaacattagaaagaatatacaacgaaaacacaaatgaataaagaaatttagaaaatgataagcaatggggagactgaaaataattgttttcctggtgcagaggtatttattgggggctgcgagagaggtaggttttttttttgttatatagaggtggtcagaatctaagccctagggttaaatttgttaaccatggttaagttaacattataattttagatattccattaaatatatgaaatttttttatagaaaaaggtttggttatttatttatttttttggagtttgaagttttcaagtttgtctgatcaattatttttcgtgtttaggattttcaaatttggaaaatataacataaagtctgaaatgattaaagttgatggagcggacaaaaccgtctatgaattatactttttttttaccattcttaaattagacaaattgttaggaatgtctttccaaaactatcattttttaattctacccattatgtaatctatttttatttatagtcttttaatttttaatgaacactagattttaacctgcggtataccgcggggctatattattttagaaaaaatcaaaatgtaatatgcttaattgattatcattattatataacctattattttgtatttttttgaatataaaaaccttatatatatatatatatatatatatatatatatatataatttagtgtacaattttaggatttaacatgtggtacgacggacaattttttttattagtatagacaataatgttagattttacgatttttttgtgtattaaagttaataattttatatatgtacaattaaagaaactgatgctgataaaatattaaaacaagatttaaaccgtattattacttttggttgatgatattataaatttgtattaatatcgatccaaacccgtcccaccatataactctcgtgagatattactttttataagttttaatatttcaataatctatttcaaaaattaatatttttttgccttttacgtaatgacatattttgtaattcttactaaacaaaataactctacaaaatgtagttcaatttttttaatgtagataatgttataaataaatatttagtttagtcataatttgtgattgatatgtacttgagtttttggactacctgtatttcacgtcatttaatagcctaaattgggtagttttgtaacattatttgaaacaataatattatcttaatatatgtacattttactaactgaaaatatgagattgattctttatattacactgaaaatgaatgattcaaactaaagatcagagtgtaatatagtttagcttaaaaaataattaaaacgattttatttatatatttagtttcctaaattttagtttagattcagaaaataattttttaacttccttagaagatgataaacatatatggaagatttgaatctctattcatatatatttaaaaaatcaataaagtcaatataattaaaggatagattagaagaaattttcttgaatgctaaataattaatttgttatttataaacgaaatattagatgctgtaaaaaacgaaatattaaataaatatggaaagaaaatcataccttaaaagattttgtattactgaaaccgattttttttacagcaaattaaaaccaaaaattaataaatacttatgagaggttttaggaatgataatttttgaagtaatgctagattttttttgaagtaatggtggagttaatatagagagattttaggcaatatttttgttaggtaaatatttgatttaaaatgtcgattgaaaaaaatatattcagtggcattgagtcgtaaataaattccaagtccaagatttatttgttaaaatggctgcaaaaatgtatatgtagattttacccttatttgaaaaagttgaaggttaacaaaataaaataataattttttccgcaaaaaatattccgacaataattttctgccaaaactcttaaaaactcttgtaaatccgactctttaaaaatcttgtatatctttttaaaaccttttataagggttcacaagagttttaaaatagttcaaaaatatttacaaatgttgtaaaatatttataataatttttttgaaaagttaataaatgatttacatatgtttttgaagactttataagagttataaggattttaaaaactcttgtatatgattttaaaaccttttacagtggttttaaaaagacttacaacgatttaatggatgacggtaacaggacgatgaaatttttaaatcgacattaccaagttttaaaaatttatatttacatattttaataagcattaacacaaaattgattaaacaaaatatattgaagcggaatcttgccatataaagtatggttttcaaatttagtaactcataagatcttgacacatgtcaattttatcgataagatgtttacatgtgttatttaagatttaacttttttattctcttataaaaatagaaaacctaaaaaaagaaacaaatttacatttactaaattctatgtctataaattaataaaaatatttatttttacgaacaaaaacaaaaattaacaaatttgtttttatatgtgttattggtcaattaaatttttttagcatgtatcaaatataaaacaaaatcatttagtatggatattaactaattaaaaagaacattgaagtttcaaataacaaaataatttaattaacattatattaattgatttcaattgtatttatcaatgtaatataatatttttatttgaatacttagagagaatattagtatattcatacttgtcttagtctaagaatttcaacgcatgttgtcattagtgaaaacaccaaaaattaggaaaatatggtttagagggattgatttttaattatttaataaatttgatgtcatttaaattagtttgacattaggtaaaactaacttatgagattatggcatatagcaaaattatatcttaacaatgtttcctttccaaaatattttttgaattattcatttttgttttgtttattatgttttgttatttgttagttattttaatatgagctaatatatagatttgatatgatatacatattatgttgatacaacacttaatcttaatatacattctttactccgaggattattgataattcatttctatttatctttttcaccagctgtatacattctcccccttatgttggaatagctgactatataatatgatagtcttcaaaacgagcggtatataaattcttctagaataaattagttatcattcatatccaacatgtattcttatcctcctttgagggttcatctctgcgtgctgtggtggagcacttttcacattcaaagcttttagatgaaaactatttggtttctgacccaaaaccaataataatggggaaaactattaattattcattggcttgatgcgtatcgatgttactaaaccattttgtgtatgaacatgaatttcaaaatgttaaacacttatcccaacggatatccaataatggttattataaataaacactgaaatactcttgtactttaatcaagaaagtaatctcgcaaactttatgttgcgggtttataacaaggataaatatgaccttcttgtcgatgcaacaatcgagtcaatgcgtccattgaatcgatgcatcttttataaccattaggtatctaaatgtcatatagtgagtgatcaacccataatcatctccttgtatatacttacgaatagataaagtccaaattacttatactggtaaaaatcacattatcatattgctttctgagcaagtaacatttgataaatcattaaggagaatcttctggtttttcacctaatgtccacataattctcaatactttcacatcatcattaaaccaggatgaccaatccggttaagccaaatatactcttgaaacttttaattcttttaaaacttctagttctttcaaaacttctaatttacttttcattgcttatcagttactcccttaattagatcttataatcaaaattacttccatgtattttaataatcaatcatatgttaataaaacaataacgagataataattaaaattttagattctaatataaacgatactaaatttaatttgactagctatgtaagatcttatattcacttcagaatatgagtattacttatcatcaataactcatataaatttctttcaaatattgtgtctacaggacaacgatacttgcgtaaaagtttaatcgtctgttttaccatctccgcatcagagatattctcttaacaatgtgagttatattcaaaaagagacttcaagtcttgaagttttagtaataactaattataatttattttatctaataacacattcatataagaattgcttcatacaacttttagatctttagtagtcaaagattgaacataatcttctggatatgtcacttattatccattcattacttctccttctcgagatgatgaaacttcaagttcatccatctcgtattgaattccactctagaatcataatgtatttatatctcatcatattaactttgagatttggagaactataccgcatcgataattttaattttgtattcccatagaaaacaatgtatatgctcttctagagtcttttaataagattttatactacttgatatactagattatttcatcgttagaattttttttttttttttttttttttctcaacttctgatgataatttaagttcttgaaaaaaaaactttgaccatcaaaaatatgatatcttcttaagatacattaaactagtcattcatgaaaatttctataagtgattatacctttaaattaagttatttatcaatcaatttattttataaaataatcaagtattatatactaatacaattttaatgcaatattgtaaaaccaatcagaataaaactattttgtgcaaaatctggattttacatatatcttgaaaaaacttttatttagggtaatatgaatgcgtgcaagatttgggtaaaatgatttcgtgcaaaattagggcaaaaccatgaacaatttttttttttttttttatttagataccacaaagatttagagaaaaaaatcttataaaaagaaaaattatcttggaacgtttttagtaaaaataataataacacaatcaaatatatgaaaatcttataaaaagatttagataataataacacaaagatttagatatatggaatcttataaaaaaaaaattattttgcaacatttttagtaaaaataataataacacaatcaaatatatggaaatcaaatatttaatatggaaaagtcaatatctaaaagtgataagatatgtataacgttttaatcaaaagagttaaataagggatatcatatcaatcataaatggattttagacaatataatatttataaaatgatattgaatatagatgcaactattcaaaactggaatgctaaaacattaatacatgcttgcatcacccaccaccggggtatgaatagttacaaaattagttatataattataaaattggtaatttatatattcaatattgtaatagtaaatcacaaaaattaacaattaacaagcatgattctcttctttaacgattttctttgtagaatcattgaatcatgcgatagtaattatagaaacaaatgataagcatgattctcttctttattgaatcattgaaaacatgcttttaccgatctatactataatcatcgatcggctcatattgttttgtttcaataatagaaaataagtactatgaaccatgagtcgataaataaacatggttcttaaaaaaaaatgtaagaatctctatatctaccttttagagcgtgctgataacgtgttataaacagagaaagagatagaagatatgagtgtattattccattgagataaagggttctttatataggagtacaaggaaagggtaaaaccctagaaacatctagatgatgggcttagatgatgggccttataatgggcatccatttttattcataacacatgcatatctttttttgtttgttaattagttacaaatacgaggaattaccgatcgagacccttatatcgattcgctgggatataagatcccttctaaccaagaatcaaactatgggtcaatcttctcgctcccaacaaagagtctcacaaccactagaccaatgtttagttagtagagccaacacattattttgtacttattacaaaacaatttaggtagtgattaacaaattactaaaagaactatcattttattagaaatattaataatacaaattaccattacatgaaaaaaaatatctaaggattgaaaaaattgtgattaaaaaatgcctattaatttgcatgtcatcttaagtataatacggtagtagaaacgcataggaaataaaatcccaaaacaaacttcgggaagaccgagtagaataatgcaacattcttgttttatatctttcacaatgccttgtttcactgcctctacacaatctggaatttttcttgcgtcagccacacaagacaatggatttggaagcaacccttgttctgacattggagccatagccaaatcattattacctttcgtatcagaaagtgatagtattacaaccatcactgttaagatagacgcacacactctttgtatgttctcacccattgttaaatgtttgtataacttgtattttatcttgtgatgctactatgacatattgtttatagtaattatatatcttgtacggttatgaatttttttgatgaaatatatatattgcctttttcatagattgtatacatgtatcatgtatgtgttagttgtccttgaacattgtatgttcttgagaataagaatactatgtatgtaatcaaaataagaagaatagaatgtaatgcacgagctttttgttttggggtcaaaagtattgtgttagattattttacttttctctctttaattcgtatttaattgttatcaaataattaaaaccaaaaaatgttttaatctataaattgtcaaaagactttgtgttgttttcaatagaaaataaaaactgtatattagtttttattattttcaatcataaataaacaaaaatttgaaaaatatttaaccaaatgatatagaaagaaattaaaaaatagttctagaggcaataaaatgaaatttaagtaatacattttatctggacaaatttttttctcccagacccagttatcgagaagcttctctcgaatatgttttctgacgccggcggaggcgcaaatcgtcggcgtcgggacttagctcttccgatcaatttgctttggttacttcttatgcttttgtttacaacttctgtccgctactcgaaaactctgtttcaaccctctcgaatcatttctccttcaccggttttcaacggcggccaaaaaaccagctacggaggaagacgatgtggtccggcgtttgccctcctgttccaccctcttctcgcaaattcttcgccaaaatctttcttttccagcgatgcaatccctcaatcagaagcttttatcatctctccgccttttatttacagatctagatctgtttcaaccaccccaagagaatactcacaccggaattcgttgatggcaagagatgtctcttggaccgtcagatgcgccatctccggtggagtcgtcgtcggcgcacgacgttttcttcttatgggtgatggttccatggctctccgacaagcttccaaagcagctgcacgcttcaccgacgagggagacaacaaaagccaaaaccctaattgcaaatgtgggctcctctttgaagatgggcctctcttttcatggcccaataagatatctacttcggcccaattctgattttttgggtcaaacctaattaacttttggcccaggtccgttttctttattcttttggcaaaccctattttatttaagtcttctaactttgctgagaagaatggtcgtggactccattcttgcattgttatgacattgatagatagggttgttcaaattcatctaataatcctggtggaagatatctttaatgttgtcaatcgtggtaatccatctaagaaacctgtgatacaaccttcctctttaatagagagaacctttgcttggtctccgaccactttgttgcaaaatcatctatggaccttaaccatctttttagaagccgtgtgtaccaatccgagaatatctatggttaaggctttcctttcaacgtcactatgcctttattggaacgtgaccaatcatcaatctcccaaaatcttcgtggaattgtcttcgactcaccaatctctcgcttgtggcaagctacgatcaagttcttgtctccgatatttggatcttccgtcgaattatcgtatgttctaaataacaagtattagtcacttatggtgggtcactaatttgccaagtaagttgtgaaaccattgacggtcacctatttgcgtcaagttaatagcggtaattttgtaattgtctcttatctattgcaagtttgtgtttgcaacaatttcggtcgttgctttaaccttgttttattattggttctagcttctatgttagactcggagagtattcttgtccatctcagtacaagtaacctatggttaatagataactaatttatgtttagacagttgatatataaatagcttttaaaagataaaatttgaaaccatgatattaaccatacataaaactactaacctgaaacttaaaccagaaaacattctgttcatatataagtttgtacatttgaaaacttttagaattttgttttccttttttatcaccgaagtactgtacatgcatataatcataaattattcaagggtgttattagtagatagccaaatttgacatcataattaagaaaataactatacgtcagaaatgttaggtaaatgactctttttatggggggctattgtctaaatagaaacttatttgacaaaaaatttgaaattaggcatttatcaactgggcttacaagaataagcattttcaagtattttaattgacgatgttgcccctgtgttttactccttcttctttcttcttctttcttcttctttcttcttctttttcaccgttcttcttctgcttttttttccttcttttactccagaaactttaaatgggttttgatcattcaaaattaatagaactcaaacaagatatgatatgtatcttttaaggcgatcttcgttttcgatttgtggtaatgaaaaaaagaaaataattttggttttaaatagttgattctcttgagatgaattcaatggatccaattaaacaagctttcatagagaaaatttaaactctagaagataatatatatgaaacccaagagttctaatcttagattctcgtcaaatcaaatttggatccaattaaacaagttttcatagtagaaatctaaaccctagaagataatatatatagaacccaattgttctaatttgagattcttattaaatcaaatttttgatggtaaagagaagaagaagatgagcttcgccaccattgaagagaaaacacacgctcgtggatcatgatattgttttgttttcagatttgcttttttttcgatgggatttgctttatattggaaagggtaaaatcgtaaaagtgaagagatagaagtacttaaatttgtaaggcatatgagatatgccttttttgacaaagacatagacttaattgtgtcaatcccataattgatccctttttatggtggggtaagggtgagtaaaagaccaattaaccttctgaaattatagattttacaaaatgatatatctactttgtaagttgttgtaaaaattcggtgaagaaaaatagctctaacggtggaagcggtacaatagtcttggaaccatgatgaatgtggtatagaagtgatggtggttttagaggaagcagtagtggtgaaagattgggggaggaaaaatagataccatggtggaagtgatacgaatgaaagtgatgaggaggttaagaaagtggccgtaatgaagaaccgaatgttataaatttggtaaaggcagtggtggttgatgttgatatgatgatgatgggtgcagagaaagtgatgatggagaagatcaaaccaaagataaagatctttagtggtggagatcaagaaaaaagaaaaaaaaaaaaaaaaaaaacatgagaattcgaaaaattacatgtgattacgtaaaaatacatataattttgttgaatcttgtgaaatgttgataaatatatagagatttgttttaatagcatgtttttcaaaaatgttacttgtattttttaatatatttttggttaatagaactgttataaaatatgacaattctaaaaaacacgcttttaagtaaaaataacatatatctaaaagaaaagtatatatattttgttgaataacatgaaaattatctaaaaatacatgggattttgttaaatctcatgaaatattgataaatataaagaaatttgttttactagcatgttttccaaaaatactacttgtatttttcatacagatttggatctaagaaatcgatttatgagtcatagattcgtatggtaattgtagaacatgaagatgggttacgaagaatatcaaaatcagagagaaataaaagaatatggaagtgaaagagatatgcaagagtagaaagagacatgtggctcttgaaatcaatggaggtggaagaaaattgaaaattctaaatgactaaaaagattagtgaatttttctttagagctctattgcaatgtcagaggaaacaaggattgtagtggcggtggagttgagggtggtgttgatgatgatggtgccatggtggaaagatcaagtttgaggtttaataatggtggtgagagaaagataaacaaaaaagagaaagagtgaatggaggttatatatgtcattttctctatctctccgacatggttctgtagatcatagttagtttcttctttgttttcaagtcaaatgttagttaatgcatatactcattattcaatggtattctaacatgtttaactttaacctataaatacttacaataaagatctatttgatattattcttttgacaccttaaaactgagaaaaaaataatctcataatgatttacaaaaaaaaacaaatgatacaaagtgatatagtcttaaaaaatatataataatgaacatacatcactagtaatttgttagaaatcttagacaatatatattttaaagaaaaatagataataaagggccaaaaaatatcaatgcatgtctttttttgttaattaattacaaatccaaggaattattggtcgagattcatatatctcttcaccgggatataagatccctccgaaccaacaattaaaccagggatcaatcttctcgctcccaacaatagagtcggacaactactacaccaatgtttagttagtagatccaacacatattattttgtacttataacattggatgtactaactaaacattggtctagtagttgtccaatcataaataaataaaaaatgttgaaaacatttaaccaaattatatagaaagaaccaaattatatagaaagaaataaaataaaaagtattagcttcaggagttcacatcctttccagcatgaaaaaacataacccagaagaaaagctcaccgtccgccgacgacgtctccaccgggtaaggtatttctgaaggtttaagagtaaaatctcctgccatcaaataagctcggtgaaaaggttcttcagggttgaatagttttacaaaagtcggaaacttttgggcaacaagatctgccgagagaaaaggaagaagcgtgatttttcagatcccaaatctttccttcttcgtttcttattaaaaagcagcctgtatatatgccatgcaattgatataaagtgttcaaaaaagtttggtaaagattaaaccgagaaatgtttttgataaaaacatcaaaaacagaataataaagaaaacaattaaggaaaagatgcgatgtcgaagtgaaatgcagatgggatcccaaagccggtaagcaaaaacttcaccgatgccggaaaaaatgtttagtaaaggtgttttggtagtcgtgtctgaaaggttttttggaagcctctctaaatattataaaaaaaaaaaaaacataacgattttgttaattataatttaacagtaaataaataaattttgactaatgtactttgtttttttttgtgcaaacatagttgtattcattcaaacccaagaaagcctcttccactttaataacggtacttaataacgttttttaatatatggttggatcgatcaatgtcatggacaatagcattcccctatgctgatcaattacttgtgatatttaatttgttgccttccaaatgatttatttactttacgtatatagtatgaggggatatattgtattgcgatgggtagttttataattctcggacatttaaacatttttcatcgccttcttttttgataactaaaacctttctcatcttgtaacatccctaaggaaaaagtaacatcaaaaacgtaaaagagtagctgggagaagttggttctacttattaaatttatgtatctctcttaaggaataaagctatggttcacattcgagagactacgaatcaaaaaatcaataatttttatttattgaaaagaaattgaaaatggtcattaaataatcataataatagagagtttgataataaccctgaaaattcaaaatctaaagttgatcaccaaaaaaaagaaaagaaaaagtgagccaaaatgtcatgataggaaaacaaaaaaaaagtatgaaaaaaaaataaaaaaatctgacttgcatgttatcagaaaagcatgaatccttcacttcactatacaattcttaatcaatatctctcaattttcaacagaaaataaattactcatcccaactatataatggccaaattgtctcacgcacatgcaaattccatttacaaatcaattcaattagacaagtactatatgaaactttgaataattgtatcaatggttcaaaatttcaaaatcaatgtgaagataaggtatctaataataacattcaaaatcatgatgagagtattatttcataaacatttctctaagacaatgaaatcaacaagaactctcaactcgaaggcgttgaggcctacttcctctagctccggcatcgtctcctgagtcagccattaacgcagctcgagcagagacaatctggctagacgtaaaagcagcgtcgaaggtcgaaaaatccatccatcccataagcaatccttcttttccccaactatccggtataggaacttttccggcaacctcttctctatgtctctttagcctatcacgtcctgacaacaccgttgtttccgggaaacatgtctttgtacctgtcttgttttgtttccggtgagaagatcctggagagattggttccttggtttcttcaggcaaattggtgttcttcattttgaactcttttctttatttttacttttgtagtagagatttttattggcttcgacgtgtgtgttgtatatataaaaatgttgagatttagagagaaataatagaaagaagaaaaataatatacaaggttgaaaacgaaggagagtgtgacagagatttgtggtggccgtgtcttcttgtaggatcacatataatagtaataccattatatggtcgttgacgtttctacgtctcatggcatgtttggtttttccttcaccggttatctagacccggcatgagcatctaacgtctagtcgaagtatagatgaccgcttaaaccgctttgtagaacatgcataaatgttatacacatagaattcactgatttttattttatttttgtgagttctttatttatttgatgagttagctacattttaacataatctgttatttatagacatcacatacataatttatagagttcgattggtaatatagtttacacataacggtttagagcttctttagtggttgttgaaaaaacggttagaaacaatgttagataaaaggcggttaagttaaaaccaagcagctaaatttttggtaattgataagaagtggttgaatactaaaaaagttataatataaaataaattaaaatataaataaattccagaaattttttatttctattttaaaaaattcctttagataatagtataagagaatattaatatttaaaattttaaaaattaaaatatataagaaaaagtccaagcatttcattgccaaacaaattaccttaatctttataggtggcgggcaacaatctcttcaacccactatttccaactgcttcttctaatcgctattgatcggaattttaaaagcggtttgtttgcgaagcggttaaagattactaatcaaactcaaatcaatcaatttgttgtagcattttagttatatattcattatttttgcccccttcccctctaaaagaaaaaggttatacattcattattatttacttattattgacttagaaaatatttatttatttaatatcagaagaaaagatatatatatatatatttaattgatatgtgtggttttgctacatcctagatatttttttgggtctctcttctcagatctttcgttatttccactttgggaagaaaacaacgtagcaagaagaatcaattttggctctcctttacgtcacaactcacacgcaatgaaaggcacatctttatttttttccacaccagtcaaattgattaattgtgaagattcagaacataaatattcgtcacacatttctcaaaaaaaagaaaagaaatcagcatacatgaggagaacgtttcatatttgatagtttatccgctgtttaatacatgatcaagaaaaataaaatcaaataatgaataaacccaaccaaaaaaaacaatattttgactaacgtaatccattatcaaaccaaccattttttttttttttgttaactctaatttaatttgaagaaaaatcatatttatttttctttaattctctgtgttgattggccccatgtaaatttaaagcatcaaaatcaaaaggttgcgtcaacttcaattcatttgtaagccacaaaacaagatatattgcaacttgctaaagcaaatttactgtccactcatgttgtgatcatactcataatttctttttgtctactgaaagcaaatttatgaaaactgaccatttttttttttaaaaaggagaaactaggttaccgacaataattttcttgtaatgaacctagttatattgaccatcctaattagaggctcttaattgataactctcttgggcacgattattgaggcaactctcccttatcctacaatgatcacatgtacttggtcatatgtgagtagtctcatcaagaagttttagggactccaaagggaatgaccatctaaacactttttttttggtaaaaagtgaaattttatagcattttagtttttgacagacgcttacaaagacaaatgagaagcagaaaaaagatcgaaaaactacaaaggaagaagaagaaggaataacaaacacaaacaactactaaaccggaaaaacaaggaagacctgagacgaaaagaaccaccatctaaacacctttctatgtatttctcttgatatgattcaaatttgttgtctatctttatttgttcttaaagccttagatgaattaggctaattcacctattgtcaaagctt

SEQ ID NO: 1353 - DNA, 107027 bp, Arabidopsis thaliana
gaattcgttgatggcaagagatgtctcttggaccgtcagatgcgccatctccggtggagtcgtcgtcggcgcacgacgttttcttcttatgggtgatggttccatggctctccgacaagcttccaaagcagctgcacgcttcaccgacgagggagacaacaaaagccaaaaccctaattgcaaatgtgggctcctctttgaagatgggcctctcttttcatggcccaataagatatctacttcggcccaattctgattttttgggtcaaacctaattaacttttggcccaggtccgttttctttattcttttggcaaaccctattttatttaagtcttctaactttgctgagaagaatggtcgtggactccattcttgcattgttatgacattgatagatagggttgttcaaattcatctaataatcctggtggaagatatctttaatgttgtcaatcgtggtaatccatctaagaaacctgtgatacaaccttcctctttaatagagagaacctttgcttggtctccgaccactttgttgcaaaatcatctatggaccttaaccatctttttagaagccgtgtgtaccaatccgagaatatctatggttaaggctttcctttcaacgtcactatgcctttattggaacgtgaccaatcatcaatctcccaaaatcttcgtggaattgtcttcgactcaccaatctctcgcttgtggcaagctacgatcaagttcttgtctccgatatttggatcttccgtcgaattatcgtatgttctaaataacaagtattagtcacttatggtgggtcactaatttgccaagtaagttgtgaaaccattgacggtcacctatttgcgtcaagttaatagcggtaattttgtaattgtctcttatctattgcaagtttgtgtttgcaacaatttcggtcgttgctttaaccttgttttattattggttctagcttctatgttagactcggagagtattcttgtccatctcagtacaagtaacctatggttaatagataactaatttatgtttagacagttgatatataaatagcttttaaaagataaaatttgaaaccatgatattaaccatacataaaactactaacctgaaacttaaaccagaaaacattctgttcatatataagtttgtacatttgaaaacttttagaattttgttttccttttttatcaccgaagtactgtacatgcatataatcataaattattcaagggtgttattagtagatagccaaatttgacatcataattaagaaaataactatacgtcagaaatgttaggtaaatgactctttttatggggggctattgtctaaatagaaacttatttgacaaaaaatttgaaattaggcatttatcaactgggcttacaagaataagcattttcaagtattttaattgacgatgttgcccctgtgttttactccttcttctttcttcttctttcttcttctttcttcttctttttcaccgttcttcttctgcttttttttccttcttttactccagaaactttaaatgggttttgatcattcaaaattaatagaactcaaacaagatatgatatgtatcttttaaggcgatcttcgttttcgatttgtggtaatgaaaaaaagaaaataattttggttttaaatagttgattctcttgagatgaattcaatggatccaattaaacaagctttcatagagaaaatttaaactctagaagataatatatatgaaacccaagagttctaatcttagattctcgtcaaatcaaatttggatccaattaaacaagttttcatagtagaaatctaaaccctagaagataatatatatagaacccaattgttctaatttgagattcttattaaatcaaatttttgatggtaaagagaagaagaagatgagcttcgccaccattgaagagaaaacacacgctcgtggatcatgatattgttttgttttcagatttgcttttttttcgatgggatttgctttatattggaaagggtaaaatcgtaaaagtgaagagatagaagtacttaaatttgtaaggcatatgagatatgccttttttgacaaagacatagacttaattgtgtcaatcccataattgatccctttttatggtggggtaagggtgagtaaaagaccaattaaccttctgaaattatagattttacaaaatgatatatctactttgtaagttgttgtaaaaattcggtgaagaaaaatagctctaacggtggaagcggtacaatagtcttggaaccatgatgaatgtggtatagaagtgatggtggttttagaggaagcagtagtggtgaaagattgggggaggaaaaatagataccatggtggaagtgatacgaatgaaagtgatgaggaggttaagaaagtggccgtaatgaagaaccgaatgttataaatttggtaaaggcagtggtggttgatgttgatatgatgatgatgggtgcagagaaagtgatgatggagaagatcaaaccaaagataaagatctttagtggtggagatcaagaaaaaagaaaaaaaaaaaaaaaaaaaacatgagaattcgaaaaattacatgtgattacgtaaaaatacatataattttgttgaatcttgtgaaatgttgataaatatatagagatttgttttaatagcatgtttttcaaaaatgttacttgtattttttaatatatttttggttaatagaactgttataaaatatgacaattctaaaaaacacgcttttaagtaaaaataacatatatctaaaagaaaagtatatatattttgttgaataacatgaaaattatctaaaaatacatgggattttgttaaatctcatgaaatattgataaatataaagaaatttgttttactagcatgttttccaaaaatactacttgtatttttcatacagatttggatctaagaaatcgatttatgagtcatagattcgtatggtaattgtagaacatgaagatgggttacgaagaatatcaaaatcagagagaaataaaagaatatggaagtgaaagagatatgcaagagtagaaagagacatgtggctcttgaaatcaatggaggtggaagaaaattgaaaattctaaatgactaaaaagattagtgaatttttctttagagctctattgcaatgtcagaggaaacaaggattgtagtggcggtggagttgagggtggtgttgatgatgatggtgccatggtggaaagatcaagtttgaggtttaataatggtggtgagagaaagataaacaaaaaagagaaagagtgaatggaggttatatatgtcattttctctatctctccgacatggttctgtagatcatagttagtttcttctttgttttcaagtcaaatgttagttaatgcatatactcattattcaatggtattctaacatgtttaactttaacctataaatacttacaataaagatctatttgatattattcttttgacaccttaaaactgagaaaaaaataatctcataatgatttacaaaaaaaaacaaatgatacaaagtgatatagtcttaaaaaatatataataatgaacatacatcactagtaatttgttagaaatcttagacaatatatattttaaagaaaaatagataataaagggccaaaaaatatcaatgcatgtctttttttgttaattaattacaaatccaaggaattattggtcgagattcatatatctcttcaccgggatataagatccctccgaaccaacaattaaaccagggatcaatcttctcgctcccaacaatagagtcggacaactactacaccaatgtttagttagtagatccaacacatattattttgtacttataacattggatgtactaactaaacattggtctagtagttgtccaatcataaataaataaaaaatgttgaaaacatttaaccaaattatatagaaagaaccaaattatatagaaagaaataaaataaaaagtattagcttcaggagttcacatcctttccagcatgaaaaaacataacccagaagaaaagctcaccgtccgccgacgacgtctccaccgggtaaggtatttctgaaggtttaagagtaaaatctcctgccatcaaataagctcggtgaaaaggttcttcagggttgaatagttttacaaaagtcggaaacttttgggcaacaagatctgccgagagaaaaggaagaagcgtgatttttcagatcccaaatctttccttcttcgtttcttattaaaaagcagcctgtatatatgccatgcaattgatataaagtgttcaaaaaagtttggtaaagattaaaccgagaaatgtttttgataaaaacatcaaaaacagaataataaagaaaacaattaaggaaaagatgcgatgtcgaagtgaaatgcagatgggatcccaaagccggtaagcaaaaacttcaccgatgccggaaaaaatgtttagtaaaggtgttttggtagtcgtgtctgaaaggttttttggaagcctctctaaatattataaaaaaaaaaaaaacataacgattttgttaattataatttaacagtaaataaataaattttgactaatgtactttgtttttttttgtgcaaacatagttgtattcattcaaacccaagaaagcctcttccactttaataacggtacttaataacgttttttaatatatggttggatcgatcaatgtcatggacaatagcattcccctatgctgatcaattacttgtgatatttaatttgttgccttccaaatgatttatttactttacgtatatagtatgaggggatatattgtattgcgatgggtagttttataattctcggacatttaaacatttttcatcgccttcttttttgataactaaaacctttctcatcttgtaacatccctaaggaaaaagtaacatcaaaaacgtaaaagagtagctgggagaagttggttctacttattaaatttatgtatctctcttaaggaataaagctatggttcacattcgagagactacgaatcaaaaaatcaataatttttatttattgaaaagaaattgaaaatggtcattaaataatcataataatagagagtttgataataaccctgaaaattcaaaatctaaagttgatcaccaaaaaaaagaaaagaaaaagtgagccaaaatgtcatgataggaaaacaaaaaaaaagtatgaaaaaaaaataaaaaaatctgacttgcatgttatcagaaaagcatgaatccttcacttcactatacaattcttaatcaatatctctcaattttcaacagaaaataaattactcatcccaactatataatggccaaattgtctcacgcacatgcaaattccatttacaaatcaattcaattagacaagtactatatgaaactttgaataattgtatcaatggttcaaaatttcaaaatcaatgtgaagataaggtatctaataataacattcaaaatcatgatgagagtattatttcataaacatttctctaagacaatgaaatcaacaagaactctcaactcgaaggcgttgaggcctacttcctctagctccggcatcgtctcctgagtcagccattaacgcagctcgagcagagacaatctggctagacgtaaaagcagcgtcgaaggtcgaaaaatccatccatcccataagcaatccttcttttccccaactatccggtataggaacttttccggcaacctcttctctatgtctctttagcctatcacgtcctgacaacaccgttgtttccgggaaacatgtctttgtacctgtcttgttttgtttccggtgagaagatcctggagagattggttccttggtttcttcaggcaaattggtgttcttcattttgaactcttttctttatttttacttttgtagtagagatttttattggcttcgacgtgtgtgttgtatatataaaaatgttgagatttagagagaaataatagaaagaagaaaaataatatacaaggttgaaaacgaaggagagtgtgacagagatttgtggtggccgtgtcttcttgtaggatcacatataatagtaataccattatatggtcgttgacgtttctacgtctcatggcatgtttggtttttccttcaccggttatctagacccggcatgagcatctaacgtctagtcgaagtatagatgaccgcttaaaccgctttgtagaacatgcataaatgttatacacatagaattcactgatttttattttatttttgtgagttctttatttatttgatgagttagctacattttaacataatctgttatttatagacatcacatacataatttatagagttcgattggtaatatagtttacacataacggtttagagcttctttagtggttgttgaaaaaacggttagaaacaatgttagataaaaggcggttaagttaaaaccaagcagctaaatttttggtaattgataagaagtggttgaatactaaaaaagttataatataaaataaattaaaatataaataaattccagaaattttttatttctattttaaaaaattcctttagataatagtataagagaatattaatatttaaaattttaaaaattaaaatatataagaaaaagtccaagcatttcattgccaaacaaattaccttaatctttataggtggcgggcaacaatctcttcaacccactatttccaactgcttcttctaatcgctattgatcggaattttaaaagcggtttgtttgcgaagcggttaaagattactaatcaaactcaaatcaatcaatttgttgtagcattttagttatatattcattatttttgcccccttcccctctaaaagaaaaaggttatacattcattattatttacttattattgacttagaaaatatttatttatttaatatcagaagaaaagatatatatatatatatttaattgatatgtgtggttttgctacatcctagatatttttttgggtctctcttctcagatctttcgttatttccactttgggaagaaaacaacgtagcaagaagaatcaattttggctctcctttacgtcacaactcacacgcaatgaaaggcacatctttatttttttccacaccagtcaaattgattaattgtgaagattcagaacataaatattcgtcacacatttctcaaaaaaaagaaaagaaatcagcatacatgaggagaacgtttcatatttgatagtttatccgctgtttaatacatgatcaagaaaaataaaatcaaataatgaataaacccaaccaaaaaaaacaatattttgactaacgtaatccattatcaaaccaaccattttttttttttttgttaactctaatttaatttgaagaaaaatcatatttatttttctttaattctctgtgttgattggccccatgtaaatttaaagcatcaaaatcaaaaggttgcgtcaacttcaattcatttgtaagccacaaaacaagatatattgcaacttgctaaagcaaatttactgtccactcatgttgtgatcatactcataatttctttttgtctactgaaagcaaatttatgaaaactgaccatttttttttttaaaaaggagaaactaggttaccgacaataattttcttgtaatgaacctagttatattgaccatcctaattagaggctcttaattgataactctcttgggcacgattattgaggcaactctcccttatcctacaatgatcacatgtacttggtcatatgtgagtagtctcatcaagaagttttagggactccaaagggaatgaccatctaaacactttttttttggtaaaaagtgaaattttatagcattttagtttttgacagacgcttacaaagacaaatgagaagcagaaaaaagatcgaaaaactacaaaggaagaagaagaaggaataacaaacacaaacaactactaaaccggaaaaacaaggaagacctgagacgaaaagaaccaccatctaaacacctttctatgtatttctcttgatatgattcaaatttgttgtctatctttatttgttcttaaagccttagatgaattaggctaattcacctattgtcaaagcttctttaagcaacctagccacaagttgttgttatcaagctttgtgaatttattagattcttttctcaatgcttgattaaattatttagaacaagtctagccaatgtttatggatttctatagtctcttcatatgaattatcactaaaacgccattagagtaattcataatagaaatctgatttgtattttcttttatgatattttgttcttttgtttatattctatatctataatttatttattttgtttttacaaacttcacatgtgttcctacaactctctattattctactttagttttcataatagttgtcattttagattttcaatgtaaatatttagtacaaattccaattatatcctcattgttctagtgtgttaaccactaaaaatattagaaaatacattaaacaagggtatagtaaaaaaatttagttgttttattaattcgtgtacaaaaaccttaaacgactaactattttaaaacagaaaaaaaatattataacatatgttttttttgcctctatgtattcgatccttaaatactacagcgtttatttgtgcacttgcctaaaagttatagatgaatcaatggggaggatagctagagtgccataaatccattgaacttgatatcagcagctttcaatttctcgtgagtgtattgaaatgtttggtaagaattgcaagaatcttcaggttaggaaaccgaattatgtggatcctatatttactttggggaatattgatgcttttacaaattcgagatacatgcaacatgttaagcacctggaacttcgattcaacacattgactgataagggtttgcctctatttataaacaatgtttaaatctagagtatctcgacttgttcgggtgtccaaacttgacgatggatgccacactagctatgtgcgtttgggtattcgtttgggtttggattagttattttcggttttcgggttaagaggtatgggaacgggtttagattacccataattcctaataatcaaaaaaatttataactaaatctatcaaaatatgcaaatatctaaaaacattgaataatgtttacctaaacattgaataatgtttacctaaacattgaataatgtttacctaaaatagattaaataccctaaaatatttaaaatatctaaaaatctaaatattttggacaattaggttattacaaatataaatattattactatatatttaaattgtcggtatgtttgagaacctgtttgggttcatgtttgggtttttgggtttggaagtctagaatctgtatgagtatttcttaatttagggttcgggctcagatcagattttttggatcgggttcggatcggatgctcgagtttggatattgtgcccattcttaatagatggtgttgttagcggtatctcgagtttgaagaatttgaaggagatcaaaaagccaaaatttatagctttattttatcttgatctcttatagttttgtgttaatactattttcttgccttggttgaatttgaaaatgctagttaaattcttcttctgggcattcctttatatcttcttgtaattggtttttaattttacaacaaaactaaaatgttacaaatttaacaaatttgtaagaaaatgattgtgttctactttctttgtttcacaaaagtttatctttattgactaaattttctcttttacatatattattgtcttagaagtataatgtaacttttggtaaaataaactaattatctcttgttgaattaatacaaaatccagaaaagacaaattgatacaggttcaactcaattttctaccactacacacaatatcatcaaaagaagatgaaaaaatactcaacgcaagataataagagaggttgtttaagcccattggcatagtaatcaaggattgaaaggcttttattctagatatagggtttgattaccaaagaaggtctaataaaaaaattcagaatgctgcagaaccgtcagtcgtgttctcgagtgttagatgtaagattgttcatcgctggtatggtgcaaggaacaatcgtcaatagatgatccaagtgttgtggggtgagatgctggtatggtgcaaggaagaaccgtcaatagatgatccaattgttgtggggagagatgcacgtcgtggatgttgcaacttttttgacataatagtttttcggtaactttccagccaaatttcgtttaaacggttaaacggaattgtcgggttgttagtgcaatggaaggctggtaaagagtactacaagatggtatactcatacgttaaaaacgaagttgtattgaatgagaaataagggtgtgaagtgggaaacttggaccaaaccggaccgaaccaaatcgaaccgaacttggctgagcccgattgcgggttagcgaattgtcacgtcgtcgactcgaggactgtcgggtttgtggaccgttatgcttgtgagttattgggcttgttgggttgaatcttacgaaaatactccatattctcaaaatattccatatcctgagaatattctcacaaatcctacctctctctactatatataaagagaccaagtctctcattatttctcacaaacacaaaacactctaagttttaaagtctcgcttctctcttgcttcttaaaagtaagtttttattttagtagtttcgaaaacatatcgtagattaagttcgcttgagttatagtgtgtttgggtattagttcgtgatcggttgtatcctgggatatataaatcgtgatcgatcatcatgtgtaataaaattgtttcaaaatatctttgaagataatatagcagacgaccaaaacaaaaacaaaaaaaggttcaataactataatgtggtctttgttttgtggcttctggaaatgatgtaagggcatttttcagaaaattactatgtgagaatcaagaagtggagatgaaatatttccagcttgtgtatacagaaataattcggtatgttgtataacatgtgcttaaagcaagtggtgtattctaatatcttcaaaattttcatctacactcacagtctaacacatgattaaaattatcggattaaacgatgtaatttcagcatcggagaaagatgaagaaaacatagaaactaaatctggcgattatgatttatgagtatatataaaaagaaatgatcctatatacacaaattccatgtttgtctcaaaatataatatagatacaaatatttatgtgtatagatagaaacgatcaataaaatatcatatgtaaattacacaaactctcatatctatttaccacccggcactggccatcctccgaatctttctcaatttgtctccgctcttctctttagtcacttgtttgcttctacttattatctgcatgccatttcattaatttattttatttatatttttaaccacagagatcaacttctttcttttaaaaaactaaaattatataaactttatggtcgctaaattgtgaagtagaagatcacttgaaaaaatcaatttctatcttaatttataatgaaagttcatacttcaaataaaaaccactaacccatcacagcttagttattaacttattatcatttaagctatatttgttagataacgatattgtcaactttgaatccaacaatatcacacataaatccaaaatgatgtattttgataattcatattcgttaagtaaccgttttagtacatatggaaattggagtattacctcttgtcttcttttcttctcattttcctcctagcaaaaagtattaaattgaaaatggttactaggatattgttttccaaatatgaatcatagcttaatagcttatattagtcgttataaataatgttttatcaagaaattaccacaatttccttcagcttcgtgttttcttccgtgaggttgttcaattccaactccagttccacagtataagcctataaagagtgaaacccaaattagtctctaactctaacttggccaaaaaaaataaattttcaaaccggatttaaccaatggcccctatagtcatgttatacaaaacacagttcctatatattgtggtccaaactccgacttacttgtctccgggctcgagaccgagccgcagattcgcggtttttaatcattcgccgttgtctccgctccatcaaaatttcaggtggaccatcaattatccgtttcttgatccgaaaagcatctaaaccggtcagatactgattactcctcccattcccggtcatacagcttgaagattctcccaaaaccgagtaaaacggtcggttttcactataaaccgaccggttatcaccataattgttttggttctgacaatgtaaaccaactccaaactcggggttataaccaaaatcagaactcgacatcctcatcgttgtcttcaacggttcttgtacaacaccagccttaacaagaaaatcctcgagagtgatctcaccaagggtttgttgccggcgaatattttcggcggagttttgaccggaattcgacgacggtggatgttgttgtacaccgttttgtatctcgagccaaacctcgtcgaccgttttcttgcataaaggcacagggagggacaacgacccttgacgtggcagcaccgccggcttctctccgtcgttgtgagccccacctccttcgttgtcgttttcttcaacggttgtccacaagttcgctaggaactcgtccatgttcatcgctccaaagctcttaccgcttttcatctgaatttcgtcaagagttagtgacaaaatcgagttctgtctccctaccggttcctcctccgacagaaacgtttgcatttgcggttgcgtttggatttcgtggttgttgtagacgtggaagttcgaagtctccgattcgaaaaccgacatcgtttggtagacctataaatcttgaaatattaacatgcattcatatatcaatctaagatttaaagagtataaaagtgacttaaaaagattatttgttaccttgaaaaaaatgtgtaataaagatgaagaagaacaaaggaaaatagttaaggattgtgtcagtgtaaactgatacttttaaaatgaagaagaggcggagtttactatggtgtatatatatgcatgcatgcgagtatttttttattggagcaatgaaaaagagtgtaactgccagagcaaaaataaaataacataaaatgttttgatatttattaatgtggtacgtcgaatctggattctataattctccttttcgtttgttgattgacacgttcatgacacttgtcttagatttcctgctaaaattcttcttgcgaaattttatcttacttttactcgtatacggatttttacctcgcagctaattggccaatcatatcatggataaaattacattgtcaacatttgtttgaatgtcaaaagataacacaatagtttatatgttgtacacgttttcgaaatgttttttcacaaatatttattgtatacgcatgaaatatcttctagaagttattttatattataagcgttttcttaaagctacaaaaccttaatacatacaacaaataaaattataagtattgagtaataaatgctgcttgcttttcacatatgctgcaactatttttatactagattatgtcggagcaacaatgtgcagacgtatatattgtttaattattaaaatataaaataaattagaaacatgttgttgtagtgttgaagactgttaacgataattaatccaaatttttgaatcagtttttaagtttttaaatttcttttttttatgaacaatgaaattaaatggtattttgcaatatttttaaataattttctagttttaaaatatcgtaacggctgattcacatatttaactcgatatctgccatctgttgtatacgttaaaataaataaatattataaagtaatagttattcgaactcgtgtgaatacaatattagaaatccgagatgcgaacaggttggatagttaattcaatatagtggctgctagggttatgcggcatctctccgagcttcgtcatgccaagcttcgttacggcgagctttgtcttatttcatgaaaattgatctagatctaagatttgttttcattagaccaaatatatgaaagttttacacagaatatttgtgcgcataaattctaccccaattatatgtttaatatatgagtaggtaagtttttcaatattttcaaattaggtagccaaaaaattaatatgactaattttatcttattttcgtccttatcttgataaatttattaaatatctttcatatttaatgtcttattattttatttaactcatattgttgacaaaaaagtatttaattcaagttttataagtatatataatttgatttattccgtgttttctttcattttttctctttttcttctatttcttgtttatgtaattttaaggcggattgtttagctatattctctacactttttgtttctgaagttacttttgtacactcttttaatttcctctcgtggagttaattagtatggtttaaaacaaaatagaaaagaaaaatctatgtaattaattaattattttttaaaaaaatcaataatcatttaaattctcagtttttcctccaaaattcttctagaaattacctttaatttatgtgcaattgagctaaatttaaattcatttattttcagccataacaagcatagtttaggcaagaagaaaataaattatcatcattgatttttcatacaattttaatactaggaggccaaacaagacaatttcaagtttgcggttgtgaactagatatatatatatatatatatatatttttggtcttcatttttctagacacttctcaagttatttgtagcatttcgggtataagacttggattgctatctaccccttttataaactgaaactcaaactggaaagtacactgattaagtttagtcgtgccggtctttcttattatcaatttctcacgggctacgaaaaaggctttttcagctaatcggtttaaggagttgtctactatggcatgtgatgtcttaagcatcctcattaaaaatgtagcttcagagtcttcattcagcataggaagtcgggttttaaacaagtatcggagttgtctccttccttctacagttcaagctttgatatgcgcgaggaattggctacgcaactttgaagagattggtatgcttctgacttcttttcttttgtcatatttcaatcaatttgaatcttaatgcatattgagttcttcttttctgttgtacttagatgataatattgagttccttaatgaagacaaagatagcgagggagaacaagaagaagtttaattttgcttttaatttgtttttggatttgatactttgttgaatacttgaattgtgtttaaatttgcttttggatttgatacttaaatcatttaatactttgttgtttaaatttgcttttggatttgataattggattgattatgaagcaaatactattgggttaaaatttggttttgttatgcccattggacaactcatttgggcatggtctttaatgggcatgggcttcagtggacatggacactatttgtccaatatcgaaatggacattattggactgggctaatggacatggacagcccgttttgacagctctagaaaaagccaacagaaggaaaagtacggaggaggaatccctggcatgaattccagagattagaatagaatgttgacttctagatttttcatacaaagcaaatagcatttcctattgatttgtctcctggactggtggaactattctaattctgaattattcgtcgctatgctattcccaaggactagcaaaatcgaaatggtgaaatttttggatcatctcaatgggttcagaaaccacacgtttctctgtatcatcatagcgtactatcaaaaaagaagttgttggataaagtaaacttccgccttggacgagcacgaggcttagtcaagtagaatcggattacgctgctggatgctctgatcgaaaacaaatcatgtggttcgtggggcacttgagtaagccgccgacgctcgattgtgtcttgacccctatccaatttttgggccaattcccccctcgtgctaccaaaaaatgagatggtgttcaggttgcgagttggatccatctttttagaactagcccaaattttttactgaccttatggattaatcagatttttttttttttacgtgtatttgtgacaggctattggtatatattgaaaacattattccaaaatgtaaaaatgttaatatttgatgaacatttgaatagtaagaaaatgaaagaatcttatatttaaaacatccatactgaacaagtggtatacaattctttcctaagtaacttatggttaaacgaaatttttgtgagattagtgcattggcagtataaaacgttattttaatatgcgaaacaaaatatttcttttataagagtttaaaacaaaaatgatagctcaaattttaaacctctaaattaccaagtccaaggaactatttatctagtgtctaagaatcgtatccaaatataaatataaataacttactatccatattattaactgggaagcatggtgtgaattacaatattataagggtagtttaaaattaactaaatgaatttttgcatgggtaatttagtaaattaacaactactacaactaaataaatattttggattttgttcttttaaaaatcgaatttaaaatcaataaattcataactacccaatattttcggaaataatttaataacgttttcgtaacatatcatgctattttaattcgaattgtatatatgtaaatttatttattttggtaatatgttattagataattcggaaacttcaatctaatttaattacaaattatcatttagtttagattttaaacaatttctttaacaaaactatgttaattgtttctcattagtacacataaaagaacattacctcaaacatcaatctatcttaaataatgattttacaaggatttttaaaaggggtttaaaaacgttaataatgattttacaagattttttaaaaggattattacctgagtagtagatgcagaatgagaagcaaaaggatttgaagtcgtctcagcctgtaataaactcaatcactgacttaataatgattttacaaggatttttaaaaggggtttaaaaacgttaataatgattttacaaggatttttaaaaggggtttaaaaacgttaataatgattttacaaggatttttaaaacgattagtacctgagcattagggacagaatgagaaacaaaaggatttgaagtagtctcagcctgtaataagcacaatcactgacttaataatgattttacaaggatttttttaaattataacacaagaaggttattgaaaaacctgctcaactgtcacagaaatttgctctacagtcaaacataactgaagcaatcctccactctgtgagaatttgtgcataaaagttgcaagctgtctatcgttcctaatataaagaggatgagattgtatggttgtagacgtggagactaacttgtaactaagcttcaaagaattggttgaactatctatttgaaaatcctctacaagaatatcaaccaacgcgtgataggtaatgtgctcatcaatgagcactaaagaagctcccaaatcaatgtctaattcaaattcccaagtcatattgtttgtcaacttccacaagccacaaacagaatacaattctagcattataacctgataagataaataacaacaaaatcaacacccacaaaaacactgtcactacagagagaagcaaggtttacaattcgttttaaagcgtaagtaagtagcatagaataatttacaagagattttaaaagctttgaaaagtggttaacatggtttacaaatcgttttaaagcgtaagtaagtagcatagaataatttacaagggattttaaaagctttgaaaagtggttaacatggtttacaaatcgttttaaagcgtaagtaagtagcatagaataatttacaagggattttaaaagctttgaaaagtggttaacatggtttacaaatcgttttaaagcgtaagtagcatagaataatttacaagggattttaaaagctttgaaaagtggttaacatggtttacaaatcgttttaaagcgtaagtagcatagaataatttacaagggattttaaaagctttgaaaagtggttaacatggtttacaaatcgttttaaagcgtaagtgacatagatctatcacgaaagcatatgcaaaagaggtaaacactaaatcagaaccaaaatctattacgaaatagtataacaaattcacataagcaaatctatcacgaaacagtataacgaattcaaaaggattttagaacagtataacgaatgtacaaggattttagaaacaaattcaatcatcaaatctcaaacaaaattcaaattcgaagctgaagcaaatgtcaaactgtcgattgaatcaggattcaaataacgagttcacataatcaacaaccaaaatcgaataaaccaattcgaaaacgaagatttaagctaacattataaaatcaaacctggaaaacgcaagagattcgacggcgacacacagctctacttacgacggcgaagatgggttttcacggcgagtaaactcattatttccgacggcatgagattcaacggcattcacaatttccgatggaggaagaagagagagagtgaagaaatgaattaggtctgtgggtagctcattaagggtaatttggggagaaaagtattagaaagggtagaaatgaaaatgggaaaaaaagggtagagttgcaaaagggcattgagaaaagggcattagagtgaattattctttgaaaaagtttaaggttaacaaaataaaataataattttttccgcaaaaaatattccgacaataattttttgccaaaactcttaaaaactcttgtaaatccgactctttaaaaaatcttgtatatctttttaaaaccttttataagggttcacaagagttttaaaatagttcaaaaatatttacaaatgttgtaaaatatttataataatttttttgaaaagttgaaaaatgatttacatatatttttgaagactttataagagttataaggattttaaaaactcttgtatatgattttaaaaccttttacagtggttttaaaaagacttacgaggatttaatggatgacggtaacacgacgatgaaaaatttaaatcgacattaccaagttttaaaaatttatatttacatattttaataaacattaacacaaaattgattaaacaaaatatatttaagcggaatcttgccatataaagtatggttttcgaagttagtaactcataagatcgtgacacatgtcaattttatcgatcagatgtttacatgtgttatttaagatttaacttttttattctcttataaaaatagaaaacctaaaaaagaaacaaatttacatttactaaattctatgtctataaattaataaaaatatttatttttactaacaaaaacgaaaattaacaaatttgtttttatatgtgttattggtcaattaaatttttttagcatgtatcaaatataaaacaaaatcatttagtatggatattaactaattaaaaagaacattgaagtttcaaataacaaaataatttaattaacattaaattaattgatttcaattgtattcatcaatgtaatataatatttttatttgaatacttagagagaatattagtatattcatacttgtcttagtctaagaatttcaacgcatgttgtcattagtgaaaacaccaaaaattaggaaaatatggtttagagggattgatttttgattatttaataaatttgaagtcatttaaattagtttgacattaggtaaaactaacttatgagattatggcatatagcaaaactatatcttaacaatgtttcttttccaaaatattttttgaattattcatttttgttttgtttattatgttttgttatttgttagttattttaatatgagctaatatatagatttgatatgatatacatattattttgatacaacacttatccattaaaataaggtgaaaataatcaaaattggatttattatgatgaaatagataattaaattttatagcaaaatcaaatgtgtaagattaaaatttggtttaagaaaattaataaaataaatacagaaaattgtgtgaactactatttaacattcaaatatcatcaaagtgtaaaattaaatttcattttactatgaaagtataaatagttaaaaaggaaattgtgaaattgaaattcgatttttttttaataataaattaaatatcaaaaaagtaggtatgagtatttaatatttagaattcaaatatcataaataaaaatttctaattcattttttcattcgcctatttaggcgggccttacctagttataaataaacgggtcattttaataaaactccatacttaaaaggtgatttgcattaataatttagtaagatgttttatattgactgattattaattgaatggttttttcattggactttcttacatgaggggtttttgtattaaaaattaagtttagggtttttttcattaaaattctttaatgggcctttgggcttcccagcggcccatatccacaacgatttctacaaaaacgacgggtccatattcgacctccggaatcgattcgccggtaaacacaaaacctccgtagaaaggtccaacgacaccaatacgacaaatgtcagacccatttaagagaagttctctctatctctcttatctttttttttcagagatccttcactttttttcttctccttgaggtcaaaaactctatttcacttaccggcaatccaatcttctctttggagagtgtattcaaattagaatttaaaatgatttgagctttcttgagttatctatcgattttaaaatttccttctcgacaattcactgatgcttgtagatcatgtttgttttgatggtctaatctaaatttgtagggatttggatcattgttcaattctcaagtcttgtttaagtttatgaactatatgaatggataaagcagaactaattttggaacaagtttgtgatttgatttgcaatacagttaattattcattatgtaagtaaatctccagaattgataggatacaccaaatttaattcaatctctattgttgtttgtaccttgtaggtctgttcgtttgctcatttgggatgtccatccaaatgattcatctgactaatccatctaaatgatgttcgtttccatttttggtggttcagtaggatgatccatctaattgtttttttaaaaaaaaatttgcttgtttgttgagctggatgatccatctagatgcttctgataaaaaatgactaaaatgcctataattttatctaattatattttaattcttaatctaaccatattaatttttattttactgatcaaatccatatttacaatcaaataaatttcaaattattatatttgacatttaaacttccattttaatgattttttttttttatataaaaatcaaagcatataagcatgtattatgaaattaagaaactccaaaaaatcttaataacttcagttttatatatgctaaaacaaatgaaacaacaacaatataagttttaccaaacatagataaaacatgatacatacgcatgaaacgagcatatctgaaacacatgatctatttattgacttgtgatgatctctcagagagaaaaagaaacagattttaccaaacaaacaccaagagacgcaaagaaaacactgcaagcaatcaagcacattacagatggaaaattattaccaaaaggctcacttagaagaaagaacaagtccagaggctgaagcaggatttggatcacttggaagcagtacttgatacccaatcaacacacaatggaagctcctattagattttcaatcacctgcatttatcacatcaatgatatgtcatcaaacatagacgaatactaaaataatgtacaagaatcagatagaattagctcaaatgatgaaaccaatcaaatttgataaggatgaagtcgattagtatttagaaaagaccaatcagattcattaaaaacagaacttgcaaccaaaaatgccaacaacatacacaaataaatcaaacgcaagaaaacatttgcaagaaatattagtagttttaaaagaacatgtcattatataactacattagcttgccaaatcagactcaaatgattaatcaatgtcttggttgcaaacggtttccggtagctagacataatgtttatgacaaaatcattacatgtgtatgatacattaataccatataagtggtttttagaacactagtaaatactcatccatacgactaattgacaaaatcagtagaactaacctatctaaattattgtcttatcttacacatcttggaatgtggtaattaaagcttctttacttagactagcgattgtgtccatcacaatcttataagtttgctttgttttggaaaatttcccaacactaactaattacaggatacaaacaacaacaacaaaatatgccagagaattagaaacttgcaagaaatgaaaccagcaaaatagagatatccatcaatcaagcattatataactacattagctttacacgactttcgtggctaaacttaagtcttattgatgatcccaatcactttcacaaaaaccaattcaaagcatttggttagataaatagcaaaagacaaaacaaaaaacacactgtagagatattgaacgagacaaaaaatagcaagctttgaacatcaatgtttcatctttaagataatccttcggagctatctatacagataaaaaaatagcaagctttgaacatcaatgtttcatctttctaaatacacgacaaatacaaaactcataaaatccatacaaaacccatatttcacagctaattcccattcacacaaaataaaaccaataatcgaatccatcgaatgactcaaggagaaatcaaacccatgattcttacctctcaaacagtggtcgtagctagaaacacctgaaacccattaggagaaatcgaatcattaaccaattcatgagacagagagatagaaggagagagtgagagagagagagagaacgcacgagaagattccggcgagagatccggcgaagagctccggcgaagtgatctcgtttctctttggagtatcccgcattctcctatcttccaatttcttttgttgagttgtgggaactcaaagacaagctccgtggaagtcacctcctctacgtcaagttcaaatgtgtatatatgctctgttaaaagtggatatatgcttggatatatgcttggatatatcttttctttgagatcattatgttcgtccctgatgacaatgtcaacgatcatcggtgtctgatcataactcatcagttcttcattaaccttaacaagcatgatacaagccttaaatctcaaggttgtaggaagaggcgactccttcaacttgattttcaaggaatccccagaagtagctcgatgaatgaagcaggcaggcacttgtgtacctggaaacatcgcatctatacaagtgtgcatgatgagatctctggcttcttgattcagtttgaagcatttggggaaatagagacggatctctggattgttaaagcaacaatccagtctctcgagggacttacaattatctgcatatatgtaatcaagggaatctgaaagttgggggagtgataccagattattgcagttgttgagactaagatcacgtaaacgagacattctcttgacccatggaggaacttcttgtatatctttgctcaaatgcagcttcgtgatgatgtcaaaagcatgcgggaattccatgaggctttcaaagtatgaaatctgaaagtcagcaagaggagaccacgacatgatcgacaagggaacttcttttattgcagttccttttaacctgagctctgaaatgtgtgtggagatctcaggaaaacttttcaactgagagcaatctgtgagattaagtgtatcgagagatttcaagttgatgttgattggaagagcctctagctttgagcatcctctcataattaacttgcacaagttttgaaggtttcctatagaggaaggaagcgtcaccagacttgagcagttagatagatcaaacacttcgagatcagtgatatctccaattgaggatgggagtttcacgagacttgagcatccgctaatattcaattgcttcagatttgtggcagttccaatagaaagagggagctctattagacttgagcaattttggagcttcaattcacggagcttagtcgcattctcgatagcggggagcttctcaagactcgaacaattttcaagatctaatatttggagactcgtgagtttttcaatagaggaggggagctccactaaacttgagcaatttctaagctttaattcttcgagattagttgcagttgaaagattgggaagctctttcagataactagaataactcaaatccatccacttgagatttctaagttgctgcatttgacaaagaagatcatgttgatacaattggctaataaacatttacggaaacaaattataattttttataaaaagtgaaagttttcatcaaaactacttactttagttccttcccatagcttccgaagattgctggaacgcatatcaagttcgaccagaaactccggattaaaagttgaaggcaaacataaactctcgtaaccataccagttcagtgatctaatctttggagaatgataaatcagatcttgtagtgctaactgcagtctctcaggttgaaaactagcatcgattctaacgaaatgaaaatcatgcactctttcaagtactttctcacttatattcaattcttcctcggtattagacaactccaaatgtatccctataaaacgtctactatcctgaaacatgagccaaaagaaatataagtaattactgttatcaaataaactcaattaacaggggcagatgcaatggcaaaacttactgttgtatcatcgtcgagcacttcacatataccccttgcaccaaccaaaagctgacgtttcgtaaagccatgatgaacgaattgcttacgagaagtttctcttccgaattgttcgagcagagtatgcatatgtattctttctccatcaaaggatatgagagatttctgagctaataagtgaagaccttgtttcacatccaagaactttccaagaagctctttcactttggttgttgattcgccgttaaaaagacaggctatataaagaaatagatatttatcttcgtcacataagacatcgtaactgaactgtataatgctcccgatttttccgtcgaggctagtttttaaccttggtagtgttctttcccactctcgcttggacttcccccgcaaagcagagcctagaaccttcaatcccaaaggaagttcaccagcaaggcaggtaacttcccaagcaatctcatcgaaaccttcatgtggttgtttctgaccaaaggcattcatacagaagatttgaaaagcctcgtcatttgatggatattcgaccttgtaaacatgattgatcccatgagccttcaaaactcctagatcttctgttgtgataataatccgacttccaggaccaaaccatcgagtttctttcgccaaggcatctagttgtcctaattgatccacttcatcgagaacaagaaacactttcttgtctctcaaccgttcttgagccactcctaaatgagaaatcatgatatctttatgattgatcatctgggacaacatttggttttgtagttgcaattgtgcactgtactcatcgaaacaaggtcttggatagcatcctttgatattgaccatgattgcactaagttggaatctgtcggagacttgattaaacagaaatctggcgatagttgtcttaccaatcccaggcggtccccaaatcccgatcatccttacttcatccaaatctaggcgcaacaattgttccagcatatccatatgagctctcatccctactaacccgtcgaaatctcttgatggtgtgaaactatttaacatgtttgaaacatcagtggatattttctcaatcatgtctgcttcattcctcctgacaatagaggatagatatcaaatcaatatacaatcgttgcgataaaatggtcacgaagatctgaaagaatacactttaacaaggaaatattaattaaggagaatataaatcaagaagacaaaccagctgtgagaatgatatccggcgattgttgccacatcctccaaagcttttctccatctctcaacttgctcttttggtttacctctacatgtttttgtgaaggcttttccaaattcaccggtctgtttctttatgtcagttggatcaacttcatagaaaatggtcatgacaatctgacccaccatttgcctgcatttcatgatctcggccaactcatcaagacaccaagacgaagaagcatattttcttgagagcaaaacgattgcgatctttgatcctttgatagcttctttgagctcaggaccgatcgacttactcctctctatattattatcaatgaatgtgtcaattccctttcttctgaacgattccatgatgtgactaagaaaggttcttcggacatctgctccgtggaagctcgggaagacatcgtgtttccagtttcgagacacagaagttgcaggggagggaagagataaagaagaagaattactttcttggttatcttgttggaatctgaaatttgttaaagctacggctgccactgagccaagggaaataagaataattcattagtatggtaaagagtggatcaagatttaagatggcctttatgtgaatggatacagaccactgatgactctgttggcacataaactccatggatgtttccaagatgactcatcctgaatgaatctgcaattctcagcatcgtttgttgagcatatctttcgtcttttacgagattcggaatcaacatcctgatttgttgctttcctcttggaacagcccaagctcattacagaacccatgagaactttgattatcgaagaatcaagaaattaatataaaatcaagaacacataatcaagaaatgagctcaaaacactaatcaaagcatcaatatcagcataatcatcaagagccagtccaatcaattcgattccacagtgataaaaccttaagcaaaacttaaaaatagttggaaaatctcaccgatacatgaaaggatgagaaatctctagagagttgaagaatcacacgggtttagtggaatttttgtagttgaaacgatttgtgtgactgaagatatagatcgttgacgactctaaactccatggatgtttcctggaaaatatagtgagattttgtggaaaatattgcaaacgacaaaattactgtccctatgctccaccattcactgtctcaaacaaagttacgtccacacaatatatatttttttctttctatttctctcctaataataataatgataaaacaaaagagttaatatcattcaatcttgtaaagagttcatatcattcaatcgtgtaaagagttcagtttaacaagatttatatcagcaagtttcaagcttcacatcatttttctgttataatactgtccagcaaagactcacaagcatcttctagcaagtccagtacctatgaaagaaacaggtagacaagtaacagatcaagattcaactttcgaagtgacttttgtcctaacaaaatagatcaaacaggaaatataagcattcccccttgcaaaattctcgaacggaaggcaatttgggagtgacaacaatggtatgctaatgccatagtaaagtcttataaaccaaatcaaccattttgaaaagacaacatagctgaaattttataggtagcatctgcctaaaccaaaaagttactaatccacaactggcttagtctctaatggtaattaccttctcaaaaccttgagctccaccatcatatggatcaggaacaaacttgcattgtgtttcttgcaatacgaacacattagcttaacctgaaaactcaatgaaagtgttctaaaaagagttccaaagtccagcaaacaacaacaaacaacaacggtaccttcttatctgcatcgggtgggattccctctcgctttccacacattataagccttcaatatatcctctgcaaacatcaaacattcatactcacattagctagacctaaaaattcaatgaaaatgctctgaaaaatctcctaaaaagagttccaaagtccagcaaaaaccaaaaaaacactaacggtaccttcttatctgcctctggctttccacacattataagcctttaatatatcctctacaaacattcaaactcatattatcgactaggatgctttaatctctctattgatggtgctttttcttcttgtaatcaaaaatctcccgtttgctaatttctttgcgaatcgggttttgaaatggctttctctatgcttttcacaggacatgctgaatgtgttaaattcgtgaagaagttcaatcttcccttactggtatctaatctctcttgacttatatctagtacgactttttgtaattaagttcctctacgaataagtcagtttttttccgattgtttattaggttacaggaggtggaggatacacaaaggagaatgtagctcgttgttggaccgttgagactggcattcttttggatacagaacttcctaatggttattaaaagtttgtttcaatattttgtcagagaaagtttaatgttgcagtctttggagctcaggggttagttgtttctgcagagatttctgaaaacgactacataaagtattttgcgccggatttttctttgaagataccgggtggtcacattgtaaggagctcttatgtaacttatagttcctcattgctttaacaaaatctaaagagagattgagaatcattttttgtgtttgaaatgaaaacaggagaatcttaataccaaatcatacatcagttccatcaaagtgcagattttggagaatttgcgatacattcaacacgctccaagcgtacagatgcaggaggtaaactcagatcatcataggacaaattgatgcttttatcaatctaacactgatcagtttttttacttgaatctcttaggttccaccggatttctacataccggattttgatgaagacgaacaaaatccggatgtacgtgtggatcgtaagtatcgataaccaccttcaaggctctactttagtccctttgttttcttagtgactaatgttatatatggaatgtttcagagcgttcacgggataagcagatccagagggatgatgaatatttcgatggagacaacgataacgatgcatcgtaaaacatcgattcttagaaattgttggttaattttttttgtttagttatgagatttgtaatgatatcaacactttaacggctatggggcaccaaaaccacttctgattgattccatcttcttcatgttttcgtcttggtgtatatgaatgaagctttttggttcactttctcatcattgtgacttatatagtgatcaaattcgttacatattgtacagtacaatttgcacttgatcaaattcaattttatttttaggcagccttgttagtaaaaatcactaaagattaatagaaaaaatagatttaagaacgctagtgagaaatacgcagagaattattaagattaaacagaaaaatacatttgaaaagcaaaattcagtgattattaacaaaatctgagaaagaacagaaacaaaaagatcaaggatatgatttttcttgatccaaatttgcatcagagtcatggaagttttagatttccaacactgctcaattgagcttcttttatcaatggtgatttaactcatcatttgcaatcagatggatatatatatatcgagcaacataagactcgatgttaaataaaaaacattagaaagaatgtaaaacgaaaacacaaatgaataaagaaacagagaaaatgataagcaatggaactgaaaagagttgttttccttgtgctgaggtatttattgggggctgcgacgaggtagggtttctttttttctatatagaggtggtcagaatctaagccctagggttaaatttgttaaccatggttaagttaacattataattttagatattctattaaatatatgagatttttttatagaaaaaggtttggttatttatttatttttttggagtttgaagttttcaagtttgtctgatcaattatttttcgtgtttaggattttcaaatttggaaaatataacctaaggtctgaaatgattaaagttgatggagcggacaaaaccgtctatggattatactttttttttttaccattcttaaattagacaaattgttaggaatgtctttccaagactatcattttttaattctacccattatgtagtctatttttatttatagccttttaacttttaatgaacactagattttaacctgcggtataccgcggggctatattttttttagaaaaaatcaaaatgtaatatgcttaattgattatcattattatataacctattattttgtatttttttgaatataaaaaccttatatatatatatatatataatttagtgtacaattttaggatttaacatgtggtacgacggacaatttttttttattagtatagacaataatgttagattttacgatttttttgtgtattaaagttaataattttatatatgtacaattaaaaaaactgatgctgataaaatattaaaacaagatttaaaccgtattattacttttggttgatgatattataaatttgtattaatatcgatccaaacccgtcccaccatataactctcgtgagatattactttttataagttttaatatttcaataatctatttcaaaaattaatatttttttgctttttacgtaatgacatattttgtaattcttattaaacaaaataactctacaaaatgtagttcaatttttttaatgtagataatgttataaataaatattaagtttagtcataatttgtgattgatatgtacttgagtttttggactacctgtatttcacgtcatttaatagcctaaattgggtagtttgtaacattatttgaaacaataatattatcttaatacatgtacattttactaactgaaaatatgagattgattctttatattacactgaaaatgaatgattcaaactaaagatcagagtgtaatatagtttagcttagaaaataattaaaacgattttatttatatgtttagtttcctaaattttagtttagattcagaaaataattgtttaacttccttagaagatgataaacatatatggaagatttgaatctctattcatatatatttaaaaaatcaataaagtcaatataattaaaggatagattagaagaaattttcttgaatgctaaataattaatttgttatttataaacgaaatattagatgctgtaaaaaacgaattattaaataaatatggaaagaaattcataccttaaaagattttgtattattaaaaccgattttattttacagcaaattaaaaccaaaaattaataaatacttatgagagattttaggaatgataatttttgaagtaatgctagattttttttgaagtaatggtggagttaatatagagagattttaggcaatatttttgttaggtaaatatttgatttaaaatgtcaattgaaaaaaatatactcagtggcattgagtcgtaaataagttcgaagtctaagatttatttgttaaaatgactgcaaaaatgtatatgtagattttacccttatttgaaaaagggagatttgcaaaactgcccttattctaataaccttttgtaaaagtgccctttcctaaaggccatttttaaaactaccccttctaatatgccaaatgactgtcttaccctctgaatgattaggtttcacgttggtttcacaaacttcttctttttggcacaaagttcttcgttttcctctccgattttcctctccgatttcactcaaaatcgccggcgaatttccttctgatttcactcaaaatcgccgacgaattccctctccgatttcactcaaaatcgccaacgaatttcctctccgatttcactcaaaatcgccgacgaattttctttctgagaatccccaaaatcgccgacgaatttcctctccaataaacctgttcttcgctgaaggattcagatcatttctctacgacgcaaacaatccccagagatatcgatagatcagacggtaaccgtttttataatcgattttatagtcgattttatagtcaattttatagtagatctgacgctgtttcataacatgttttgcagatggattcagagagtgaaatccttacattgcctgaacaaatctacagagaaggtgaggaatctattgcactgggaaccgttcaacaatactcggattggaatttagttagtaaagtagaggaagctttaggcgagtgtttatttcagaagattagaagttcgttttttggtcctctagttgaattgggaccaaaaatgaaggctaagaagggaatcagattttctggaaaaatctttcactatctcatgcagcagagagtgaaaacaaaaggatcaactctttggtttagagtggattctcaacctatccgtttctccttgagagagttctatctcacaacaggtaataaagttttacaatcgtttttaaagcttaattaactgtcgtagaatgatttacaaggcatttgcataactgtttgcgtagtttacaatcgtttttaaaacataagtaagtgtcatagataatttacaagggattttaaaagcttttaaaaggggtttacttcattaacaatcgtttaagaagcataagttagtggcagataatgatttacaagggattttaaaaagggtatgcatggtttacaaccgtttttaggcataagtaactagcatagaataatttacaagggattttaaaagcttaaagaagtgttaaacacgtttacaagggattttaaaagcataagtaagtgtcttaaaacgatttacaagggattttataagtgtttgcatagtttacaatcgattttaaaacataagtaagtggcatagaatatttacaagggattttaaaaccttttctaagggttaaacatgattagtaatcgttttttaagcataagtaagttgaatagaatgatttacaagagattttaaaagcttttagaagggttaaacatgatttacaatcgtttttaaagcataagtaagtgtcatataatgatttacaagggattttaaaagtgtctacatggtttacaatcgtttttaaagcataagtaagtggcattgaatgatttataagggattttaaaagcttttaaaagtgttaaacatgatttacaatcgtttttaaagtatttactataaaacctgtaataatagtctctacactgtcttttgttcatacaggaattcaatgtgaacctgttcatagggaacttcgacgaaaggggaaagatcctgtaaaagaaccatacttttgggctagtaaaagatcctatactcttggtgatctcgaagatcgattgtttttaaaacctaaggaaggtgaacctgctgttgaagatgaagaaaagttgtgtcttgctgcagtagtgttgattgaaggaattcttttgacaccatatggaaaagagaagatacctttgccaagattgcagcatgcttctgattttgagatgtacacagcccaaccgtgggtaaagaagcattcaatgttctatcaaattcaattctgagaatggacgagaaaacttgggcaaaagagaaatatgatttgagaggatttggactagcgctaacaatatgggtgttgagcgcagttccagcatttggtgcagcatatggagttaaagataaggaattccaatctgaatatccattgatattgaagtggaaaagcactactactccagagtttttcaagatcgtaaaccttgtaaatgatgtttctgagttaagcttttgtctatttacagaattctttaaatggtttttagatttgaagttctgctttctcaagatttgtaatgttattgtatcttcgcagatggaggtgaatacaattattggaaatccagaagaattcaagtctttagttcctgatttccacacagacgacacaaaattccaacatattttgggactagttaatatgggctacagattgaagaaaactgaatggaatacaagatgcgttgatgtttgtgctgcccttgaagaagtaggtcaaaacaaaatcaataacaaaatatctgatagcgagaagcttgacaggattttgacaatccttgaagatcttaacaagagagtcgagctgattgagaagattttggacattagaatggaggaaaagaataatcagagatctgaggaagatgaagaaagaaaacaagaagatgaaggagtagaaagacaaccagaggtaattgtaaatgtttctttaaaagctatttgaaaggaaaggttttacaatgtattttaaaggttaaatacgtagtaaacctttacaatgtactctttttttcgcaggctgaagaagaaggaggactagaaagaaaagcagaggtaattgaaaatctttacaagctattttaaaggtctactaattatattaatgattgacttattgtttttattttgttacagaatgacaatgaatcatttgaagattcaatccgagagccaaacacacagtatgggagctatccgggtgatgatgaaaacacccaacgtgatgttggtgatgaattagttgaagaatcatcaaaagtacagtaatttatatctctaaaagtcttacaaaaatgattagtatcctttttataattttacattctgttatcttttcaaggataagtctcctactccacgatcctctacaccaaatttcaatattttgtctgaagaaagtctggatgttcaaaaggataagaagagagttagcagaggaagaaatgaggttagcatttaaaaaaaattgtattatctaaccaagtgtttataatatttttttcaaatctttaaaagtttatctttcatgcaacttcagaacaagagagttaaaccaagtgttcatgctgaggataatcttaaaataagaaaacaggttagtatttgcaacagtactgtttttaaaaattgtcaattgtcttgttatgatatttacaagggattttaaaagtacttttaattggtgttttttactattctaggtgccgagaaagaggcagaaacaagttgatagtgctgatgttcatgttccaacaaggaaagaggttagtatctaatttattatgattttgaaaattttgtttacaaggtattttaaacatctatttttttattatttttgataggcacagagtaagaaaaggaaaaatattggcaatgatggtgataacgctgataatgatggcgacaatgataattttcagcccgctccgcaaagaaagagtaagcggggtacggttccttccattcatacccaagcacctttcacagctgagaagaagaagcatccaattttgcatccatttgcgaaagttgatgccacaagacttgagaaattggctgaatggaagaagtcaaggaaaaacaagtgagttttgttagtaagatagtgagttttttttaataatggaagaagcatcattgttgactgttttgttgttgtaggccactatcaatcgcgggaaataatgtagatacaaagtggtttacaaccctagagacgccagggaaagcaatcacagcaacggtatgtctaaaaatccttgtaaaattggtaacccatgaattacatatagtttttaaagcatcattaagttatttacaaaagggattttaaaagggttacgtggtttataaacaattttaaaagattagaaagtggtaaagaatgatttacaaggtattttaaaaatgatttacatgacttgcaatcgtttttaacggattagaaagtggtaaggattgatttacaagggattttaaaagctattaaaaagggtttaattgattaacaatcgttttagaagcagaacttagtggcatagaatgatttacaagggattttaaaagcttttaaaagtgtttaacttgatttacaatcgttaaaaagcataagtatgtgacgtagaatgatttacaaggtattttaaaaagggtttgcattttttacaatcatttttaaaggggttttctaatatgataatttttattttttgttgtgtttagcatgttgatgcagctttggagttgatgaaaacgaggaaggaaagcaatccagaattattcaaaaacaaatcagttgtatttgttggatcgtctttcttaaatgtgattgatgagtcatacatggagtttttggataacaaagagggatttcagtttcagtctgaataaatcagtaagctgataatagaggaagaaaccaagtgcatattggctcctttctgtatcaaaggaaaatgttgggttgccttgctcatccacttggaacagaagacagtttgtatatgggaatgtgcagcttcttatttaacagaagaagtcaagaaaaaatatgttgatgcctactctatagctatgccatacattgttcggaacatcctcaaaaaagaagacatggatgtctctccatttagcatcaaagtcctgaccacttttcctcaggtaacttctttaaatatatcatagtcttagaaatgaatattccgtaagtcctgacttctataacttctttgcttaagtaattcttttggtttttggttgtaggctcctagaaatgaagagtctggtatatatatgctgaagtttatggaatgctactcaatgtataccagccattcaaaccttgaagggaacataattcaaaacgttaggaataaattggctgctgacatcttcaccgaattagggtcagtcattttgtagaagtagcagacttctaatcaaaaagtagtggagtatttaaatttttttaatgcaaatattcaaaatgagaaaatattgattcacaacaatatttttatttctttctttgaaatttgaatgacttttttttaggaacaaatagtaatatgattattttgacatattaataatggtattcgaacaataataactaccatatttgcgataatgcataaggataagtttaatataaaaaataccaaaattgttgagatcatagtaaattttagatttaaaaaaataaataaaaaaaatcgtcatcctaaattttaaatccgcaattcatattagttttttcagtaaagctaagattgaatccaaattaaaatctaattttgcgtacactctatctcttataattataaattttatgcatacattcacattgcctcacaatcaatctagaatatcgattctttaaaacaatagagagagattcataagtaaattacttcatgttctaatgatgtttatctcctaatattactatctatttatgcgtattcttatggatttttctttcagggtcaacacaacattacaagaaactagattatagttacacaatcttaaacaataaacaaaacaaatataacttactttaattttttatttttaaccaaaatcaactaatttattagtttaaaaaaaaaacaaatactactatttaacgatatacaaaccaaatactattatactttaattataagaactacatcttattgaaaggtatacactaaaagtcagttttatattctaaaatatcataaatttataaataacaaattatttttaaatatattaatccaagatgtaccacatgtcaatccctcaattcttttatatattagaataacaatatttaaaaataacaaaataatttttcattttacggaatgaagttatatggtgaaacgagtttgagttgatattaatacaggactataataaacgagtgaaatcttagaattaataattataatataattatacaatcttaaacactaaacaaaataaataatatttaaaaaataactatatcttaaaatttgaatttttagttacaaaaaaagtcgaccaacggtgtaccgcgtagtaaattttacattatatcatctaattgatcaaatttcaaacaaaaacaatcaatttatatatacatcaaactaacaaaaatacacagattttttaaatatctctatattattcggcaaatcgaaacaaatctatttactatttactatgtaaaatacaaataaaatataaataatataaattaattaaacaaattagctattttatcataaataacactatacacttttctatggatattataatttatacactataatatcttttactaaaaatgtattccaatacatttcttaaaatatgaaaccccgcagatatgtgcgggtcagaatctagtattttaaataaggaaaactaattactaagaaagtaattgttttggtggtttcttccacgtacttactaagcaaatgaaagcataacagaccattgtatttgagtctagcttgagagaaaatatgagtctataagatgaatggtgactatacttataaaacattcaacttcgttagcatatttttctaaccaaactcgacaagaataagaattaaatgaccaaattagaaaccttttttgttgctgaaaaaaatcatattttgttttccaaatactttttttatataccgggatctagtagttgttataatcttttagaaaaagcattgaatttctataggaattgggcgttaggtggaaatatgtagtaagcttaaatatcaattaacttaatatgtgatgtgttattaaatcacttttgatttactacataccaaaacttatagagtcgatcagttggctaggaggcgagggaataccatcggatctaaatccttgaaaacatatcatgattttcgacagaaattgtcgtagctagggaatttacctttctttgtagtggataaaataaatatgtcaagatatgaaaaattcataagtacatatatatattttacaaataagagaattcgatttttgtcaaacaaaatcaaagaatcaagcaagaaaccgaataaattaagaatagtaacttagtctctaagctggctcagtgatcacagcttttggtttgtacattgggagatcttctcctaaaagaagtgatttcaaaatcgcatcacatatgccgtcgtagtgcacgatcaggtggcctcctttagggacctcatggtacctaatccatggtagcttgcggcacaaacatctttgcagctgaaatggcatcactttgtcttcgtagccttgccatatgtgaacagaagaagagcccttttccggtccagacagagacgggtcaggtaggtctgccggatcgaagtcccagtcgccgaatgctaccaaaaaatcgcttctcagcgtcccgaagacgccgcgctcccgtaacttctcctgttgatagtacccatgagtattcgtaatttgactaagcaaccccatattttctttcaagatatctagttctgaactaatatcacactttgtaatttaaatacgtatatataatttagaaaaatcatgaaggctatcaactttatcaaccacttcatgtttttctcactaaaattctggtggaaattgtcataaacaaatttaagtaacatgactcttgatattcgaaagcttaattcaatgagtacattatatatttttggcccgtctacaactcaaaaatctagattatgggcaacactaacacaaatcactatgatataaattataataagtaaaactcttagtatttaaattgttgaaaatgcatggcttgataatttggtctcctagatcaataaatattgggtgtacatttggtgatattttaaaataagataatagttctaaaagaatatagcggaaaaagctctaagggattatagtcttcttggtaaagagtaatatttaccttagtgagcattgggaagcctttgatgtgcttaaggacttcaatgtcttggtcgttgaagtagacagggtttttctctagcatggaagttgtagagaacatgttctgagtcaccaaccattgcaaaagtcccggaaaatagttagctatccaaacagaccatttcgccacttctcttctgtagtcttttggcatcagactctttggaatagacggccaccggaaattcaccaccggagccaccattgccactcctgctaacctgttcaatttcatatgtttatgaaactttacaattctgattttaatataaatattattcttgaagatttctgttttttttttcttaacaagttctttagttaacggctcaaatcaatcggttcaatccggaaaagtacactaatcataactcaaaaggtgtaaagcaatgtactaactacgagtctactattcaagcctgattgattcgagatttgtttttgtatgtactagtaaaaattatatagtatgaaccagactaaaatatttctaactagtaagacttctaaaatagagttcctctaccagcatctccaaatccactctattttagaataaattttctccaatctcactctatatgttactctaaaacaggtccggctcaatattttattgggccctgtgctacaaaaaaaatgaccatctttaaacccttaaatctaaacaaaataatcttatgtgacatatatttattgtattcttcttctaaacctattactataacacaaaaattaagaaataaatatgaggaccctctgtattggcacctctgacacacccctagagtcgggcctgctctaaaatagagtaaataatatgattgctctatatatatagagtaactctatttttttacactatttatattttagagtaacatatagtgatatatcggagagaattatgttctattttagagttactctattttagaagaaaaaatagagatttacattagagatggtctaaaccgttagtacttagttgaacagaattatgtttgctagctaggtaaaaaaacaattatgtgctattttgaagatttaaatctagagcaagaaaagattatgtcaacaaagattaaaaagcagttgatcctacaatatgaatttgaacgtttgctctgacaatttttatccaatcttcaagcaattattttttgcaacatgtggctttggcttgcaagacttgaatgcattataaataaattaatttataattaatttaatcgatttgatttctttacctttgaggaatatgtttaaggcagctccaaacagtgtaggaacccattgaaattccaatcaaataaaacctggatccgatctctaaaccatccgccagttcctgaacatcgtaggcttcactcttcaacgaacgtttaggattcgggtcgctctctccgtaaccagctcgatcatatagcacaaagtatataccaatttcattcacaagctcctgagattataactaaaacaagcctcattagtcttcaaccatatctctaacaacatctctttttctaactttttttgcttgtttaatctttagaaacttgaaaaataatttagcttttcagacatctaatttttcaaacattccacattaaagattacaattacaaaatcatatgtgatctccagaagtcagtttcttgaatcttgtaatggaatggaaactaacgatgctgaacacaaaaaagaaagcagaatttgaagcacatacttttggatatatgtgattaaaactacaaattttggatcaaggactcagaaaaatatataatataggaatcgagaggatcaaggaaataaaggatcagtgtatacttgtgagacattgaagttcatatccttggagctaccaaatccatgaacaagaacgatcgtgaactttgcatcatccttggggacacctctttccttgtaggccaagtatctaccatcgtgaagtttgattcttccttgaagatgttcctccattgttgttgaccttgtgaagaagaaaaacgaagaagatcaagaagaatatgttaagcattaggacaaggagggaaggtagatctagctggaattgttagtagaatcattattctaattattaaacggttgaatagtattattttattttatataaacataattggttttcccttattggttcgattatgaatctttttaatagaatatttcaagaatcactggaatattcggactactactttgaaggagaaagccagggggccagagaaagaaaggacaatttaaagaattgaacacatattcactcaaatcaatagttatcttagtatagatattcacatcagtcttcatcggttcagaattgtttagtgttgcttaggcggtttcgtaaataattaatggtgcggtaaaaaaaaagctgtaaaacgagtgttcaaaattagtgctccatttgggttgctctcatggcaattcacttaggcaaatccgggccctgacttaaaactatcaaccgagaacactagtattgcttttaggaccatagttgtggtgtaatactagttaactccaaaccctttccactataaaaatgccaaactttaaaataaaatcattcaaaaacttttatacaatttaattatatattgtctttgtagataaacctaaatatattttttctttttttaggtttgaaattattctaagccagccatgcaccaaggcctaagggttgagaatccaattctagtgtgtatcatatttttcattaagcttaatttcttttctttttttggctaacatcctactaagggccggcccaaacaatttccatgcctaaagcaaaattttttttaagcccactaacaaacaaaacttaaatgaaaaatccaaaaaaaggaaaataaagaacacgaaccagtcatctcgtggacgttttagtacagttgtaccactatgccacaagttaaatttggaatgatgtcctcaacttttacaatatatctgtgatgcctaaagcatcagcttcatgagctttagccttgggccgggcctgatcctactcttcctctccgctttgcaatattttgtgatattcatttgcttcgtcccacgttctagataaagaagttgtgcacggaggatgggaggtcaaagatcggaggaaatttcataaacgatccacagtctctagattggtagatcggccaagttgagaatatgacatttgtggcttcatgtagttttcaaatttctcattttaatccctactttgatcatatttggttgaatgtcttaggtttttacagtaaaaattttcttaatttaagtcatgtattaaaaacatgaatcttgagttcctgattatcgttcatcttgttcttggataaagttagtttgagtcaacgtagaaataacatgaataggttagttaatttatgagtaaaatgtgacttttagttattttatgaggaaatatggcttttattcgtgtttgattgtgatatatttgacttgatcgtttataaaatgtacaagtcattggcccaagaatgaagtggcgttttcgatagttgtcatttccctctgccaagtggtactatacagtgatgtaatttgtatatttgatctgggtattgggattgacagtgaaggcgaattggagtgatgtttcatgcattcaccggttcatagcaccggttcgtggcagtgtctaaggatatggtggagactgtagagaacatgttatctttgatgttatgaatatatctctgcaaaccttttccttggatattattattgattaaggattatgaacgctcatcaattatcggacctttgggaatatctacatggaacgagattcagaagatggtattaaccatttcagccattatgggcacaagctatagccaagaaagattccatctcctgttgttggagatgttttgatgggaaactatgtaaaagatggatcgcaaccaaggatcattttaacgattattggagtttcgtcaaaagacgatagccaaacaagatgatcatgttggataaaggaagaagacggataagagcatctccaaccacaacacaccaaaacaccaaattttaacaccaaatatggtgttttggtgtttcaattgttttatcatctccaacaataacaccaaatttcacactaaaagtattactttttattattatattattaaacaaaatattttctttatttttgttatagtttgatatacacaacttattttataactaaattattttaacttaattaatataaaattgcaatcgataaattgaaactacaagaaaaatattttgtttgtattttttaattaaatgtttttgtctgaatttactatttcatatcatactacttataaataaaagttcatattaataaaaataaaatcacccaaaaataatgatagtgtatttgtcttttagtgaaaaacaacaatttaaatataatactaaatcaaaaacatgaataaaatactattattttttttagtgttttgtgaactacagtattacaccaaatatgatgtaatactgttcacaaaacactaaaaaaaaatatttggtgttgcttataccgttcgattggagtattatgaacactatacagtatttggtgttttgcagtccggttggagatatctccaaggaagataatagatttgatcatttattagcgtgtaaagcttacgaaagaaaacagtatgtaattcagttgtaagataatagatttgatcatctattagcgtgtaaagcttacgaaagaaaacagtgtgtaattcagttgtttgattgtatttttttaaaaacgttaatcatttttggtttatgtgtatgtctaaaaaataactatgtaatctctgtttcaatcttaataaagtaaaggaagatgttaaaaaaaaaaggagatgaatggtcaaaaatgtttattgttttgggcgaaaaatgatggtttctttgggtgtaaacaggcccaagccaaacaattaggcatagtgcgactgtccatagaccttttgttatttcttttattattttttttgtgtgtcggcttgttaattttcttaaaaattatcttgtgaagaggcctgtttaaaaactattacaactaaaattagaccgccgaattcacaaagattttcaatttatttttaaaaagcttataatttttaaaatagtcacaagtatttaaagttttcatacctcttacttaaattagatctattttaatgggatatctttctctctcttaacaaatccttatctttgagagagatgcaccggaaatctcctccagtgatattcggtttttgtttgtttataacttctaactttcgtcggatctgtttttccgttttgtaggatttaataatctctcatttagtttgttggtttctttttgttttgttttttcctctttctataggatttcatctcaaatcatgttgggtgtcggttgatatctcatatttcaaccatcaacttgattcttctcaaagattggagtaatatcttaaccattttatcttcgatgtattgcgaagtgcaaatccgctaaactgttgatttgagtttcgcaaaacaaatcaatagtttaggagatttgaaaaacatgtattcaacttaacagtgccacgtataaagatgaagtgccacgtattcatctttataaacaaatcaacaatttaggggatctacatttgcaaatgccctatactgttgtaagactaaattaaagttgcaaatgtaggggatttgagcttcgacccaccatttggaagtcaaagtttggttttttttttttaaatggaaaattgctggaaaaaaaaagaaattaggcccatttcaaaaagttaaatttatttgtaaaacgtaatgttttgaagaggcccaaatatttaaatctttcacagcctttttagtaaagagggttcaatattttatttttttctttgtcctaattcttaagcccttaattgtattgggttggggttgagtgtaaaataatgggtggaccaagatatgctaaatgttcgagagttgagatgaccacgatagaccgaaccatgtgttgaagggttgagataggccaaacgccaaaccatgtgttcgaatgtggtgataaccaaaatatttttttttttggtgggcatgatactcgaggaccagatgactgtgggttcaacaactatggtgccgagctagctgctcgaggcatgtgcaatgtggccgtgaacaagggtttgtcactaaatgacctagagatatgtaaccaatttgaaacaagaaaatgtgatatgcttttaagatagttaagtcattagcaaacatctaacaacattggggttgcattaataagacttaacaaacattgtgattgaaaaaaacttcatcgagaatcttacaaagaagtcgaagagctcttttctccaaagtccaaaggtagggtttttattctcacatatcaatcagttacacaaatacacaaacaaaacacacacaactcttgtcttccaaatttgtcacatttagcctaaaactcttctactttgtctctctgctaaacacgaaaaattagggtttttttaaaagaaaattttaccgaattgaggaagaaaaaattaacctcgaaattgacttcattcttcttcaccgtttcagttcctagtatccttctctcgtcgtagctttctgggtttttggtttcgtcaatgaattcgtgttttttgcagagtctttgactctctgtaacttccttgagcttgttcatgggtgtgatctcaataaaatttcagtcttgaatcttggttttttctgtttttcgatttttagttcgaattgagagaagagagatgattgcggagaagcccttttgggttaaacatgaagggttacagatattctccattgatgttcaacctaatggagaaaggtttgctactggcggtggtgaccacaaggtttttaatttctcttcttcttctattgctttatggttcaagatgagtttgcttatgttatgtagttcgtttgattggtggaatttgcttgtttttgtcttctttgaatcgaaattgaattggcattcgatgttaaagttcgtattgtaaggatggttcttgcattgcttattattatgtacatgtgaagttcttgtatctttgtttcttgtttcgatttggtgttgctttgtttgagctttgagaatgtttatacaatactatgaattgtggatgtagtttacttggatcttgacttgtactacgccatcatttgagtacctcttggttcgatgaagattgtgtagcatttgaatcatgtcactgacataggcttgttgagtatggatttataaagttcagaagtggtttttaagcttttagtacacagaactgtttttgctttcattgtttgtgatcggctagtgaataaagtttgttattttgtgcttggtgattttagtatcattaatcttaatctctaatatgaatataggttcgtatatggaacatgaagtctgttgacaaggatttgcaaaacatagatacaaaagagaggcttcttgcaactcttcgtgaccattttgggtcagtcaactgtgttaggtgggccaagaacagtaggtatgtagcatctggttctgatgatcaagtgattcaaatccatgagaggaagcctggttcaggcaccactgagtttggtagtggagaagcccctgatgttgagaactggaaagctgtaatgactttaaggggacacactgccgatgtggtaaacgactcttcgcttttctttattatcttatagtggtaatgtcagtggttatgtaataactgaggtatttttttctgattatccttaaagtaggtggatcttaattggtctccagatgattcgatgctggctagtgggagtttggacaacacagtgcatatatggaatatgcgcactggtatgtgcaccactgttctcaggggtcacttgagtttggttaaaggtgtaacttgggatccaattgggtcatttattgctagccagtcggatgacaaaactgtgataatatggcgaacaagtgattggggcatggctcacagaacagatggtcactgggcaaaatcggtatgcaatatttgttttagcattactgttaggatgtatttacatagatgaaatgattgtataaaggatttgaatactgattcaaactctattattacaattgcttccctgttctctggatgtttactgctaaatttttttttttctagcttggatccacatttttcaggcgacttgggtggtcaccctgtggccacttccttactaccactcatgggtttcagaagccgaagcattctgctcctgttttagaaagaggggaatggtctgtagcatatgacttcttaggtcatagtgctccaatcattgttgttagattcaatcattcaatgttcaaaagaatcccctctagtacccatgaaactaaacaagttgggtggagcaatggaacatcaaagtcaggggagaaagatttgcagtcatacaatgttattgcaatggggagtcaagaccgtactataaccgtatggacaactggaagtgcgcgtcctctttttgtcgccaagcatttctttggccaaagtgttgtggatctatcatggtaaagttttctcttttttggccacaatctacatattcaatgacttcatgatttacagtattgtctttataataggtttttgattgtgtctcaaaagtgcatttggttttgccatttgtgggttttaccgtttatgagtttattatgtagttaatttaggattcgtctatgaattcgtagatttcttttctggggtcacaattaatcttctaaaacataaatgaagaggaaagtctgattttaatcacatttttaccttatcaaaatacaggagtcccgacggatattcacttttcgcatgttccttggacggaacggtggcgatgattcactttgacccaaaagaactaggcgtcaggctaaccgatactgaactcgacgaattgaagaaatctcgatatggagatgtcagaggccggcaagcaaacttagttgagagcccagcccagttattacttgaaacagcctcgacaaagcaagccggtagtaagagggcggcatcggatgttcaacaaaatcaggtgactacaaaaccatctgttagtgtggagagtactgcaaagaggcgtaaatcgcaagtcgatgatcggaataaggcagcagagtctactggtcaaacattaaataaagcatcaaccttaaatcgagtatctagtcctgtgaatcaaaaagtgtatagaaggcctgacggaagaaagaggatcattcctgaagctgttggagttccccaacaggagaataatatcatgattaatggggaatcacataattttctgcctgcttccgctgctgctcctgctaagggagatagtggagattttcctgtggagattagcaatagggatttgtccgggaaagaaatagtttgcaggaaccctgatctgaaagagcgttcaaggattacagctcgtgctaccattactgagagccttgttattgagaaggttcctggaacctctggtagggatggagttttaaatgttgagcaatctgtaggtataaaagaatcttctagcactgatctgttgataagggtattcgattggaaagatggggaagctgcaccacctgtttgcttagaagcttgtccaagggagcatgctttggacactgttggtgcagtaagtacatcaatggtcaaggaaactgagatttcttgcaaaaagtcaggcgaaactctttggtctgatcggattatggggagagtcactgttttggctggaaatccaaatttttgggctgctggatgcgaagacggaagcctccaggtaagaataatatttttgctgcattgacttgaagtccctgtgtgtcattttatatccatagatcagagtagaccatgactcatgatgctttctgcttttggcatttggtgttattgatatcattcctattttaatggcatttatgatctggattttaatagctacagtccctcttggtgttgatattctgaattatatttttcctccaccaatttatttccatcgaagtcactacactttacactaatagtgatatttctgttgggacctgatcttcataggaagtgcctagttctagatccgatgcgatgaattgattaaactcttggtgaagcaatttctgaacgacataaataacctgaatgcgttgttgttcttgggatagtatgtgataacatgtttactctctcttttattttgaaggtttacactaagtgtggaaggcgtgctatgcctacaatgatgatggggtctgctgcaacttttattgattgtgacgatagctggaagttgttgcttgtaacaagaaaaggatctctatatgtatgggatctattcaataggaaatgcgttcttcacgactctttatcttctttggtctcttccgatgtcaatttatcttccacagtgaaaggtatgcttcaatacttgaatacattactggcttctcatcgtctaaaacacgtctcttgaggcaccatattatattttgaatcggatggtatgggtaactcagtaaaaagaatgaagaactggtatttactaattttcctcgtgggtgacttggtagtggagttactatcttggtatgaagatagctctgttattgatttggactgtatgcttacctagtggaatctgtaaaatgaatttaaacttgtctgatgcgaccagctctgctgatacattgttacgattttgcaggtacaataaaagtgatatctgtgaaattatccaaatctggttcaccgcttgttgttctagccacacgtcatgcattcctttttgacactagtctaatgtgttggctgagagtggctgatgactgcttcccggcctcaaattttagtagctcctggaatttgggctcagctccatgcggcgagcttgctggtttgcaggttgatgtcagaaagtacatggctagaaagccagggtggaacaggttgggcttgtcttccatttttcttttgccggccctgagatggaccacctattccaagtccttaaagaagcttatatcatttttacaggataactgatgatggaacgcaaacacgtgcacatttggaatctcaacttgcatcttctcttgcacttgagtctcctaatgaataccgccagtgcctccttgcctatgtgaggtttctagcaaggtctgtgcccttttctcatagaaactcttttttcagttcgaatgtgaatacattttagtataaatgaggattaagtctcgcatttgttaaaatatattctcagtttcagattctgtttcgtttttccacttgacaatgaagtgctatgggattacttttatttttgtgatttttcaactctatcatagtcaacctgcttaaggtctgtgcctttgtctgcagagaggcagacgagtccagattaagagaagtctgtgagagctttcttggacctcccactggtatggctgaagcagcatcttcagacacaaacttgtcttgggatccttatgttctggtgaatactttctcttgatcagagcctaaccttttcccaatcggaacgctctaaaactcgctttaatttgcagggggtgaagaagcataaacttttgagaaacgatattctacctgcaatggcgtcaaacagaaaagtgcagcgtctactcaatgagtttatagatctcttatctgaatatgaagacgtagaaacagcagatcctgcccccaagggctcgacacctaccatgaactgtggtggagtcccatcttcactggatcaaattggctctgatcctccagccatgacagctactactcctatgactatagacaatgacaaaccagtctctctggagaatccagcggctttggatataggtgtgtgtgagaaaacgggttctgaggaccgggataaacaagaccagaactcaagagactcgggctcttgaacttctctcgatgttttgtttttgtatatcaagctcagagagctgtgtaaagcttctcagttaggcgttgttaaagattgatagcagagaaaaaggatgagatgtaacagagggatgttgagagtctctcaggttagttatatagtgacccggtttgggttttttttttttgtttttgttagttttcttacttttcaaaattaacaatattttgtatcaatccatttatgtttctctttttgttgtgttttaatcaagttttaccattttagaatataatgtttctaaatataacatatactaaaatccttcttgaaggtcaagcctattctctttttaaggtgaaagaaaaatgtgaccaaggttgattctggaccattattagagatatgtttcgtactcaaatcaatctagcaacattaacaaaacgtttgtgggaggcttcttttgttttatttgagccttcatttcaaacccaaatattgtctcatgagaagcccactacatttttcattaggtgctcttattcagggaacctatgtccgaactccgaattggcttgatatgtccgatgcatttagacaaaaatcaaattgttttgaatatcatcgctggcttcttcatattttgttgttcaaaagaaaagttgtttgttgtacagtgaatatttgtatggccacaatcagatttagtttgatattatcaattattcaaatttatgcagaattttcttcaagttacatacatggcttgtatgcatattcttccgtagcagttctaaccccgacataagggatagggcagcggtgtatggacctcatatttaatattaaaaaattataaaaaaattgttagtggtataaaatactctcgaaaatataaatacatttttttttgtcacaataatacatatttatatttgcaaatatagaattttatttaaataacaagactaaaatcttcttttttttccctaaggctctttttacagttgggccggggctgatcagttcgctattgaagtatacatgtcaaagaaaatgaaggagaataaaccatcgtattaattaaatcgatttgactaatgagacaacttaattcagctttaatatagtttaaatttcgtacatgaccaggtaatcaaattttctaaacaaatggaacaatatcagatagggtaaactgttaccatctgtgtaactttgcaaattagtaagtctaaattataagaaacgatgacttgtacttctaaaactccagcatatcatataaaattttgaggtttgagacatttctataagttcagatttaattcttcctaacgtatgaggttaggtattttctgtcgctttaccaaaaaatttgacgtttcccatacgttttagcttgttatgtcattgttgcataatttatgaccaaccaaacctaagaccaaatcaggtttttagatagtccttttttcctttgaaattataagatgttttggttgtattggcatagattacaaaaattactccccccattttagattagctgtcgttgaagatttttacagaataataaaaaaacattcaatttttctgttttaccctaattaatgtattgttatatttgatatcatcaataaatacgtttaaaaatgttgataaaattggaaactttgtcaaacatctgcattgtaatatataatctaaaaaaaatgatttcttatattctatcaaatatggctaactatacacatataatttgggctgagctgtcatctttcgacatgaaattactccgaattatacataatttgccagagaagttatgttacataacaacactcatattcaaaagaaaactagatgtataatgtattagctattatttaagtaacactaacaactaaataaaatagaatggatgaaactataaaaaattaagaattattattgaatgagtatatttttttctattttggtcaaacgtcgaggtggagtttaagaaaatcgtgattctaaaatagtgcaataatgaaatattaaaaaatcacgttatcatcttgttcttttattttccactattttctcttgaaatttaaatgaaatatgttattttccaaaatgttgttacaaccgatttactatctcataaatatgttcttttgtgattttaatttttgtattattaatgttcccctgctttttgttgactaaacaactcgttactcgttagatatatattcacgttgagaaaaaagcgtttaaccaaaacacttaggtatattgaagagttctaaaattagaacgccaaccttccaaatcaacacacctacgacaattctagtcctacaacatagatccttctagcaaaccacaaggaaacttcttgtggaaaacactaacactatcctcactcagttactctcgtattgctctacctagagtttctaattctgctatgttataaaaattcttacatacttattcttttttttctttctaaacattccattcgttttaaaagctaggcccacgattagtagttaaaatattttaatttttaaaaatatgggttacatattttttattctttttagagctccgagatttcagagcatgttctaattggatatgtgatatttaatcagaagtagttttaatattgttttttttttataaaagaaaatgtaggtaggtttacgtacaagtagtagatatgatggctcaacaaaacgggtcaacatttacgggtctatatatattcgtgcctcatcgccgaaggtgttatggttcaaaacaatctatcgtacttagttattaattggatagatataagtttcttcaatggactccaattgcattcagttcctccatgacaagacgattctcgtcaccggtgttcccggtttcctcgccaaaggtaccaacttggatccgttaccatacaaacaaagattttgtgattcagtccaatgtttgtgtttattgttttagtgactacggttcattactcattacggcctttgaatttcatttgcatggcatatataacattaattagtgaacgtaaactaacaatttttcacattttatcactggcagttccttatttaatttggtattcgtatatatttttcataaataacttaaactttcgatattatattattcattaatttgttcaatctctttttgtcgtccatagagcaataacttctagttttgtctctttctattttcatctagaatctatctatttctaattttgactaatgctatcagttgcgatggtgaactacttcctctctccgcggaattttctcatcaaaactattttgtttaactgaataaatttctaacataattagtgactttaaaattttaatttaacttataatttttataaatattttagtgtttgtggagaaaatattgaggattcaaccaaaggtaaagaagcttttccttcttttgagagcagcagacaatgaatcagccatgcaacggtttcacagtgaggtaaaaataaacatttggtcatatatataaactaatatctatgaagattaaataagctttaaagccattttttttatgtaagttctatattaatgttttggaaatatgatcgaacttacatgaaatataattcaacaggttttggagaaagatctttttagagtgttgaaaaacgctttaggtgatgagaatctgaaagctttcataacagaaaaagtcgtacctattcccggtgatatatccgttgataatttgggagtgaagggttctgatctcttacaacatatgtggaatgagattgatatcattgtcaatgtagccgccacaacgaactttgatgaaaggtgtagaagaaattgtggttgatacaatcattcaacttttatcttataagaagatattgaatttttaattaaaaactaaatttattttgactttttatattttattttggtttgattaaaatctaactttaaatcatgtttcttatgtgtatatataaagatatgatgttggtcttagcgtcaacacatttggaccgctcaatgtcctcaactttgccaagaagtgtgttaaaggacagttgcttcttcatgtttcaaccggtgagttcgataatcttattattttcaaaaaacaatcatacagtcatagacacctctaagggtgtcaaaattgatcaagattcatgggtcaacttaactcaattcaaaccataaaccctaatgacttgaaatttttgactcaaatgaactgatggatcaaatgagttattggatcaattggtttgatgaatacaatgagttagattgtaatggttaatggtttacctaattatcccatcaactttggtaaaattaaattaaatcaatatcaatttaagtttaacgaacacatctaaaccgatttaataaagtcaatttatttcccaaatttctaaaacatacaagtgatgacattgagaagacggttgtcgatttaaacccgtaatttttccgccaaaaacgtaaacccgtcatttttacacttcacatttgtattttggtagcgtatgtgcgcggagagaagtctggacttttacatgagaaaacatttcacatgggggagacattgaacggacatagaaaattagtcattgagaccgaaatggagctaatgaaacaaaaactgaaagagctacagaaacaaaattgttcagaagaagagatttcacagtctatgaaagatcttggaatgtcaaggtgatcagtgtaataatcacaaactagagttattatttattactgaaaatatccactgacctagaaccaaactggtcttcattattagggcaaagcttcatggatggccaaacacatatgtgtttaccaaatcaatgggagagatgcttcttggtaattatagagaaaaccttcccatcgttatcatccgtcccacaatgatcactagcactttttcagaaccatttcccggttggatcgaagggttaaggtaaatctataccggttatagattgatcatggaaattattttagacttttgcatgaattttcaatccatgacgataccctttattttctatatatgtgcagaaccatagacagtgtgattgttgcatatggcaaaggaaggcttaaatgttttcttgcagatccaaactcagtccttgatcttgtaagttcaacttaattttggttgtggttgtcttcaagtcaattatgcgtttacgtagacgtaaacataaataaataacactatcgaaagataaaacaataatatataaataacgtaatattttcttccatttggtgtttgtgtttaaaattaacaaaagaaaattacttcatagttctaaaaaggtgtaatttggaagaaaagattaccatatttaaaatctatagtagataaaagcaatttcacacgccaaaacactttcaaaggtttagtttgtccattggttgactaacagactaaatgtacccaaaatccagagttcaagtaagaaaacaaggctaggatatttttcagtgtgtatagcagagataaataagcagaggccttaagaccataacattctattcgaatggcacacaaaattaataagctagtaaacattgctaattcttccatgaaagattacatatgctatattaatttgtgattattacacactatattattagtcattgtggtccactgagaatgtattcacagatacctgtggacatggtcgcaaacgcaatggtcacggctgcggcaatacacgcagggaagctaggttcccagaccgtgtaccatgtcggatcatcttgtaaaaacccgatcacattcgaacagattcatgatctcgcggctagctacttcacgaaaaaccctcttgttagacgcgatggttcatctatactagtctccaaaggaactatcttgtccacaatggctcagttcagtttctacatgacccttcgttacaagctacctttgcaggtacgaatatttttgttctttcttacatattaataataaaaccaaatgttgaaagagaaaactaaatccaatgagaaaatattgaaaagaaaacgagtttttattaattgaattcttacgcatatattttcttatattatcagatgttgcgattgatatatgtaatttatccttggtggaatggtaataaatataaagacattgaccgcaagattaagctggcgatgcggttggtcgacctctacagaccttatgtcttgtttaagggcatgtatgtatcaatctcaaatttttcataaatgacttttgatatctacaattttaatcttcattttccagttattttgacgcgagattctttttgttttgcagatttgacgatacgaatactgagaaactgcggttgaaaagaaaggagattaataaagaaatgtatggtttgtttgaatttgatccaaagtctattgattgggaggattatatgacgaccattcatattcccggcctcatcacctatgtactcaaaaaataaaacgttaaaggcattaaaatgtttattgtgtaattacatttcttggttacataaaatttgcttggaccgagtaaaattgtgtattgctagtgagttgaaatttgataacaactacaaggtgtgtcttgcattattaaactagttttatatctctcatgtaatgtgttaagttcttagtttacaactagaatttaatttcttgtttcaatcctatcatctgtcgtaatctttaaatgtaacaaatgatttttaaaagggagcttaaatttgtgttagtactttttgtgatgtccatatatttcttagacgatattgatgaatatatacaatgaaagaagttggagagtgtcatttacctataacatattttttgaaattcgaaatgttggaaaacaatccaacattccacatccaaaaagtaagaaatagtagtttaatatataagttaaatctaactccaattagtatgaggtttgtaaaacaaaagtctataaacaagtttgtacggataggccacttccaaaaaagacactatcatactaatggagaagaagaagcgggtcaaccgcaaacccgcggtgaaaaatggacaaactagttttcccgcgatccaaacagaccaggaccacgaggtccacgtttttttggcttcttaacatgggtctaaacccgtcccgctatatccctaaacggaccaggcccgtggaccttaggtccgattgacatcccgacggagaagttggcgtcttggagaagccccgacacggaagcttgaatagatgtgctttacacggctaacccacacatgtttgttcctcgctgcttacctggactgatcgagtcgagctatataaactcagattggtatgagctatgttttaaaatatatattgttaatttgttatagatttcaaccccaaatgaaacaggggacgtcggttgtatggcagaattttctaaattatatatacacatgaggtctgatttagccatttgtcgtttcgaaaagaaaagaattattctttgatagcatgaataaagattagaatgttgcgcgactatatatatgcatgaatcacaatgccaaattttgtgatcccatttgaagattgatacattcttcttgttctattacttgagaactttataaaatgtattttgactatttgagttagactcttattgtagtggttttttgtattactggacacattatttatttggtattcatgtaaacaaggtgtgtaatggattatactactgttgttattgtctcatattcgatagttggcacacaaacaaaagggtgaaagtaatctttaattctatttattttgtttattgttttttatataaaattcttgaataaaaaatgttgaattccaagaagttactagtcagtatgaaaacactccaaatccaaaaaggtgcattggtatggtcaaacaagtttggtgccaacttatggacattctcgtgattttggaattgagtgagttggattttgcaaagatctttggagaagtgtatcaatttctatgtcttgttgagataataaaatcttctttcaagaaagtaaaaagagttctcctccgcctacgcacaaggagttgacaaaggtcttccaaaaagaagatggatcgacaaaaaagactttacgtgtggtttagttcttagattatcaaagtatggaaaaatgcctctaggcaggaccgccttttttttttctttatttatctagaacaaatacacacacaaaaacgtcatgggttctagtctactttagaggaaggattatttcctaagaaaatagtgtaaaggcagtttttctgatccgtggagattaagaggtcctcatctaaataaatcacaattataacttttgaagtaattctgagataaggacatgccaacatcgttcctatttttccggtaccttaattgagtgtgaaatcacgatgtcttattaaaaactagaaaatatcccacgtgatgcgtgggtaaaatataataaaatatataatattctataactaataaacattaaaatatatttacttgttaaaaataattcaataataaatagcataaatattgtaattatgatatattaaacaaaaaagttttaggttttatgaagggtttataatctaaaactaatttttttttatcaaattgatcagaagaactatatttaaatatggatatactatagaaactttgggttttatttaaatctatgaaaattatatgcaaatgttctttaatatttagattccaaatttgaaattatatattatatattgattatagtatgtgtgtaaattataagatttacaatacattcaaagttgtgagattgacaaagttttgattaattagtaaaatcaacatatatgaatattgatatattgatactaattgatattaatcgaaagaactctaaaaactttataaaatcagtattcaaattatttattatttattccatcattgaataatatggtaaaaacttatgaatatatatttgtgaaaattattacttcatttacccacaaagacatcaaaaagggagaattacgatggtcactagaaaacttaacaaaaatataacttaaaattcaacatcataattaaaagataacactctttcaactattatgatcataaaatgacgccaactcacatttgtacatatgtcaccttcttctaactctcaccataatttattgtttactacataactttgtatttttttttcctgtgaggagcaaaaatatattaaagttttctaactaaaataaaacagatttccatcttaaacattccactcaaaaccatgcataattaagaccaaacactcgcaaaacatcttgggagacacttctcatattattctgtctgacccaaacaaaactataagaagaattaacatcatctgatagaatctcccaccatcgaatgaaataagaatggactttaagcttctttgcttgattagggagatgtggattagaggttttttttttttttttttttgttgtgaaaacacttcatattaggtttaactatgaaggtggaaaataatttacaaaagacatgtgagatgtgaccgtgagattcctaattgataccatatatgatggacaacggttttataagtaccataaattgagaacataatacaaacactaaaaacgaatacacatgtacaggagatccatttcctactttttagtctctaggcaccaaatcaacttacttcaacatgtacatgcttcgtctacattcagctaaatgtggtttagatgtcttgataaatcgagaagatgctttcatatgtatggcggaagttagaggcttgttcaggttcttaatccttatatcaaagaaaacgcttgtcaatatgataggacacgtacgttatacaccttaacgtttgttttcgcatatcaagtgttgtggtttgaaaacataagagcaaccacattggtcatttatttgtgggtgttttaaatataaaattatttaaaactaagaaaaaaaatataaaacaaatagaaagtgtccttagttttagattggtgtctctaggaagacatttgagacacctaaaaaagggagtgtctttaattttattattaatcaatgttaaagacatacatcaaaaattgtctaatgaagatgctctaagcgatacaaacaaacctatgaatttaactaattttaaagcaatttattatcatttaatactgaatatgcatacgttttttttagctttaaagaggattgacacctttgaactcaagttggtcaagataggctggtttatgagttatgatctttaatttttataattttgataaattaattagttaatattagattatatacactataaaaagatagttaaaatgtttaaacccatatacattttaggtcaattatataaaacaatgtgctataaactcaagattaacaacaatattcattagatttttcttaacaatattattggtcttttacttaacaaaaatattaataagtttacaattttgatttatataatactgaattgatattttggttccaaaacggttaaaaaaaaaaaaatatatatatatatatatatatatatatatttttttttttgtctaaaagtaaatattataatttgtaatatttgttatagtttgaaataattttagaataaaagaaattgatattttggcgcaaaaagtatcatactaatattttattcttcaattcctgacaaattattatttgagaaattatattttatggtaattatagaaattattaataaatgatacctcgttaataaagataaataattactaaaagttatttacaaatggtaagagatttgtttaagataaatatatataattaaattgaatgaatatagtaaatagtgtatttaaattttaatatagagaaatgacacgtgtcgaaagaatagagcgccacttatcaacctcttagaacatgattttgagaaaaccttactttattatataaaatacaaattttggcacatagagcaagaaatttgtttctcaacaagtaaaacaaaaactatagaagcaaaaattgaagtttgcataagaaacaagcgacgttaggtcaatttttttttttttcgaaaccttaatcccgtaaaaataggatcaatactctcataccatgaaaagtttaatgagagtataaaatacaaatgtgtataggaagaattgtaatatactctcctaacaataaagtaaagttgcattctatatgagagtaatatgtttatatttagaaacttgatttcctaatataagataaagataaatgtaaatattatatttagaaatatgtttaaaatattactaaactagatattgtaatcttatagatttttctcgaattttgtgatttccatagtcctaaacaatcatctcgaccgtcgatctccgattctcctaatagtttgtcccctgtcgattttgtggttaggaattgaacaccttcttctacttcacatttctattttggtctcattagctatatagtttgcagcattccttactacgggcctttctttttccaatcatcaatattgttgtcatataattaagttgattcttcagtttgctagacgagttcatccttttaaagtattaattaagggattatttaatagtttctctctttgttttgtacaacatctgttagattgtaaaactgagtgtttagactttagaccgtacgttcaggtcaaaccaaatttttgatgatctttaaacatatctttaagactagaccaccaatcaatgagttttgtttaatataattctgcagttggaaacaaagatttgattctataaaatattaatcctacgcactgcttgcatgtttttataatttgcatttcatgtatctttttcttgatatttacgtttccttcttttatgttcaacatgtattttcatatattatgaataactaatattttaccatagttcattttcttttgatagattaagcagagttcattgagatctgcattttatcaagataaaattatatattttaaattgagttaaaaatggttttaaataataatactctgttctattttggttgaagtttcggagtttattttctaccttttaaagactaatattattatcatttttacgagaattgtagtttttacaatacatagtaactggtgtctacaattgtgcaacttattcagtttgttggtgtttcaagatattcaattttccgtaacaccgtaaaagggaggaagaacttttgtataaatacatgctgattaaatgtcaaaaaaaaaaaaatgctgattatagtgcttgttttgatatatgagttaacaactaattaaacactacaatatttcaattttttgaattattctctatattaactataattcttaactgtattgtttcattcacggtaactagtgatcaaaatctaccacttgttcgaggtcttctccggtaaaaagaagaatcatggctagagattttcttgtgataaaaaatcgtggctgaagttactgatgatttggtcgagtatctaatgtaaaccaaatcaagaggaaataaagttaaaatgttaacttaaagagcccatttatacggtacatcaattttttgttctatcaagtgacactcggttaagtaattttttaaaaaagagatcaaaaaatataattagaaaaaaataactagttccaatccgcttgtggagacagatatttccaaagtgatcagtttaaaaatagcctccagttccacagagattagaactctgatctgaactttgaggttataaaaaacaaattttgttgttcttttgttttttggtttgtgatgattttatgggatgcgaaaaaaaagttataagctttagaggataatgaaagaataaaattttcaacttttcaaaaacaaaggaaaactataaattttaaataaataaataaacattgatttagatagtaattcaaataaaaagtattcacgaatgaataagtttctatttatcttgtaacaatgtatcttgctaggaaaatagggggaaaataatattacaagagttactagataaaaatacggtgccatatctatcaatgaccgtcacatgaacgaaacatgttataatttggctgataacagctccctccaccaaccaaacagttgatgttatgttatgttgttcggttcaaaaggctattaattggagtgcagtctgcaatgtcggcatatctaaccacattcgtttgtgataaccatttttttgacgatatcaaggttttatatgtagatatcatttagcagaatcacgcttttgttctggccatacacagtaacaaaatatactttaaacagcgtaagagatgaatgttcaattagttttgctttgattttcttgtaatgtcactttacgacttaaacaattacttttaaattgggttttaccgcttggattataatgctactttagtaccacttcgtcttatcattgggttttaccgcttggattttttattttatttttggccaaaagttttaccgcttagtaaaaatcgaattaaaattttgaatattgcagtaaagaaattttgtaatatcatgtgttttcaattcaactaacattgatggcatatcaaattgttacgacagtgtttagcaaatgttttcaattttgtgcatatttcttaaaatttataattttgtgcagatatagtattcattcacttcattctagtaaagtatagtatatagctaaagatttgtctgactaatttagcgatgaaaaaacactctagatttgtagctaattcatagcaaatacattgccatttagcaacaaattaaatccaataaggaaattattggtatggcaatggatggtgataaggaaatctttgccgattagcaacgatttagagtcctagccaactgtcactatagggtaaggtttggtgacaaagttgttgtgactacttctttacatgagttcttaaaacgtttggacacaactacgatggagaatcatttatatttaaagagatttatgggtagctatattgcatgaatatgtcatgcataacgttgtgttttttctggcgaaacatcatcaagcatggtaggaaataaaagaaatataaagaattgttgtcctattccagttgaagttgatcaggttgacaatagtgttgatgcgaaaacaaccatctcacgaatttctttaaccaatcatttaatcaatctgctttggactctagccaaaaataataacggtgagcttttcaaattgcatttgcattgcatatgtttgttgtgtttttatattttttgacttatagctctgaatggtcgttgttgtgatatcccaactttagagtgggaactggtcgtgattatgatcccattagtagagttgatactggtccgattggaacatccggtataacacccgtgcttcatatgctcataaggttttatggctcatgtccaaaaaataattggacccttttttgtatatatctctttgccccttttacatggataccattttgatcttacaaggtgaatatataatgggaatgaaaaggagagcataaagaagagtataacttgtgaataatagtagagagagagagaggttgagaggtttaatttggacttaatttataattcgtattcactttgatacaaaatgagggaaatcaattttgaataaaaatggagcatttattggtatggccgtacgatgttacaagccgcgtaaaatgttttttgataagtcacaaaacactgtcgtaacaatttgataaaatcaaactgaccaccgttgattacgtaggagagccacatgggctcctttgaaacttataccacatgcaaaggaataaaagtcctttagtcaaatatacacatgtattatgcacaaaatttatatcaatcagaattcaatatgtactattgagtattggagcatgagtttttttttgttcttttactgttgttgcatattgacctatattgttgacccatattatctactatttatagatctaccaacattaggaaaatggaattaaagttattagttttctctatattttaatgaataaatagaaacacataaccccgcttctaagaataataactatttgttggcctatattcgtccatatatttcatatgtacatatctgtatgtcaaagtagttgtaaaaaaaaaagctaacgtatcattctctaaaccaacacagaaattagttttacaatttgataatccttggaataagaaatttaaacatttgttccttaagaaactcagtttctttccatgagttatatgcttttaatttataaggtaacgaatatataatctcttacgaaagaaaaaatcctaaaacagtttcagacttactaaatttaataaggagtgcttatattactcttacactaaattttcttaatcgaccgacttagagagaaaaacttacaaaaattgaaaattttcatacagattaattgtattaataataaaattttattcaaaagaataatcactaattctaaccaccggtattaattaaaaagatagtcaaaatttggtagtactatgctgatgatacccatttactaaactcaccattcaaattttgttctttccttttatattaattaaccacacttgttcagctttttcattctgatccaatttttccttatgtaccgtccatcatattacaaccattcggaccttatacatatatagttcttcttattatagaataaattactttcacagtttcacgttaaaccaaaacaaaatgtacaaatactcgtaaaacatttaattgatcaagcataaattcgtaaactgtttttttttcttttgatgaaaatagtgtaaggcaagtttaatacattaaatattacgcatagtcggtgattcgtctatacatataaaagacttggagccgaacaaatagattgtgttgttttcaaacaaattgcccaaaatcttgcaagtagaaaacaaaactgtaccgagtcaaaatctgtcgtcagccggctatcaagaacttttcttttacaagccccttcttagttagctcaagctggcatatctataaatttatgatgtatgattttatttttgttatatatatattgtacggattaaaaatgtacggatttaaatctagaaaataaaaataatctcgttatgaacatttaattaactgataaacattctcagtgttttcttctttcagattttattcagtttttataaccatactttaaattaaaccttacaaagagtttgatacaaacaaagccaaaactagctttgcaaaaaaaccaagtttttcaatgcactaaaaaatatctgccaaaacaccatggagctccgataaaagggtcttcgacttgattgatgtaaccaggatcaaagttgttttttgcactttaaattgtttgaaactagtaactaatataaataaaagacttctcgctaaattatggcaaattttcttcttaatatattaaattctgatcatataaggtcagaggacattggacagatattggttttgtttattttgttaggcttattggaggagggtacaatagactttcttgcaacgtccttagctgctataaatactcttatactacaatgggtatatttgcctcattaataacttcttccgaattagaccaaagtccagacaatggaactcaattgtgttcaatttcttcgaaacaagacgattcttgtcaccggagctaccggtttccttgcgaagggtatgtcttaaatttctgctaatttttgttaattattcaagatttgttatagagtgttaatgacttcgttagtgctttggcaacacagtttcaaattaatagtgacatataacataagatttcgtcaaaaatcgtgattgcttttgatatctcctttttttatataacaacaaatgttcaatgaagatacttatatattattgattttttcatacaaaaaaagaagaaaaaagaagaagaatatacgtataaaatacacgatattaataattaagatgtagtttataacttataagtaatgactgttttagctcgtgtgatccataatatatattataagaggacctatttatattttcattgatatttcttagtttttgtggagaaaattctgagagtgcaaccaaatgtgaagaagctgtaccttttggtgagagcatctgacaatgaagctgccactaaacgcttacgcacagaggtttgtgtatataccaactaaacctaatttaccacctaatacttaaaagaatatatatttgatgttgattcatgatctgatttattgcattaaatataacaggtatttgagaaagaactttttaaggtattgagacagaatcttggcgatgagaaattaaatacattgttgtacgaaaaagttgtttcggtcccgggtgatatagcgactgatcaattaggcataaatgactctcatcttagagaacgtatgcaaaaagaaatagatattgttgtcaatgttgcagccacaacaaactttgacgaaaggtactagctacaagaaattttatataccacctttataggtatatttttttatttctatctctacttacatataaaatttatctatccatatgaaaaaaaaaaagatatgatgttgggcttgggatcaatacatttggagctctcaacgtccttaactttgccaaaaaatgtgttaaagttcaattgcttctccatgtctcaactggtgagtctttgtcaaaaaaatgtttgcatattcaaattcttttactctccatatggttcttgaaagctttagtcttacttatgttttgctatagcttatgtttgtggagaaaagccaggtctcatacctgaaaaaccattcatcatggaagagattcgtaacgagaatggtcttcaattggatattaaccttgaaagggagcttatgaagcaaagattgaaagaactcaatgaacaagattgttccgaagaagacattactctttccatgaaagaactcggaatggaaaggtgagtagtgttgatgattgaaatatccctatataggttactcatcagaatagaatgaatataattttgttattacgttaatgattagggccaagcttcatggatggcctaacacatatgttttcaccaaatcaatgggagaaatgcttcttggtaagcataaagaaaatctccccctcgtcatcatccgtcccacgatgatcactagtactctttcggaaccttttcctggttggatcgaaggcttgaggtaagtttattatggattaggaatctaaatattgattctaaaagttgaaagtaggattatgttagtccatagtgattgaaaaactcaagatttcttgccattctttttttttttttttaattcttactaattacaattgtccacaatactggtatttatatgtagaactgtcgacagcgtgattattgcatatggaaagggagtgctcaagtgttttcttgtcgatgttaactcggtctgcgatatggtatgttattaaacatgttcctaaaagaatttacaaagttatatgcctcatttcttatatgcatatttaagagaaaaaaaaaattgaagaaccaatgtttctatgcgccaagtacacatgctaaatgacagtcatgttgacagataccagtggatatggtggcaaacgcaatgatcacggctgcagccaaacacgctggaggttcaggggttcacatggtgtaccatgtcggctcatctcaccagaacccagtcacatttggagagattcatgagattgcggttcgttactttacgaaaaaccctttgcgaagtcgcaatggctcactcataaccgtctcaaaagtgaggttcataccaaccatggctttgttcagcctctacatgaccctacgttacaaactacctctccaggtactaacatgaacaagagttttgtccttttagctaaatagaaactcaactatatatgaattactaatattacaagtttttttttcttgtagaatatactattctgtttaatcttgtgattccgtaaaagcttttaaagtatagcgtacttaagctaatttgcccaaaaaaaaaaaaaaagcatacttaagctaattgtttcaaaaatatatcatttaaaattatgtatcttatcataaaaaatattatactatttataccatttataatctattctggttaaatttatacaatttaacaaaaaaataaagcatacttaagctaattgtttcaaaaatataccatttaaaattatgtatcttcttataaaaaatattatactatttataccatttataatctattctggttaaatttatacaatttaacaaaaaataaagctaaatattttcttatggcatccttttttttttttctggcgatagtgttttgatctgtattgttagttcttcatttttgttcaatcaatactaaattgtttttcacagatatttttctctaataacgttttgatcttttagaacgaaaactaaatattttctcatagatttttttttgtagtgttttgatatgtattgttaattctttctttttcctcaatcagttattaaaactagttgacataatatatccttggagaaacggagataaatatggagacaagaaccgcaaaatcgagttggtgatgagattggtagagctttatgagccttatgtactcttcaagggaatgtacgtatattaacttcaaattttctgctgtagaatttaaatctctataattttaatcgaaattataaacttgaactataatattttatactcacatagtattaatatacatatttttctcgcagattcgacgatagaaatacaaagagtttatgcgcaaaccagaaggaagaggagatcaaaaatacagaaaaattgatgtttgatttcgacccaaaaggaattaattggggagattatctcacaaatatacacatttctggactcgtcacacacgtgcttaagaagtgaaattttatttatttctgcatgtatctgcaataaaacagatcatgatggaaaatattgtttgtttgtacgccaaacgtaattattttaaaataaaacttattacctatttttaaataatggtctcccaattccaataagccttcgatatttagattgtaacaaatttattgttttgttttacaaagattaaatttgtgactttcaataagttttaatgttgggagatttgcaaaactacatttttttactagttttttgtaataatatctttttatgttatatatttttaaaaatacttcttcccttaaacaaaattacaaaattatcttcatctaataggaacatgtaattgaaaactaaaattttcccggaaaaaaaaaattcccgccaatttgttttctcgtaacaaatttttttctgagccaaaacaatgtttttaaaaatccttgtaaaattgttttggctgaaattagatttataagggattttaaaaagattttaaaatatttacaagggattttaaaagggttttaaaagatttacaagggattttaaaagggttttaaaatagggttttctgcaaagtaacccccaaagtcaatttcgtttgcaagtttacctttcaagtccgaattatgcaagtcaaccccaccatctctaaagtcaccgcaatacaaccctcctatgtatcgatgacgtggcactcgataactccgtttaaaaacaaatggattttgtgcaaaaaaatcctcaatataattttttgttgcaacataaacctccatgtcaaataaatacaggtaaaaccacaatttgaaaaatctcctacaacatagctctttcgtgtatcgatgacgtgacagttgataactcatttatagattttataagtctatcgaatatattactttaatgcatataatttaattgagttattgatttaagtgttaaataaaataaaaccgaacctttaaccaaacggttaaccaaaatatccagaaacttagaaaatatccagaattaatacccataactataattttataaactcaaaatattaattatttttcgaaaaaatcaaattccttaaataatcaaaatatctaaatattgttagttatatttgtcaaaattaaatactattttacaaaataaaaccatattttaattttatttctaatattttcttctttaattttttttttgctaattttggttaatttggtcagttacagctatcgattcaaaaaattaattatattattttatttaaaattacggttatcatttgtttaagtttacccattgcactttaaataaacgactcataaaatctctatctattgcacatgctctaaaataagttatcgactataacgtcatcgatacacggaagggctatgttgtaggagattttttagattgtggtttgacctgtatttatttgacatggaggtttatcttgcaaaaaaaaattatattgagggtttttttgcacaaaaatctttatgttttcaaacggagttatcgagtgccacgtcatcgatacccgggagggttgtattgcgggtgacttcagagattgtgggattgacttgcataattcggacttggagggtaaacttgcaaacgaaattgacctggagggttattttgcagaaacccattaaaatatttacaagggattttaaaagggttttaaatgatttacaagggattttaaaaggttttaaaaagatttacaagagtttttaaagggttttaaaatatttacaagggattttaaaagggttttaaaatatttacaagggattttaaagggctttaaaagatttacaaaggtttttaaaagagttttaatgggtttaaacaagggattttaaaagggttttaaaagatttacaagagatttttaaagggtttaaaagggttttaaaagataatagacatgacctgaaacccgaacatagggttcgattggtgacctataaaggaatattaggaatgaagagaaacatgactaaaaaagaacaaactcaaagagaaaaaatgataaaataggaatgaaaaagaatgagtgtaaaggataaaatagccaaaatagacatgtctttatcagtagaacctagaaacccgttaatgactgttaatctgtccaaaacaacgtcgtttgagaataatcgaaagaacataaagatttttcccatatgaaatctccataccaaaaagttttaagcagaacccaagaacatagtttgatatagagataatcgtagtgccattaattggaagcaaataaaggtgttttcgtttatatatttgttttaaattttaaaaggaatcatggaagcaaattgaagactcattataagattgttcgtcttgtttgagcggttgtagaaacagatttggggaactggggtttcatttagaaaacaatctcgattttctttcgattattctcaaaacaaagtcgttttagggatctaatagagtcgttaacaagtgataatgaatgttataagttcttttaatgaatgatgacaacatgtttattttggcttggtcaacgaatttctcatgttttaaatggtagtcaacgcttagttcatgtttaaaatggccacatataaagtcgatgtttaaaatggccacaatttaaaacttgactaataaagtcgttaacggatgataacggacattagaagttccgttaatgactgataacggcatgtctattttggcctggtcaacgaataatcatgttttaaaagttagtcaacgtttagttcatgttttaaacggccgcatacgaagttagtgtataaaatggccattttttaaacgttgggggattaattgacatttttcccgaaaaatagaacaaatgttactgtaaatgataaccaaagtatagaacaaataataacaaaaattaaaaaataaataaattattttctaaattaaatattaaacgaatatgagtgtaatttaatttcttaattaataaatgtttaattgctttcctgtttattcctcatcaaatttgggaagaaacaattttcttctatgattttttaaaaaataaggaatgattaggaataatatgagatccacatgttacaatttaaaaaaaaaaattattgctaaatggtgaaaaaaaagaggaacaataaggaacaacattgttcatgctcattattttcttaaaaagtggttagcaatcagaccataatagacctaacctatcgttatcagttccactctctctacacacctttttccctttgttcgacactaatttcaaaatggaatctctaaatccattacgttcattctctcaagctatgtcgagaaatcgatcacatgtatgatgttgtctccttcttcctattcgattattatgttaaattgtatcttgttctttgtctctgtcttatcatacgttagtgttagttctcacttcgaactatgtctcaagcttgttcttcgactttgttagtgctaattttgatctttgcctctcttgagtcacttttgtgttttgattatttttctttgtatacttcgtcgtctcttttgatttagttttaggtttttgttcttcttcactaactctatgttcatttgtttgtggtttttattgttaatttgtgtattcttaattaaagttacttctttgtatgcttcggatatgttatctctaactcactttgttcttcatatccaagtgacttctttgtcttaattaaagttacttcttttgattctcgtctctcttgatttagttctcatcaattctgattaacttgtatgtatttctcttctcttttagatggattcttcctcaataccggaagacttcaataccaagaatgaaaatcaaactcaagaagcagaagttgattggaggacttctgataataaaggaaaaaggaaggaagttccagggaaaggtgcatatatatagttttaaggcaaagactacaaaaataggaaaacaaggtttacagtgtgggagcattatacaatattcaaggacaataaagtcaagtgcaaatgtcaatattatacagagatttttacttactccgctctacaatatttgtgaaagatttaaggatcttattatcgagaatgaattgtatcgagtagcaaaacaacaagtaacaacagtgaaagtgactttatattgctaagagtcgtcctctacaaaagattgtttgtcctcttttatagccacgagctctaatgctcctattgtcatttaatacgaggcttttcctctaaatacattgattacaatatctgccatcacccctctgttgcttaattacaacgcgaatctcatcctagcatttattggtattagctccggagtttcttacttcttttccaagctcgtctttcgctaacgggccattttgttgctcaattcgaggcctatcatttgagtcgacaaatgttgggcctcaacttgcgatatcggcccagttaaaggtagcacagcatttcgggttggatcctgtgcgagatttgacaccaacggtttgcaagccaagttttgcaagctaaaagttcaaaagacgtaaatgctaagattttctatcaatgaatattaaaaatcatgtgtaatcccatgtatctaggtgatttgacatttcatgtcgttttgcttgcttggatgttaccgcccatttttatttaggccttcccctatttaaacgaatggactcttggaatactacacctttcattgaatcattgtaattcctttctctttaaagaacaaccctctgttctcttcttcattattttctcgttccacattaggttggctagaaatatttgggataattctagttaaccctttcactggacgttctatgtcaaaatccaaattccatcaaaattcaacttattaaatttatgatttatgcaatattggggatgattctagttaaaccttttcattggcttgtggactttacccttgtctgacggtcggttcactatttttggaggtttagagaattgcttaacgattgtacaaatcaccacgtaatattttcaaacattgatcaactgaaaaataatgtgtttcttgaagtttaattggttgtttgagctaacttcttaggttgtgggaaataaatgttaatcgactgtcacgtcatcgatacacggaagggctatattgtaggagatttttcatattgtgtttgacctgtatttatttaacacgaaggtttatctgcaaaaaaaagttacattgaattattttttgcacaaaatccttattttttcaaacggagttatcgagtgccacgtcatcgatacacgggagagttgtattgcgggtgactttagagatagtagggttgacttgcataattcggacttagagggtaaacttgcaaacgagattgatttggaaggttattttgcagaaaacccttaagtttatgagagtagtttaaacatctgtttgagatttgaagtctataaatttttaattttttttgtcaaatgaaaattacgatagcaatttattccttaatgattacttgtattaattgagttgatcgatgaacctagagattccatatatatccaaagttttttgcttagtgacttatctgatcgttattcgttgtttactaactgcctttagtttaattgttcgtacataatcatggcaaaaccctaaaaacataatctcgtctttattttattttttagcttgatgctcttctctatatataggttttttgtgcatcattcattctttgtgtattgatcttacgtacttcaacatatagttttgcatttgcagcatatgtcatgtgtaattatttaagattttgtttatctgaattgcttagaaaattaggcacacatcactatagccgaagattggttgtgtaatgttggtaagaaacattgatcttagaacaggactaatgaatagaataagataaaagttacacaaacggctaaatttgtcgtagaatattttgttacttcaagagacaaagttggtcataaagtgttgatcctatggttttaatagctccatgagaaataaaattgcctttcaaggttctcagcatcttatgctacttcattagtatttctgaatgacctaacatcaacagtatgtaaagagctcacctagcaaagaattattttgaaacaatattaggttttgtctgattacattctaccaacaatatatgaatgggacaatatatttctaaaaagaaaaaggacatagaatagtattggcatttggcataatagatgaatgcttcttatctttgtagtcttttgttttctatcttttaaatagaattttagaactctccaatttatatagcctgaaaataaccaaattagaaaaatgacaatcagttttttgtactaccataaaatatgaaaactacagcacaaaagatctattgcctaaaatttagataaaagtttgcttatcttcgcaatgaacatggcgattagagagagagagatgacttttatgtattgtcacttttaggtaccacgattatgattcgatctcttgatatcaggttaggtgctaatgtagttagtaaagaaaattatataaaaggttgcacatatgaagagatgactaatatataataatccaacccatcaatactcaggaaaccatcttctaaataaatatatatcgtatttttgctaaaatttcttggtgggtgggacaaaatgatttcggatcctctcggagccccacccgtttatatttttcgttcataaaaaatttagtggatcggttcaagttgtatccgactcatacattggatattcgatatttaatagtatatatgtttagaagatttgattaagatttaaatttatgattcttctatcattttatttcattttaaaaaaaaaactattttcaataatcatgtgatatataaagtaaacagaaaattaattttttttttactttatattatgatttgaaattttaaaaacaaacatatattactcaattgaaaaaaattgtgtatcaacgtttcacattgactaaaatatttagataataattcaaaatcatgaatcagattaacattagtaaaagaaataggatacacaagtgagttcttcaaggcgtcttggtccattgtagggaatgacttcatagctgcaattcaatcttttttcatcaaagggtttttaccaaagggtttaaacactacaatcttggttcttgtaccaaaaacaaaggacgcaatgatgatggaggattatcgtcctgtttcgtgctgcaatgtcgtatacaatgtcgataattgcggtgggctttttaaattgcatttacattgcatatttttggtgtgtttttgtattttttgacttatagttcggatggtcgttgttgtgatcctaactttaaagcggggacttttcgtgattatgatcccattagtagagtggagactggtccgattgagagttgggacatccggtataacacccgtgcttcatatgctcataagattttacggctcgtgtccacaaaatcattggaccttttttttgtatttatctctttgtcccttttacatagatcccattttgatcttacaaggtgaatatttaatgggaataaaatgaaggaaaattaatttgaataacaatggagcatttattggtatggccgtatgatgtttcaagccgcgtaaaatgtttaaaattttgatagtcacaaaacaaaacactgccgtaacaatttgataaaatcaaacggaccatcgctgattacgtaggagagccacatgggctcctttgaaacttataccacatgcaaaggaataaaagtcctttagtcaaatatacacatgtatcatgcactaattttatttatcaatcatattcataattcaatatgcaaactactattgggcatgagtttttttttgttcttctactgttgtcgcatgttgacccatattatctactatttatagaagaagctaatgtatcgttctctaaatcaattaagaaaattagttttacaatttaataatccttggaataagaaaaattaaacatttgttccttaagaaactgagtttctttcatcatgagttatatggttttaattttataaggtaacgaatatataatctcttaagaaagaaaaaaacctacaaaagtttcatacttactaaatttaataaggagtgcttatattactcttacacttaaatttcttaatcgatcgacttagagaggaaaacttacaaaaattgaaaattttcatacagattaattgtattaataataaaattttattcaaaagaataatcattaattctaaccaccggtattaatgaaaaagatagtaaaatttggtagtactatgttgataataccccatttactaaactcaccattcaatttttgttctttccttttgtattaactatgtatcttttaataaagtaaaatgtattgtatattgttcttagaaactaatattttactttaaatttggggttttgtttaaaattgtacatatagaattacatatatataattttcttccattctaaaactcatttatacatttaacatttgaagcatgatcatttttaatttttatcagttaaaagttgaagtatatttttgtaatattatattattattttaccatctcatttattttacatatttcgtttttaatttagttaaatatttttattaattataaataacataaatatgcactaaatgaatattttaaattttgttttaatttaaattaaatagtgatgtttagaagagtgcttaggtggatgcttaggtggataggctagatggagaaagtattatcctcttatacataaaatatgatgcatagtcggtgattcgtctatgtttaaaagacatggagctgaacaaatagattgtgttgttttcaaacaaattgcccaaaatcttgcaaccagaaaacaaaactgtaccaagtcataatttgtcctcagccggctatcaagaacctttctttacaccttcatagttagctggcatatttatgatgtctgattttatttttgttatatatataatgtacggatttaaatcaagaaaataaaaataatctcgttatgaaacatttaattaactgaaaaacattctcagtgttttcttctttcagattttattcagtttctatgattttttttttttgttcaaccatactttaaattaaaccttacgaagaggttgatactaggactcagcctctgaattagatcccctagggatgaaaacacaagaaaaaaaaccccaagtttttcaatgcacaaaaaaatatctgacaaaacacgatgcagtttcgataaaaaggtcttcgacttgacttgctgaccgggacacaatctgacaatgtttgccacaaagaaaatactataactttaataataccgaatttttaagatcaaatagttaaagaaaacaaaaatcagaaagacatgatttgccgttttgcgttgtcagcacggatcaaaccttgtagaaaattagaggatactggtcttacttattttactaaaattagaattattggaggatattatagactttcctgttcgtactacgtcgtttacaactataaattcccttccacttcttctttgcaacatatactcatttcttctttgttagtgacaaaaaaaaaatcatttcctcagagttagaccaaagtccaaacaatggaattcagttgtgttcattttcttcaaaacaagacgattcttgtcacaggcgcaaccggtttccttgccaaaggtatgtcattttggttaaccctcaccaattaacgtacgtccaaatgttcttcaagactcgataagtgacaaagtaactagaaagattgttcgagttctcatgatagtgtttagaaaaagaataaaactataataagattatttttgaatcttttatgtctccttgtgttgtgaacaaatattccttgaagataattaaggtgtagtttatgtatttaactatttcagctcgtgggttccttatatattaaatggatcatttcactagtgacaagcaatcagattacaatcaactttctttaataatattttagtttttgtggagaaaatattgagagtgcaaccaaatgtgaataagctgtacctcgtggtgagagcatccgacaatgaagccgcgacgaaacgcttacgcacagaggtttgtttatataccaagttaccaacaaaccttatttatgtactatgtaatatatatatatatatatattcgttttgctgaagtatattcataaatatataattagatttgttcatctgattaactgaagtatatacatatggcaggcattcgagaaagatcttttcaaggtgttaagagataatcttggcgatgagaaattgaatacattgttgtccgaaaaagttgtcccggtcgcaggtgatatcgcgatggatcatttaggcatgaaggactctaatctaagagaacgtatgcaaaaagaaatcgatattgttgtcaatgtcgcagctacaactaatttcgacgagaggtactagctacaatacattttagtgcaacatttcttttttctttttcttttatctctgataagatataaatttactatatacatgtgataaaagatatgatattggtcttggaataaacacatttggagctctcaatgtccttaacttcgccaaaaaatgtgttaaagctcaattgcttctccatgtttcaactggtgagtcttttttttttttgatgattatatctttgtaataggattctttaaaacagtattatcttattatagtactatcaaaactttgttaattattttaactaacccaagtggaattacaaaaaatattatttaatatgtaatgcttataaatttatggaattatactacaagaaaataagtaattagcgacaacataaaaggtatcttagtagtcgctaaatccaataacacgactatttggcgactaaaacacgtagtcggtaatccatgcgtcgctaaattaattaagccaaatcgtagccgagtagtgactgagcaacgactaaaatatacgtcgctaattgagtcgctacacagtaacgactgagcaacgacttaaatttaataaaaatttatgtgttaaaattattcaaatgtctatattctatgatatggttattgaaatttaatatattacttctatcttttttattttagcttatgtttgcggagaaaaaccaggtctcctacctgaaaaaccgttcgtcatggaagagatttgtaatgagaatggtcttcaattggatataaaccttgaaagggagctgatgaaacaaagattgaaagaactcaatgaacaaggttgttcagaagaaggcactactttctacatgaaagaactcggcatggaaaggtgttgttgatgattgaaatatccttacatgctactcatgatcagaatggaatgaaatatagtttggtattatgttaatgattaattagggcaaagcttcatggatggccaaacacatatgttttcaccaaatcgatgggagagatgcttcttggtaaccataaagaaaatcttcctctcgtcattatccgtcccacgatgatcactagcactctttttgaaccatttcctggttggattgaaggactaaggtaagtttatcatcgattacgatttttagttttgattcaaaaatttaaacataccttgtcgttagtccagggtataactttcattatgatttaataactcaagatatttttcctagttacaattgttctcacattaatgttatgtgtgtagaactgtagacagtgtaattattgcgtacggaaagggagtgctcaagtgttttcttgtcgatgtaaactcggtttgcgatatggtaaagtttcatgactaagatgtgtattttcctaacagtcacatatcttaagtatatatatatatatctcatcctccttatttatgagtttggtatttagttataataatattaactaaacttaagtaaaactcaaactcttatagcctaactttttttattgggtgtgatatgaaaaaacagataccagcggatatggtggcaaacgcgatgatcgcagctgcagccacacatgctggaggttcaaaggttcacatggtgtaccaagttggttcatctcaccaaaacccaataatatatggagagatccgtgaaattttgttttgttacttcaccaaaaactcgttgcgcagtcgcaatggctcaatgataactgtctcgaaaatgaagctgataccaactctggctttgttcagcctctacatgaccatacgttacaaactacctgtccaggtactaatagcaatgagagggattttaaattacttagtatatttacgctaattatgatcaaacttataattactttctaacgaagaaaactaaatgtttttcatagataatagtgtggtaatatatagtgttatgatattaattctttcttttttcctccatcagttattaaaattggttgatataatatatccttcgagggaaggagacgaatacaaaaacaaaaaccgcaagatcgatatggtgatgagattggtaaagctttacgagccttacgtactcttcaagggcatgtacgtagaatattatttttctagtgtgaaattttaactctctattagtcaccaaattaaatttcaaaggatggtttatatatttacataaatcaatttgtttttccagattcgacgataggaatactaaaaacttatgcgccaagcagaaagaagaggacaacagaaattcagaaaattttatgtttgatttcgaccctaaaatcattaaatggaaagattatcttataaatgtacacattcctggcctcatcactcacgtgcttaagaagtaaaacacatacaattttttttatttttttcaaatgtatcaccaataagacaagaccgtattaatttgtactgcaaacgtagtgatgtatatattttataactatatatagctgttttacattgtgattacactgctaatttataaatgaacgagacttggtacaaaatttgtgaattcaaagaaaaacaaatttttggccaaacgtgaataaaatcaaagaaaatttcaccgtatgcttctattttagtttttctttcagaaaatggcaaagtgaatcggatcaatcagattttagccatttggacttaaatggataaatataccctcgaacgagaaatgaaataaagcggttaatttcgtttcctttgtttttttggttaccaaaataatatttaaactttaaaattaaatcaaaaacacattaataatttttaaactacaaaaaaaaaatcaaaaattgtttcgtcgaagacgcagaacaattccgacgaaacataaactcatatcgaaagtgaaatttcgattgaggctttgtgcgagttcgagtcgttgcttaaatggaggaaatttcgatcgagttcgtgttaaagggtaacaataagaggattttcggatttttcgagttactgtttctagaagaactcaaatggcggagatgaagaagagtagtcggcggcgaggactttcggaagttaatgtatcatcgtcggcgacgacaattatgggtaagggtaagaggttgaagaagagtgcaaaattagggttgcagaggttgaaaaagagtgcaaaattagagttgtagaggttgaagacaaatgcaaaattacagttatacccttcattaaatttcttatgtgtacgtatatgtaatttacggtgtacgtacatgttgacatgtaaatataatagattatattttattgttaaagcggtatacacaattatatattgagtttgtacattataaatctttggttatttcgattagatgagatattttcggagttttctccataaaatctatgcatatataataatgaagtaaaaatatatggtcaaagtatatatattcttaatacttttgaaaaatgatgtacgtacatcttttttcatgagttaaaattgttgaaatatatttattgatacaataataaaccaatattgacgatggtgagggtatattatacgatagtcctactagagatgaggacattgttatttacaatattgacgaatttttgtaatgtttggtatctacgatggtgcatacggcgagttagccaaatgttatgtatttagtacgatatatatgatattttttgttttgatgttgtggtttctatttaattgttattttgacattctttagtaagcgttatgttatacgatattatttgttgagaatagataagatttaaaactaaactcgtagacgtacacgataatattgagatacacgtacacgtgtatgacctctccaaacatttatatcctaaaaatgcctaaatcacataagtcttatactatgtacgtacacaaaaatatttattggagcgtacatggtacaacattaatctaattttttgacatcaaaattaagttatttgtatggctatttatctcaatataaattatgcaaatatgatattcaacaaatcgtagtctgattcagctaaaacttattttccaatactaaattgcaagtctttcataactatatgtattcatgtacgtaaaatattcacctttccatattatacctaatacatagttagtagtgtgcttatattattccaaaaataatgtcttatctcccgtttaggcatcgaatgacttaattcttttctaaatgatcgatgctttttcgatcaagaacatgtttattagtgacactcaaatgcagaaaaggatactcaagttgaagatgactggaaaattacagttatacatttcatcggatttcttcatgtatatatatttaatttataatgtacgtacacgaaattatttagtggaacgtatatggtacgaattctaataaatatctaaccacccacaacaacaaatttaatatataaatatatatgtccgtttcatgtatttttttcatgtgttgttcatatatgatttgaatgttttgcttttatggtcaaaaaatatttaaaacgtaaatatacaaattatttagatatttacgtacatatatacacacacattactaccgtgtacgtatatattattaccgttacgcacatatgtttatatgatattgctaatcgtgaattgtcttccgatgataataaataaaaattatttaaaataaaaataaacacgttagattttgttttattgtaaaggcggcatacacaatatttaatgagtttgtacattagaaaacgttatttattttgattagatgagatattttttggggttttctccataaatctattcatatataataattaaataaaaatatatggtcaaagtatagttgttcctcatacttttgaaaaatgttatgtacgtacatgtataataatgtacgtacatctttgttggtgagttaaaattgttgagaataaataagattttaaactaaactcttaaacgtacacgataatattgagatacacgtacacgtgtacgaccgctccaaacagttacatcataaaaatgtataaatcacataaatctaatactatgtacgtacacaaaaatatttattggaacgtacatggtacaacattaaaataagtttaaaattttaattttagttttttgacatccagattaatttattatgtaagttatatgtatgctctatatttcaatatagattatgcatatataatatttcaacaaatcgtactctcattcaggtaaaaccgatcttccaatactaaattgcacaccattacaatttatttcacatctttcaaaatatttcaaaatatgtattcgtgtacgtaaaacattcatctttacataattcaccagatacatagttaatagtgtacgtacatattctttgataaatgtactagtgtacgttaagttcgattttataattgtaatttgggtaattggaatataaaaatctaaatataatttatgttaagtatataattatattttgaatatccattcggttctcagtttgctttggataaaattttgggttttcaactatgggtcaggttattcaggtatagaaatttaatacttttcgaataatttatcagttttgggtttcgttcttatatttcgaataagtttgtttgattcttaagttttaatgtatttttcaggtgtaattagtatatggattgaatgttttctttttatattcaaagattcttttaaacgtaaatatacaaattattttgatgtttatgtacgtatttagacacaaattacaaccgtgtacgtacaaatgtatacatgatattgttaatctttaatgtaaaaattaataaattaattaataaaaatgaaaatatgaaagtgggtcttaaatgatagttttttttttaaaactaaaagtacaaaaataataaatatttacaaaatagaaataaaaaaaactgttaaaactagtgaaaatgaaaattattacttttaatttttaataacataactatacattgtacatccgaacgattctaactaactcgtctgtacgtactgtacaccattagacaattcaaggacatttttgtctgaatttggctgaatggctaaatagtggaagtctcagtccactttgccaaatcctgcaatataaacaggtcaatggctactgtatataatttacccataagatcaacgtgtaagaggtgaaaaatcttgcataaccatgtatagagatcgatcaatgctaatgtaatccaaaccgatcgaatttttgttaaccggaactaaaccggactccacttaaattgaaccggataaccgaaccgtttatcacgggatcgagtttctcttcgccattcaagggctccacttcatctttttcgtttttgttcataagaacaccaaaatcagtaaaccctaactctctcaattcttagtcgtttttgtcgaatttagtgcctatttcaatcggatttttgtcctctttccatatctactgtctgttttctcgatctgcaaaggtatgagctcgctattcccttttttggttccgttttcaaaagtgaaaaatctctaattccttgaatttcatgatgtttatgggttatctgaagctagcttcttgtctacgatagttttaggaacctttttgagcctttaattgctggattaagccctaatttgagatttgaaaatttcccctttggtaaaaaacagacatattcatacactttggaaaaaacggattttagggtttagaacttgattattcatgatgcattgtttagttttagtaactaaaatacaatgtttaagttatttgatttgtttttgagtgatttcttgacttcactttgtcttttgcaaaggtatgggaaagacaaacgacgctgcaggcacttctcgagcacgcacgagcacttccggagcaccgacaaaagaagatcctaacaagcgtcctgttaccggcatatgagatagggaagacacaaagctactggcagctttgaagcatattgatgtgcggccaacacgagtcgcttccagaccttctctacatgtgcttagcctgtacgatgatgttgtaacggtgtttcaaacacttggtatgggacggtattgggaaatggatgaggatgtatatcctaaacttgtgaaggagttcattgccacatgtcgcctcacgtacgcgaatccagagaacccgaaagcgagtaaaggaaaactcacattctttctcaacaaacagcattacagcaagacattgtttgagatctgcgacatgtatggatttacgaaaggagaagcggttgagttcccgaagttgtctcttgtagttgctgatgacttttagaacacgatagctacatgaatatataagtcgcgcacagcgaagataacacatatcaggagtcctgttgtgcgatatgttgcgaagcttctcggtagcgttctatacttcaaaccggtgatcactgttgtgcaagagatcgagttaccactgcttttctatggggtcaaacatctactagacgcctactccgatattccagctcccgacactaatgtagctgcggttttgtgtgacacattggtgaagatgaagaataatgttcctacatcagccgcgaaaagcattttagctggtatcgcaattactccattgttccttggctgcaatctagacctctctagggctttgtcatccattaaacgagagcgaatggacttgatctacctgattcataccagtttcaccaagccaagaagtcgactgtaccaatttctaggaagggacggtaacacttatttctgcaggatatccaaccagcatattattcactcctctccgcgacgaacctagtgttcaaacctaacgagcagtaccttgttacctagtgttagactgtcacttgtctactaatctaacacggtctcagaagggttaggaacaaagtactgctcgttaggttcaaacactaggttcgtcgcggagagaagtgaagtaatattctggttgggtatcgtgcagaaataagtgttaccttccctgcccagaaattggtacagtcaacttcctggcttggtgaaactagtatgaatcaggtatgtcaagtccattcgctctcgtttaatggatgactcagccctagagaggtctagattgcagccgaggaacaatggagaagtgcagtacaagctaaaatgctctgcacggctgatgtaggaacattattcttaatcttcaccaatgtgtcacacaaaaccgcagctacattagtgttgggagttggaagatcgagtagacgcctagtcgatgtttgaccccatagaaaagtagtggtaactcggtctcaggcacagctgtgatcaccggtttgaagtacagaacgctaccgaggagcttcaaaaacatatcgcacaataggactcctaatatatgttatcttcgatgtgcgcgacttatatgtttctgtagctatcgtgttccaaaagtcatcagcaaccgcaggagacaacttcgggaactcaaccgcttctcctttcgtaaatctatacatgtcgcagatctcaaacaatgtcttgctgtaatgctgtttgttaagaaagaatgtgagttttccttgactcgctttcggttctctggattcgcgtacgtgaggcgacacgtggcaatgaactccttcacaagtttaggatatacatcctcatccatttcccaataccgtcctatactgagtgtttgaaacaccatcacgacataatcgtacatgccaagcacatgtagagaaggtttggaagcgactcgcgttggcctcacatcaatatgcttcaaagctgccagtagctttgtgtcttccttatcccatatgccgataacaggacgcttgttaggatcttcttttgccgatgctccggaagtgctcgtgcgtgctcgagaagttcttgcagcgttgtttgtctttcccataccttttgcaaaagagacaaagtgaagtcaagaaatcactcaaaaataaatcaaagaacttaaacattgtattttagttattaaaactaaacaatgcatcatgaataatcaagttctaagctctaaaatccgtttttctcaaagtgtatgaacatgtccgttttttaccaaaggggaaattttcagatctcaaattaggccttaatccagcaattaaaggcttaaaaaggtttccaaaaccatcgtagacaataagctagcatcagataacccataaacatcatgaaaattcaaggaattggagatttatcacttttgaaaacagaacaaaaaaagggaatgtcgagcacatacctttgcagatccagaaaacaaacagtagatatggaaagaggaaaagtctgattgaaataggcaccaaatttgacaaaaacgactaagaattgagagagttagggtttagtgattttggtgttcttgatgaacaaaaaacgaagaagttgaagtggagctcttgaatggcgaaggaaaacttgatccggtgataaactgttcgtcgttccggttcaatttaagtggagtttggttcaattccggttagcagaaatccaatcggtttggattaattgagatcgatctactggtgggatcgatcgatcccgttctggctgatgatgttgaagctcgaaggaacgactggatcgatgatgttctagcagatgatgttgacgcattggtatcgatcgatccccggcaacggcgccaacttgattgctcgagtaattgctcgataaacttaaccgcaaggtagtatatgcgaggtcgatccacaaggaccaaagatactctaaggatttccgagactcgttcttagctaaagcaaaaacgttgtttgtttggtttttgaattataaattaaaatgcaagaaaataaacgattaaaattatggattaaagacattgggcgttagggtatttcaaaagacaaagattagcataataaacaaaatagagaattcaattatgaagaatcgttctgaaacataaacataattctaaactaactctctctcgagatactagccactaaatttgactactcaactactaaactttcgtttgtagtctcctaattggcattaatgagttggtttatttagttcacaatgcgttctaacgtcaactttcgatggctagaaatacaatgctcaatttatattcgtttaggcattctatcgaacacttttaatgcatagaaaaacctaagttctaaaacaaggtgatcaatcctattctagcattaagaacacataaattgaagaacctaaagattgagaattccctacgacagcttagttactaattcattgacttcctacttagaaccctaaaacccaattgttactcagacattgcaatagaaatcaagcaaagagatatgaaagaaaacatgattcaaatagaataattaagaacagagtttagaaatcttctccaaattgtcaagaaggatgaatctctaatccccaaaagtgcttacagaaaagtttttagaaatgttactgaaaaagaagcgtaaaaagataaattaagttcctggggttttttatacccaaatacagaaaaagacatataaacccggttaaggaaattcggtctggttatcgagagtgttggatcgatcgatcccgagctggcggacattttacttcggtggatgagtggtggatagatcgatctccacctaggatcgattgatcccgagctggcggatgatttgtcttcgacgatgagttttggatcgatcgatctagtggtgggatcgatcgatccaatgtttctgaccccggtttctcgattcctgctatcgtttcttgtccaaatgagcccgataagtcccgaaaacatttgtgttccgcttaaacacctaaaacctgcaaatgactcaagacacaaccgaaaagacgcaaaagacagactacgacacgacaaactactcaaaactaagagacctaagacaccaaaaacgcaacatatcatatagtttagcgtttaatttcagagtagttaagcttaaggttcataaggtttatcaatttgtgattacttgatgatttggtagaatgtgaatgattgcgtagggtataaacgtatagtttatggttttgattaaatgattgattgcttgaatgtgaatgcatgagatatatttggattagcatttgtctttgaggaaagcgtacataaagagcgaaaattggccaattgatgggttgttggacatcaaaaattaagaaattacttgattgtatatatttaaatttcaaaaatatattccttaccagtataacagatatcgtgttattagcatcaataaataaccataaatcagtttttcgcttatggagaaaactctagtgatcgattagatcggtttctaaaaaagttataagtgatcgagtaatgaacagtttagatgtgtggctaagcagaaccgtagccgaaccgaagtttctaaaaatacataataatatactaaaccaaaccgtatctaaaccaaagtttctaaaataatcgaatggttaataaaacccctattcaaactaaccaaaatcaaaagggaaccgaaccaaacagaactgttaatcaaatgattaatcggaatatcgaaaaacctaaaatattcaaaaacctaaatgttcataattgaaccccacaaaaaaaaaaaacaattgaaggtaacaccggaaccgtagctaaccggaaaccgaagaaaaccctaactatatataattaactcatcatcttcttccttcattttcgttttcactttctccgaacaaccaaaagcttgtagcttcctgctcctcaaatcttcttggtaactcttcttccaatgtctctcaatcgattcccttgtgtttaattctatttctgagtaatttgatttggttttggttttgtattaaaagcagaaaaatgaaggttgccgctgctttcctcctcgccgttttgggcggaaacgctaatccttctgctgataatatcaaagatatcatcggagctggtaaatttctgtgcttttgaatttgtttatgaatgtgttttgattttattggattgtgttactgtgatcggcgaagtagtagcaatgatgatttgggaagattctgtatttgctttgttttagctataagagttttagtttgattgttgaagagtataagaacagaagatagttttgttcactgtatatgattcattaaaggactttgtttgttatgttttgttatgtagttggtgctgatgttgatggagagagcattgagcttctattgaaagaagtgagtggtaaagacattgctgagctgattgcttctggtagggagaagttagcgtctgtgccatctggtggtggtgtggctgtttcagctgctccatcaagcggtggtggtggtgctgctgcccctgcggagaagaaagaagccaagaaggaagagaaagaagagtctgatgatgtaaagcatttctctctttatcattttgtttccttattacttagtctttgttatggtcttgatattggtctttatctgactctttgttatatccttcacctttgatgcaggacatgggattcagtctcttcgagtaaggtttttgtccccacggaaaggagtcgagatttgattttttgttctcttagtggttctggtttttgcttcttggattacgaattttactccttagataatgaagcaagaagagttttttcaactatgttgcgaccttgcgggttattcatttatcgttttccgtttgatttacatgttgaatctggtctaagcttgtaatttacatagtttagttcatagtatgttagcatatcacaaaataagtgcctaagagggctagaatttgatacactcatggaaaagtttatctttagtgatcccaaataaacagaaaaatccaaatccaagtgaaattgagattctatgttattaacttcaaacattggtgttgtcgtgttgtcgtttcagacataaacccatgaagcttggataaattagaagaaagtagatcaactctatttcaagaaaataagaggaattgaagtaacattagaagttgaagtctttttgttcactaagcattctcataaaatttgtttgacaaaaacataaaataatgtttagtgtcaagaagatgatgccaccaacttaacctgatctgctcgggtacaacaaacatatcccacagttcgatccatctccgcaagaacaacttcccagcatagaaccaatcacggggttacggatcagcatagattgttcactatctttgagacagtagcaaagatgctaagatttcggaacggtgacattaagtatcttcacatcttggtaaggcctgtcgttcttgtctgtcttcactttctctataccctgttcatttggttttatggttaggcactaagtcacactaagccaacaagtaaaaatattctttttggttttcaaatcatacctgaacgacgtccattcccttcacaactcttccaaaaacagtgtgcttattgtctagccacggtgtagccactgttgtgatgaagaactgagacccatttgtgtttgggccggcatttgccatagacaatgtgaacggcctgtcatgccttagactgcaggccaagtaaaagaacaacgtatcaaactaagttagatttcatttgtttctaaacggatggctaaactcaaagcagcctgtaagaaatgtttaccttttgtgaaactcgtcctcaaattctctgccccaaattgactgtcctccagtaccatccccaagaggatctccagtctgtatcataaatcctctgataacccgatggaaaaggtggttatcgtaatagccatttctacagtgtgttgtgaaattctccacagttttgggacattcttctgggtaaagcttcatgtgaatgtcaccaagcgtagtatgcattatctggatgattaggagttaaaaagagttattgtgttaaggatccaaattacagtacgtaatgaaaagtaaaatagataccaacattgtgggttatgaaaacataccacgttctctggaagggatgttgtggctgagtttccaatatctgagacagacataagttcatcagcagcaggcttctcgttaaacacatctctcccttggcttgcatcttcaggttcttctggctctctccgactgcagaaaccaatttgttgataataaattcaaagtagttctcgggatatctagagaaaacatatgaggtctttctacaaagtagaatctaaaggtgcgaaaaaataattctttctcccacaacataaagatgagtcattctagcacaatatgagtcacgtacctgaacatatagatcctgtgtttcttaaaggcacagcataggatagtcggatcagtcaaaggctccttgctttcatttacatttgctgcagctgcaggaatctttctaactttcttgcctccttgatcaccttgatataatgcaactctcagatacctttcattactctccacctttccaaggatccttgcaactgtgttggtgtgtaaatttattacctagagaacaaaaaggtagacagagaaattagcagttgcttgtcatgattccatttactacgcatggaagagttctgatacaatcaaatcataaaaactggtccgcttttacataatgatctgctgaaaatacatagatattgagggttagtgataatggagctcctcccactaccccttagacacccaaatttacaaaaaaaatctcaagcttcttttattctaaattcactatattggcagaaagtataaccactttcatatatggtacaaagaagtaaccacattatatcttggtcatcacctaagtaaaggtgaaaatcccaggtctttaagctcgttaattgtatcatgtgcatgtgagacaggatacttatcatgtctagactgttatgctagtctatggtaatttaaaacgaaaacaataagtggattccttacttttattccaagaaaagtggcgtatataaggaaattagagctttcatcaaacacagcattgggctgcggagcactctcggttttttcaagttccttttcaactgccattcttctaccaaagtcaatagcttcaagcctgtataagggagcatcactcctctgcagatcttgggccacctaatagtggaatggatcattaaccatgacagattaacgtgaaaacatgtaaggaaagaagcatagagtatgtaaccttaccacaagtgactcatcatatacccgcctcagtttaccagttctaaaccagaacacacgaatcctacgatcaggagctgtaatggaaaactgtttaccatctggactcacctgaaaagaatttcactaaacttagagaccaaatttgcattatgattttcaccagacatatcaattgctaatagctgcattctaaggatgtaaagaaaaaccaaggatactaaatgccaaataagtacctcaatggcagagattgttgttttgcactttataatctcaaagagatttgtatcactcttcagtttaaagtttaccctacaacaacaagtaaaaggtcaacctgtgaaccattaatgaaagcagcccatcaactatactgaaattctaaagatggtcaactaagaagttggcaactaaagtatttctactacaggctcctctttgcatcattctcagtaatatgatatttaactacattagccacacgcagaaaaacaggtatgcttctcttatcctacacgctccaatttatagaaaacaaacagcaataccgaaatggaataataaaagcgtttttgataagaagtgagacaaggacatactcatcctcgggaaactgtaatgtagttgcactccagtactcaatgattccttttgtgtcaccagagatcattgtgtccgaaacaggattgtacttcatgaccttaattggattcatatgtatctgggtatacaaagattaaaaaaaactgttagctttgataaaaaatgatgagtcaagaaataacaacaaaagaaaaagagattgaaacaaacctcttttgaagcaatgggttcgttggaaccagaacgaggatcataaatgtgcacaaacaaagagtctcggtcactgacagcaagtttagctttgacatccccttgcttgtagacccactcaacagcaccaggaatatatggcaaacggatcatggccatcatatcgtagttgacaacatcatatattttaacagcatgatcatttgagattgtacagcaaagcaaaccatcaatgctaacctgcattgctgaaacgagtcattggttgataatagaactagacacaaacaaaaaaattgcggaaaccataacatgtctaactataatttccccgccaggtcaactatcttcattcaataaacaaataaaaagctaatctttcaaaacatggagcatatgcctggatttgaggtgacagtatcttaaaaaccactcgcgatacttaccgctagaccttcaattggaccgagatgggagcggaaatgcttagcaaactcgataccaacaccctttttcttccaaaatttcaagtgacctagattatgcaaaatatacatatgttatgctttgccattacaaaaccagaatgaaatcataaatatcacaaagatgagaaacattaccatccatacttccacttataaagaactcagctgctgaaacagcaacatgtgtaactacatctcgatgcatataacttttctcatacctagtgaaaaaatatacaagagttactttttcaataccaattcacagataataagctcatatataccaacaacaatactaaaccaataagctcaaattaaaaccctaaaccccaaaacttgattcgattaggaacagagagggttccaaagcataagacatacttacatattagcagaaggaagcgaatcaagataagcttgctcgaattgaagcggacgcttgcgtttgcctcgtggagctggtccaggtccgaccatcggctcctcttcttctactacaggtggcaccgcaaccaccgccaattcttcagtcggaatcgtggttccgccattcttagattcttcctccattgatttctactcacttcctcaactcaaaactccttcgtcgattgaaagcaaggtttgctacaacttcgaattgtcagagagagacagtgagtgaaataaatagagaagagaagtagattcatgaactaaatatatctattgggccttatttttaagcccatatataaatttatgagcctgacccaattgggtattttgcagaattttcagctcctaattcataaaagtaataaatcgagttttatcttgagagagaataataaataaatatataaataatttatattttattatcaaataattttgattaattaaatagacttttattttatttttgatccaatttgaatactccttccgtttcataatataagttattttagatcaaattttttgtttcacaatataagttgttttcaagtttcaatacaaattatatattattttaatattttatgattatctatattatgcactctcttttatgattggtagaactttttaaaagtaaatattcttaatttgtgtgcttttagctaaaacaacttatattgtgaaacagatggagtatttaaaatagtgaatttgtaaaataattttttttatttatgaattttgtaattttcataataaatttattttagtcactaatttttcaaataaattcatatttagcataaattatatttataaaaaaatatttaataataataaaataagttgttacagtttttttttgttactaatcagattttaataattaaattctccatagtcaaaatctctacagccaattttttacaattaaaatcataataaccaaagtttttacaacaaaaaatagcagctgctcctaatcggcctccttatcacttactttatccattactgtttgttcttatttgactatggactcttatcctcgagatgtttcttggtcaacctcagtttcagtgtttgtcctaataggggtttagccttaaaccatttgtcagattcaacgtaatacctaaactcaattttggtgaaacttgaaagcagtctatgtttcaacttctattatgtacaaatagtccgttaaaaggacatgtaaaaacttacttgctgcttcgtcatgaggccattttgtttgcaactgacgtggtgataactaccaaaattttgttactgaagaatccaaataatttgagtttaataaccaacatgattatatactatctaaagttctaaactatttcttaacatacatcatttcaaatttaaataaagtcctataatccttattataaaatgtaacgtaaggatgtaaacacttaaatatacatgaagcatataattatagaccgtaaaggtcttagtttcttgaagaccgttaaggtaactagaaataattttattggttatttgggataatttacttggttcatcatattcgtcttctgtccaaaaattcaggtacagttcttttatgatcacattcattctcttgatactagagaatttattttaaaaaaataaatatgatcataaaagaagtatacttggattttggagcaaagggagaatatgatgaaccaaatcaatcaacacaaacaaacgatgcagttatttctcgtaaccttaacaatcttcgagtagctaggaccttaacgttctactcttagctgcatcttgaataaacataagatttggttttgagaacaaagatgcatacgaaggatttcgatggaattaggattcttatcaataatctccttaatttgaagactttcactttcaatattttttctcaacgccctttcctagtaaagctttcaatgtatgcaataaagagtagtcatattttttaataataaaacgcataatcttgaattaatgtttataaaataaagagagggcatatgttcgcatcaatatatcctcaaacatattggttgcaaaacataacatataagtggctaggaaaacacttaatgttgtggtagttagaaactttagtggtggcttgaacgagttaaatctattgaggtattgttacatctaacttgttcaaatgactatgaaaattcctaaccataacaaccttaagtgtcttctcaaacacttatttgttatgttttgcatccaatgtatacattgatcaataccaatatatcacaaagctctttacaaaatagcaaataaaaattatgagatttactactaatgtaaatataaaaattcataacagtaatgcgactaatctttattccatattttataagtatcttacttcgaaagtgtttggcagaaaaaatatcgagggagagagagagagttaccaagtttgggaaattatcgagaagttgtctaattctcatactctcctttggatgcatgtaaaggctttcctaccaaacatgcaaaatgcttttgtcaaaacttcatcaacaacagaaaaaatcttccacccgcgacttatgaaacttttactaacctgaggaaaaaaaagaaaagaatgataagtaaaaaaaatagaatattgttagctagctacaaagaaaaaatatcttgtggatagtctaggaatcctgataccgtaccttttcatatacttgtttgagtgtgatacttagaattgaacaagtaaatacatacatatatatgagataatttatggttctgccactgcatatcagactcttgccaacttatttggcaccattattaatctaatttgcttttattgactaccatgtttgtggtcaaatatttgactaattttgtttaggaatgaacctattaaatctcttactttgacgggatattttaaggaatgtaatatattgaccaagagattagggtatgcattttaaccggagtgaacataaaccgattcaaatcgaactttcatcaatgtttttccttcaactgaacggtttgatttaattttaaatcgaataaaactgataaaccatttttatttacgtatttctagttaaaatagtattataaatccaaacacgtttgattaatgtaaaataaaatttatttagtttaatttttcctaactctaagagccctaaatctatagggaaaacatacaaaatcacattgaattacttttccttttctaatagtcttactgtaatatttaagtaactagatattaacctccggtataccgcaagtaggcttatattttagttaaactaaaattttttattgtaaagatgatttataaatatatgatattattttatttgattttaaatgtatagtaaactgcgagttgtatatgttttgttgatattatttatattgtttagtgtttaagattatatacttgtattttaatttttaattttagagtttcacctgtagtataccatcttctattataattaatatcgatctaaaccagtcaattctaggattttccagcttgtattaaaaattgaatcacatcatacacataaaaaaatctaatacgttactaattattgtaatatataagattttaaatttttaaaataagatgtatgaaattgaatataaatattcaaattatgacccgttactcagtagaaagttttcttaaatctatttttgactcgttataatatattttcatgtattgaatagtttatatttatttttaaaaattcaaattatggcatatgcaaaacaaactctaattatttttttataacgatgatattatttttttgcaaaaatagaatcatatgaactataataattaataaaaaaataatttgataatttagatatcaaatctaatttgttgattttaattggttagttttttggaaattaataatgtatttcgtttttctaattaaattaaattaattaaaatttagataatttatggttctaccactgcatatcagactcctgccaactttatttggtactattattaatctaatatgctttctattgactaccatgtttgtgatcaaatatttgaccaattttgcttaaaatgaacctattaaatctcttactttgacgggatattttaaggaatgtaatatattgacattagggtatgcattttaaccggagtgaacataaaccgattcaaatcgaaccttcatcaatgtttttccctcaactgaacggtttgattcaattttaaatcgattaaaactgataaaccatttgtatttacgtatttctagttaaaatagtattataaatccaaacacgtttgattatggtaaaataaaatttatttagttcactttttcctaactctaagtgtaacaccccaaatccaatcccttgaatccaccctatttgttttgttaaaacaaatgtccatggatcccattgaagcccaagtgaagcaagtcacaaaataattagggttttgttacatgtgtatgtatatatgcttatatcgtcatcttcccgcatccttctcacgtcatcatctccagcaactcgttactaacttaagaacatcaaatcaacttgatcccaagccaccatcaccattgacgttgagatcggagttgttggagcgtgtggttttgtttttaatcacctacaagtgtggagtgaaagcgaatgtcacggatcatcaccattaaacaacggcttgattgggtaaggaaaacctaatctatttagaaagaattgtctctcctagccattgaatttgtggcagatatatcaagttagcttttgggtttttgtgtgaatatgtgaatgaaggaagcagttcaaatggtaaaattggtgatccgtttcccgtcacgtctgaaggagtttgggcgatttcttaacggttctgaatagatctcgttcccaagttttcagaacagttttccgatccaaaatcagaggtaagatcaatcgggaaatcgcgtttaaagttggtcaatagtcacaattttcagagcgcagttttttctaaagtatctaagaaacattgtagtttcacgtagaggttttcaggatcaatttcccgttgaatcagagagaatcaagcgtggcgtgaggtgtcattgcaataatcataatgtcaagaatccatagccgctgaaagagatagaatcgagattatattcaagaagttatgagtgtttccttctgggcaagtaactgcagaatgtatccacatctgtgctaagtataaatccagaacagtgtgtaactactggttttgcgatgtgttttcccgatggaccaaaaggaattagatcacgatcaagatgtctatggaaagatcttgcttcaaggaacttagagtagctgacatcttgtccatcggatttaagctccatccgtatttgactttgaaaggttgcccagaatcatctcaagttgcagaaacctagatatcagttctgatgcaacgtgggagattcatgtgagatctgatcgagatgaaacttcgtggacttattcatgatactactggctacatattaaacggtgggatcacgtttctaacggttagttctcgacttatgagtatgttactgagacagttttgtatgaagtaaaccatgacaagtttttattgtttgaatgggaaacgggttcggttggagctgaagctttgcagaagcctttaggactcatggagtaaggtttttgttgatggagaagcaaggtggagcgcaagagtatgcagttaaagctcttatagtaagttggtctaaaaggagagaaaggagaatagagatgttattcatcttcaactaggctagggtgagggtggtatttgcgaagcatagtatcattttcttttgttatgcatcttcatgcatgatatgtaggcttagatctgattgcataggataagattatgtgatgatatgatttgatgattgttgagtatgatgtttgataatgtgaaattatgtatgatattataagtatatatatgttaagtatgattatggaagttgggtgagttaataacaaaacggtgcgttttgctctggaggcgaaaataagtgcgatttagggttttttgcttttcacgcaagttctgatgccgccagtggccacgccgccgttggtagatggggttttgagtcagagcaggtcagatacgagggaactaacagaggttggtgagatctttgttagcgaagaggtttttcaaggtgatgctacgaaagtaagtgaggttagtatagatggtatgattggtgtggaaagttgtgaggaacaagatcggggccaggattcacagagtttgtgtgagatggatccaaaggaaatgctgccaaagattggttcggtggaagtcgtgagccaaaaggaggaaaaatcaaagttccacagttcatgggtatccatggtcaaaaacgaaaaggaattggagaaggtggagttagtggtagaagaagttgatggcattccaacagcaaggataccgaacaatgtttttgaggaagcacatccattgtgggaaaattttcttgttggcagattcctcgcaaaagctccgtttgtgggaggaattc

SEQ ID NO: 1354 - DNA, 49890 bp, Arabidopsis thaliana
gttaagtcctcaagtgcagggcatccagcaagaagcacattagagaactttattctatcaaaccaaatcgaatcaaggacgagaatcttaagaaccggaagacacgtatcagaaggaaaatagacgatgaagagatttgttcccaatgtaagtttaaccaatgttgtgctcctgaatacattggatgggaaacgatgtagacgtcgagtcacagatgttaagcataaatgaagctcagagacaccgtgttccagcgcggtatttatccagcgatcaacacgaacatcgtcatgtttatctccatatataagtgagaacttgttgatagggacactgccttggaaagccaatcttttatcgacaaagtccctgaaactctcttgaacgtcgtccatgttctgttcacccacttccgggtgagaaatgatggaatcgtcaaagtcaagattacgccggacagcaaacaaagtcctccacctcttggagagaacagaggttgaagcagcttgtttcgtttccagggaggacaagacgtggacaagaagctcatctggaagacaattcagtgacgccgtagagacagaactcatccctaacggcacctgaaacatgaaatttgagctctagcactaactaacacgtagcaagaaccaagaatataccacaagcatgtacaagactttgaagaaatttgaacaatccgacaaccaagacaaagctcaaaattgccaccacaaaacctatacatcgaattactacaaaagaaagagtttaagacaaagccctaaaggttcaagcttactgtccaagagacatgaaaatcattcattaaatcgaaaacaatctgaagggataaacaagatacttccgacagaccgttagatccagtttccatattgaaaaatattaacaaaaagagagttcaatacaaagctaaaggttatagcttttaaggttcaatgtaaaccctaaatgccctaaaggactaaaggttcaagctttctctccacgagacatgaatatcattcaggaaattgataacttcattcatcaaatagataaataaatgagaatcattaactcaaggaatatacaagacttacaggatcaacaacttcttctccattgtccatttctcaaggttcagttttgtgttttgtttcttctggaatcttgataggtaggtgaataggaggataatcgaacttatcgttaaatggataagttagcttcactaaactaatctgctattggttattactggctaactacgctcgaaatgtcgtcacgagggaaattttggatttctttcctttttaggtaattttaagtgtttgactctatatataattgaaatgtattaatcataaacattacaatttatacttgttagatagggaaaaatccataatggtttggtgttttttgctgctcttacaaacctttgcatttaacagtaggtaaggtagagttaattggcataactccattgtatcttatgtttgaatttctttcttgatgcggaagaaactttggtgtttttgtggatctaattgtcgacgggtcaggtgtaaccgggttagctggaccaaaatttgggccgcaggagccatcaagaagtgggctacggcccaaaacatgttttgtgtgtttttgttccttgtgaaagaagcaacagcattccaagagggaaaaggactttaaatctgattcatacaaggactaaggagacgttggagctaataaatacaagttcagatctacatagtactcggtcatttttaatttattgagttttagttttatctaaaaggttaaaatactgtatacaatctgaagcagcttgttacgtgggaagtaaggacaagatttggagaagaagctcgtctggaagacaattaagttacaccttagagatagataagattctgattttgtaatctttccttgaacatcatctgtaacaatgtagttttctaagcaaaacagattctatatattgacaaagcagtaacctccacaaaacgaaaaaagatttacacacagatagtacttacaagacatctacaaatattcaaacacaaacatatcaaatcagacaagaattatactcttttttctttatctctagatactagatcttgttatttactttgatcgtgtatataaataccccaaaaaaccaccacgataaggccagtcttttccgaaattctatcaactttgatggtatgtaccttgggagaaaaaccgcggcaaatactcgaaaccgaagcaggagatcatcttcttcttcaaatggccagcttctattcttgggcccttttcctgttcatacaaagcaacatgtttctgttgttggttttcccgggaaaagagagaaacttcttcgagggaatgcctcaggaaagaactttctctgtgttgggctttaagagaagagaggaagataaatgtttttgaatgaagattatccgaagaaagagaagcttttacggtgtttggaatggcgggaggaacgagggagtgtatggtcagcggtagctgatctaggagtgctggacactgagttctggactgtatcattcttagcatcagaagctcgtggaagaagaaacttacagccgagcttgaccagacgaggcgagctcattgagctagaggacttactaactctcttcttcatctcctgcttaatactctgaaactcctcttctagttctccaacccttgacctcattttctgcatatcaactttcaaaacctggttttggcgcacaacagtcacccaaccatctctctgaactatctcctgtcctgttcttccaccagggatcgtcactgcatgagctgtttcggtgtttgcaacatttagaccacctgcaagagcggttctgagatgcatttgttcaaagaagagtacttggagaacaactctaagcggtaacctatcgttatgggaagcatgagcgcaagcgtctatagagagtctttgatagtccatgatgttgcatagttgttccttgtctctatctgatagccatggatgctccttgaaataaatatcaaacgctctgtataaaccatcatacaacggtcttgaagattctggaagagctgctgcaagagaccgcattttatccggtttcagattcacatcagaagcgacttctgccatgtagctatctactaatcgccactttttttaacggtgctggagaaggagatgtcactggatccaaagatggaggagagaactcaggtaactgtgaggatgatgatgacaatgatgatacaaaatggcggactattcgttctacacaatctacattgtacaacgtctctgaatcagaatagttcaaaatcagaagattatcgagcgttgctagctccaactgcattcctattcttttctccaacttctttacacagttcccatcaactcctaaaatgaaagcaacacgaaggagacctaacaagaacttacaaaaagatcttcctctcttttcaggtaaaagacttaaaatggtctcaagcaaagcaatctgatcaagaggaggcatagaggatggtgaagaagcttttgccaaattaaaactcactactcttcttctgcttttgctactgtcacttgttccactctgccaccgtcctaaacccggtaagtactttctcgcatagtacatcatagcgccggctaaactttcagcacgtataccttttgtttccattgtcttgatgagtcttttaaacaaatctacactaagataagagatatcttcataccaccaatccgaacctgagcttctcattcgcgcccccgtgtttattccattccataaaatgcttccacctggactctgcaatgtaccatacatcatcattggccatccaaataaactcgggtcagtacacaccattgtggacacagcgttcatgagttttggtatcatctgaagcttttctgcactcttcaacaccggactagagctttgtaacgccaagatacagtctttccaattgcgaagcacgtgcttgtgcaaaaaagtttcaacttgggaaatcaagttatcttccccatattcatttgtcatttcaaggtactcagctgcacagtgtatggaaactaagtttttcgaggtgatatctactcgagccccgtaacagaatctcgcaactatcaagaaattgtctgcaccaccagggaactcttcaaggactgttgtccagagagattgcttatcagtgcttttagaatcttcatacatccttgctagctttccacattttgaaaccaatggaaactgcatatacacacatacataactcttgttgttattttacacagttgctacaaatactcatagatacatacttacagaagcagaaagatgcaaataccatgatacatatatttcaataaacataaccatacatgtgtacacaactataagaaaggtatacacataactggtagctgaatctatgtagcttaacatgatctaattgttttcacaggtagactaattggaacaagtaagcaccaactagacttatctcttttcctaaaatcatcatactaagaaccacttagctaaatccagcaatgttcctatgaagacaaaggagataccaaacccaagaagaaagcaaaggatcaaaagaataataaaaaagcttataccttatgaagatggaacttcacatcatcaacaacaacagtgatatcacttgacagtcctgtcttgcaaaacctgaaaattccaattccagtctctttaaggagaatctttgaaatgacttggcaagtgaagaattgaataaagctgcaaactttaaggtctctgagctaccgacatcataaaactggacaactgaatgaagtttggacagaacccatgaactgaaattgtataaaacaaacacacatacatgcaaatagtgagaaagagagagaggtttgtaccaatcgttcccttctctgtgaaactcagagactttagcaacaggtgacatgcctcagagagagaaaagacccaattccactcacagaaatatgatcaaaattgaaactttcacatctcacaaggaaaattaaaacaaagaatttaaaatcctaccaaacccatagagagtataataataaaatggaagagaaaaggagaaaactttaaaacaaaaagcaaattctaagaagaagaagaagaagaagaaacaatttttattcatcattcaaatcaaaagtcacataagagagagacgtcaagaaaccaaggggtcgtttttgtgggcaatagtgtggtgtgtggacctttacagctaaaaaatcaaccaaagacagaagaaaacacacaaaaacgattttaaaatacaaaatactttcttttttcactaaaattgaaaacaaacaatttcttggttttggtaggtactaaaagaatagatatctttctagagtgaattcaggacaaaagtggattatatttatagatcccagaaagaaaagggttttttccttctttacgttatgtaatgaatattgagctgatttttttttttttaaaagcaataaatctgagggaattaaggagacaaagagacaaaagtaactgtgtgtgtgtgttaaagtgtttcagacatttttttttgaggatcaggagagtttaaatgggctctaaagagaaggtaaccaacgtggcttatgatgaaattctggtttagtgttgaagaattttattaactcgggtatatttaaggtttgggttatatctttaacactagtgtttaaccgggtaatcaagactgggtttgattgatcatacctcttgtttaaagaatattccctttgtttctaattacatatcgtttaaagatttttcacacaaattataaattactccctctattcctttttatttgaatattttaaaaaaaaaaattgtttcgaaaagattgattttttagattttctatacaatatttattacttattattaatgaattataaattttaatacaaatgcttgagtattattggtttaaagtcataagaaattgtaaaacacaaaaattaatacatttaaaatcaactttaatatgtttatcttaatatgtgtgtttttcctaaataatcaaacaaaaaagaacagagagattataaattaaaaaaactattaaattttatattttaccctttgttaatatattttatatttttttttattagccaaaacatttaaatagtaggggataaaactaaaattttcacaaaatatgtgcattaaaaacctaaaaatacaactattatgaaatgaaatttaaatattaaaacgacaactaaaccgaaacagaaagaataatatcttacatttctagctcttttttttgtatttaagcaactgtagaatagtggtatcaatcataaagatcatatagattttgttccctaaattttgtaatatatatgataataaattcattggataattttttaaaatacaaattcgaaaaggataatcggacattatgaattttcttcttaatattattaggtagattttatggatactagagtctctaactcttcgtctgtcctatgcgaaaatgttactatttaattgccaaaatccttttgatcatatttgattctaacattatttttttttgaatattttaaagcttgccgcctataaacaatgatatgataaaacaatatcatggttatgttgttttgcatccatatgtctctcaatagaaagaatttgttctaaagttgtttaaagaaaaaactaaagattgataattatgattttgatatagaatttattctcaacctccactcgttaaaaaaattattttcattatcaaattcataatcaccaccattactaaatcaggggcggacgtatgtagacgagagatgggggtggggtatatgcattaaagttaacaaatattctcaaatttactagattatgccatataaaaataatttttgaaaatttatcaaaactattaaagttatttatgtttagaaatcgtcggttcgaattataccggaaaaaagaccatataaaatgctataatctttgatatgaggagatatatgggcagaggatcagtgttgtgtttgtgcctactcaattataaatggggcaacagccctaagccacatcttaaattctaatttttgaagccacattaagccttgtatcagctgttggccttggtttaaagttttaaacgagttgagcccttagtttcattcaacaagtgttgacgcttagtaattgaacgaaacatatggacccggattaaatttctaaaatgaaacaatgatgtcttcctaattggcttataatttaatactaatattactattgttttcttatatagacattgatttccaaataatgaaaagtgagttcatttccgttttatggttgataaaaagtacatgagcttcttgaatccgtgcaaacgagagcttattattcttcatatatcttctaatacaattaacactatctttagagtctctcccgattggaagttggaaaactgctgaaatatatgttttttaatttaacaagatctttttagcaaataaacgtacgtatatagacagaagccttgatcagacattatgttgtcttaacacaaacgttaatactacatgtcgtatgcatgataatatcttcttgtagtatgtgatgtgccccaatgattgactgaagagagtaagagacgtagcataatcttttcgatgatctcatttttggcctttggattctctgactaccaaaataaaattgtttattctgcagcacctctttgtaatttgtatcactattttaatatatggacaaattgaacaaaacagaaatatcaaaaaggccaaaatatattttgttaaatacatactaaaataatggcagcaagaaacctgatgattaagatggaacggtgaacaaaaagaaaaaggtggagaagttttggtggcaagtgatctgcaaaaatgggtttacgtgctccactacccttcacgtgtcttcgtgcctcacgatgccaatctacaattttgacgacgaaaattaatctcttattaactttagaatataattcaatgatcaatgtaatgcacaaaaatgttatgacccatttgagaataatttctgcatttattttagagttgtattacagaaatggtacgcatgcatttttacatgtactatagagtttgatctagctagtagtaaccaattaactatgtatccttaaagggtctggggaattcgtctaatctgtgacataggcaggattgttaccggatggcgtaaaccgaaaatcgtaatgattaacgaaagccggattctccagagggttaaatgaacggtatagccggattctaaccggtacgttttcttgtaaaagattaattttggtgatatataatgtgtaattaaaatttttgttattccaacttccaagattataaattataagtaatatatgtatatatacaaattaatttctattaaagtgattcaaaagtaatactccctcttttgccataaaaaaacaaaaacagtaatactccctttattttaatttatttgtagtttacggaatttagttttgttataacataagtgatgttcttattattctgtgcaagaaatttgtattccacatagtatttcttttgaatatttgtattccacatagtattttattattgatttaatatataattttcaaataaaaatgatgagaaaattcaaatattttcataatctatgtaatttttttaatgtgtacatgtgcaaaactcttaactacaaataaattgattttaaaaaatattgtgatcacttgaagatgtatcttagaaattgtgttgaccaaaaaaaggaattgtcttacgaatggtactaattaccttcgtatttgctaaataaaacgaaagaaaaaggaaagttatttttaatattttgattctagaaattaagttcttaagctatatatgtcacttggtcttaattcttaaagtattaatatactaggaactgtgactgattagtatggcaatagaaaaaaaaactaaagcaagactgcatgtaaaaagaaagacaagtgtcctaaaagtaagcaatcttcatgcttttcacacactagcttacaagtcacctcgatcgaatattccgcccatcaacacaataaatgttgaaatttcttactactactattaaacacacacaaaaatggcggcgtaagaaggaacaatattaattcttcttctcattctcattatttccatcttcaaaaaattgtcgtcaagctttttaagaccaaaactgttctttccttctttgcattttccgtatctatcatttaatggcaataatttttttcctaatgaaatgaaatctttttttttagtctttttaagttatatcaatttgtgtttagctcataataaaatacattgttcgatgtctccacttctccggtttagaaaactatcgtccttctctgaagataccattaaccctaaacccaaacaatcggcaaccgtcgagaaaccaaaacggcgccgttccgggagatgtagctgcgttgactcatgttgctggttgattggttatctctgtacggcgtggtggcttctcctctttctttaccactctgttccggtcccggcgatgcttcaagctccggagtctccgggaactcggttgagtcgagacggtgtcaaggcgtttcatccggtgattcttgttccggggattgtaaccggcgggctcgagctttgggaaggtcggccttgcgctgaaggactctttcgtaaacgtctttggggtgctagcttctccgagattcttagaaggtaacacattagaccgttatgttcggttcgagatatttttttagacccggtcagatattggtttggttcgtctggttaggggtatgtataattggttaagcttggtttcttcttgaattggctttacgtagtgttatactgttgttgttatggatggtctttggattttcattttggttaatgggtggagatggttctttgggttttgttattgttttgcaactagtttatgaaaatattattttctaagtaatgatggatggttttaggaaattaataattaatcgtgatttttgggatatgtttttaaatgtcattcgaatttggaaatggaaaccgtaagttttgatttctatataggaagtagaaaatcgtcctacaaaactataaaatatatttatgttcaaaacatgaatgacgatttcattgcattttaaaacttactaaatttagaatatcagttttaacatattattttagtatttctaaattttcatatatttttggttatggttttaacatggattctggaaaatatatatatatatatatatatatatatattgattgttacggtttttgatttacatgattttctggttagcatttcgattttctcaattctgaattagtttgaagtgtatacttggtcgtttaattgttgtaatttgatttataggccattgtgctggttggagcacttatctctagacagtgagaccggtctcgatccatcgggaatccgtgtccgagcagtcccaggactagtggctgcagactatttcgcaccatgctactttgcttgggcagttctcatagagaatttggcaaaaattggatatgaaggcaagaaccttcacatggcctcttatgattggagactctctttccataacaccgaggtatgctcagattagtagttattaatacctatatgatcacagtgacaacactggtagtctagagaacgatgataagacatccatgcttactactttagtgtatgtaattacagattgttgtagagattgggttgtgttgggactaatctatagtttttggattgaaaccgagcaggtacgtgaccaatcgttaagtagactgaagagcaaaatcgagctaatgtatgccaccaatgggtttaagaaagttgtggtggttccgcattcaatgggggctatctatttccttcacttccttaaatgggtagaaacacctcttcctgatggaggcggtgggggtggtccaggttggtgtgccaaacacatcaaatccgtcgtcaacattggacccgcctttttaggtgttcctaaagccgtcagtaatttactttctgctgaaggcaaagacatcgcttacgccaggttaggtccatgaacatttttaaatttactttcacttgttatgttagtattcatgagaactataacatttttagtgaatatttgaattggcttaatggattttgattggtcatttttatggttcagatctttggctccaggtctcttggactcggaacttctcaagctgcaaacactcgaacaccttatgcggatgtcacatagctgggattcaatagtatctttattaccaaagggcggtgaggcaatttggggcgatctagactcgcacgctgaagaaggactcaattgtatttactccaagagaaaatcatcgcagctatcgctaagtaatctccataaacaaaactacagccttaaaccggtgtcacgggtgaaagaacccgcaaagtacggaagaatcgtatctttcgggaaacgagcatcagaactgccttcctcacaactctctacgctaaacgtcaaggttatattaaaaacctttccatggttctgccttttccgggtcgtcattggaatctaacagcacttcactctctttttttattgtctatgcttaacaggaactgtcaagagtagatggcaattcaaatgacagtacatcatgtggagagttttggtcagagtacaatgaaatgagccgagaaagcatagtaaaagtagcagaaaacacagcttatacagccaccactgttcttgatcttcttcgatttatagcccctaagatgatgagacgagccgaagctcatttctctcacggcattgctgatgatcttgatgaccctaagtatggacattataagtactggtctaatccactcgagaccaagtaagtccaaaacatagtcccattgtcctttctgtttatagctagtagagatgctatcatggccaaactggcttggcctcacccactttaagtcttgtcttttaaatgttttatcctgtcatgtgttgagcccgctgttaaacatcaaacagaaagatagatattgcgccttggcgggcaagttagggctaggtcagtcccaattgtcccatgtcgagcttagcaacaaaaagggtggttatttctgagacgtgaatgagcctgttcatggctggtccgcgaacatgtttcgtgtgaccacatccctaatagctagtaaacttaagtactcatagaagaaatctacaatggctggaattaatttataccttgttatatattttccctaacagattaccggaggcaccagagatggaaatgtactgtctttacggagtagggattccgaccgagagatcttacatatacaagctcgcaacctcttccggtaaatgcaagagcagcattcccttccggatagatggatctctggatggagatgacgtttgtcttaagggaggaacacggtttgcggacggagacgagagtgtaccggtgataagtgcggggtttatgtgcgcaaagggatggagaggaaaaacacggtttaacccgtcagggatggatacattcttgcgggaatacaaacataagccgccgggaagtctactagaaagtcgaggaacggaaagcggagctcatgtagacataatgggtaatgttggactcattgaagatgttttgaggatagctgccggagcttcaggccaggagattggtggcgatagaatttactcggatgtgatgaggatgtcggagagaattagcatcaagttgtgaaataattaggacattagccaattttgttgttgtcatgtataaaatactaatacaaagcatagttgaagattaatttggttacgttttttaagtagatacctttaaataaaaacatacatcaatatagtgatcttgaaacaaatcaaattcttttaagcacaataaggtattgcattccgggtttggcattagcaagttgaggaagcatttcttgtgtctttgtcttgacaacttcaaatgttttctccatgacatgttgaccaaagtgtgaagctacaattcctccaacagtgaccttaaacgagaccgtcaaaaactcggggtctaatggaatctcctcgttttcttggctgattatatcgaacctttctatcgtgtaatacacattatcctcgatgatttgttttatctcacccgcgtatgcaacatagataggcaatttgaaagtgtcaagcttttcttgatcaatcaagccctttatttggttaaaagtcgttatcaaattaaagtcaaatatgttagtaacgacttttattactcataatatcatatggaagttgtttattattttacctgtttagctatgtcattaagagaagatccaatgcaatctatcatcattccattcaatgtttctgacatttgaactccatttggtagacatgatccaagaagaaagagcaatccaccggagacgagctcttgagctctagcagtcaagaaactctccatgtcgatcttgtattgatcaagatatgctctcacaacttcttttgagaatccggtgcagtgtatgtccttgttccacgcatgagaatcgcagtctttaattttcttgggaatcttggataagaaatggagtgagtaagaagaaactccgacatggagactgctcctaggaagaacacgtccaaagaaagaggctggaactccagttgcaaaatattttctagctggaggaagtgtcttgaagagagtgttgaaatcgttgtttgaagaatcgttgaaaaaaacttggaactctatttcctcgagattattttcttgttgatacttgtgttccacggcatctattatggtttgaaccgctctgaaagtattaggtccagtggaacaaccgaaatcagctatgttaacaagatttgaagcgaggtctatattgagtttcgtggagatggcttcgttgatcttctcggtagctgcttcaagcaatcctccctataaaccatcaatatgcaatcaatatcttcaaaactgaaaaatgatgaatatgttgatgataaaaaggtgaaacaattttacttcaataatcaaattttgtataaagaaaaaacctgatattttgaatgttgtcggtaactctcgggaccttcaccgccgatcatcgtgaaagaagtcgacatgactctcttgttccgtgataaatcttttctttgagtgatttttgcgtgtctttttgttgttgttgttgtgataattatatgaggtacaagtgcagacttttgtacttgtttatgtatgaattggtctttccttcctttgaggtttgttaagtacagtaatcaagaaatgaaattttataatatgcttacaatatatatatatatatatatatatataataaccgtgtaacgtcatgtacgttttactccagttaaaataatttgtgtaagcagcctctcaatatggacttttcttccaacttatggattaaagattaacgaactcgccgaaagagaaatttaatatatcgtagtactagtagggtttaatgaataatactaggaagaagtaattaagctatgtgattggtaaaaggaataattaataacgaaaaatatacgtaaaactagagctagtcaacacgatttttagggtctagatttgtgattaagaaaaagaatgatatggaacatgtgaggacgaatggtgacattgagagaagtctaatcaaagatatgaatgttgttctaatgaagtagagaatatgaattcgtaaggatatatggatttgcattgaaccccaatttgtgtctcttataatctcaccactttcaatctcaattggttccaagtaacaaaatttcaaatcttaccctcaaacacgaaacgaaacacacaagtctgaatcttcgataccgaaaaaagccaaacctcaaacaacaaaccgaagacgagacagataaataaattttggaggtagttttatcattttattacgtgcgaagatctcgaccatattgacgtccttctctcgttgtcacttcggttcagagacatcaatagcgatattccctacaccagcttccattgcttctctttcgtccttttccttttctatgttctcatttgctgctccttcttcttctccttttggttgttgtggtttcagtgacggttcaagcaatctcgggccaggattgaaccatgggtgttttaggcattgggcggctgttggtctcttctcaggcacaaattcaagaattgtgactaagaaatctgacatgtcttttgcgtcctgctcgctgaaatcatatttctccttcaagactttgctgatgggccaaaaccgcaaccgccggatgtgccttagctcaccttgtcggttgaagaaatctcgtgagtatcgaccacctaatgcaatctacggttgaaaacaaatgaagctcatcaatacaaaattaggctctactattttctgagtttcaaccatcaagatttgcagtcatatgcaaccaaaacaactaagatccaactttagaaaggattcgatactagagatatatcatgcaatcttatatggtcacaacacaacgactatgtttatcagctttacctttcgtggcatcatccctagaagctccatcatcaatgccaggtgatcctgaaacaaaggcaaccagttcaagactgcacataatagtgatacaacttagctcttcataccaaactggcaaagaaagtgaatatatatgaacatacctcatcccggtcataattttcaccactgtgaggatcgaacaagacatctccggtggccagctcgaaacaaatacaagcaaaggaccacatatctgcagaagttgagtattttgagccaagaacaacctctggacatcgatactgtcttgtctgaatatcgcttgtgaactgtttatatgtccaacaagcattcccaaaatctactaatttgcatttgcactctatatcactcagtaatttctgccttgtggatcggcttcctctcctactaccccgaccattctttttgttagccttctctctggcttcttcaccttccattaatcttgtggaacttccttcagatctctctacggtggaattgccatttattcttgcttcggagttagaatctctctcactttcttccaaagcttcctctccaccaaaatcttgagccaccaccttcttcgctttcttacgaatcttcttcttctgattctttgtcaaatcaccattgtacgtataacttttagtttcaggtttaacagcagactcagaaacaatcttgtccttggttataggcagaacaagtggaacacctgatctcctcacatctctcgacggatcaatcgtagacaaaagcagaacattctccggctttaaatcagtatgaataatagaaagctcacgatgaagataatccaacccaaccaaaatatgaaaacaaagctctttaaccatgtgaagaggaacccctcggtaatcactgtacttaataaccgacaaaaggttatctcccaaatactcgaaaaccatacaaacatgcttcccattaggacccgtatgcttgaaatgatccagtagctttacaacacacttcttatcacccgagtcaccttcagctatctgtttcaaaatctttatctcatccattgctgcctctgtataatgttgagcactcttctgaactttcaaagctacataacgctacacaaaaaagaactttcaaaacttcacacatgaaactaaagaactactgatctaagcctaaagattcaacctttagcatttctctacaacaagtcaaacaacttgatcaagcacattacactcaaagagtcttatatactaagaaacctaataaaggaatcatttttatgctggtaaattggttttctagcctaaaaaactaagagatctaacgatctatgaataacccatcccgggtaatcggtaatctaagactaaggattcaacttttagcatttctctacaacaagtcaaacaacttgcacaagcacattgcagtcaaagtcatatatactaagaaaacctactaaagcaatcatgtttagaacctcaattggttctctaacctaaaaaacgaagagggtataagtcacataccgattcttgcgtatcccaagcaagccaaacagtggagaaatgcccccaaccaagtttactctgaatcacataagctccattcttaaaagtatcaccgactcttactgtatggtatcctcctttcttataatcctctgttccttcgtcctccgacgagtactcactttcgtcattcacacgtccgttgtttttgtcctccgccatagctgaaacttgactaatgaagcaatctcagagaccaaggattcagagtagagggtaaaatctgaatctcgatttcaataaaaccctagaaattcgtgtagaacaaaattgaggtaatgaattcaaaaaattgactgatgatgataaaaaaaaacagaatctgatgagatcaatttcgctgaatgaagaaaacaaatcacaatggagaaataagacggtatggtgaatcgatcagaatttggaaaaggtaatgattggagatttggaatagtcaagagagagatcgttggtggtgtgtcgtctcgttggtttggtagttagaaattgggtttggaaattagggtttttcttcttcgtttagtatcaagagagaaaccgttttggttagaccggtttaactattaaaccagaaatacgatttggttgttaaaaaaatagatataataatagccgttacgttgtgaagtcaaattaaaaagctgaatcaaaattgcatggtaaaaatctaaagggattttctgtcatcataattcataattacaacattttggtaaaagctatccgattttaccacattgtatacttattagtttttaaatctaccagatttttatggtaaggtgatagagaaagaattaagtccacctccaatagtaagaaccccttatatttaatagagcggtctagacgtaattttttatccgtaatcctagcggactgatctgtcgcactttatcaaaaactaatgcctattgtgaatcgatcctgatggacgcggagcagcccgtttgatacatttagtttaaatgttttggtggagacatttttgataagggtgtctcataattaaaaactcttcacattttttttttggtcaaacaaactcttcacaattaactattaatattttgtaattttttttgcccaaaaataaaaataatatataaattttgtatattcaaaattttaatattattatagacattctcttcacatgtggactggaggtgcttttagagttgttggtaaaccttgcttgtaagattggttctaccttagggtactgatatctagaagtaaggtttaggtctaagtagaagcatgtgtgtatgtgtatgtaagtagaagtaaaactagtataaaaatgtgggtgtgtggtgttgtgtaaatgttatccttggatccaacaataaaaatgtagacaattaatgttttctctcttctcttttactaaacgtttatgtctttgtgttaaaattaaaataccaaaagacttgagagaatgatagttcaattatctttgtgcttgtgttaaagtgagtgagtgaatcaaagcattaaaatgaactaagagaggtcaaaaaaggtaaacctttgaataatgaaatcagaggaagaaccgaattgtcaactattgttcttgtttagaagagacatacatgatgttaccgaacccgaccactggtaacatctttgcaactgcaaagaaaatttctcattgactcgtaaacataaagaagaagtcttgttacgttaataattagtgacacatattcttttatcaatctaatccttttagaacacatgtttaggcatttctaaactttgaaaataaatggatcacttccgaagattgactactttgcatttagtttttactctaccaaataaatttgttgattagttatacattgtggttcatgttttatgagttatggttagtttttaagagctgaaaatagcaagtccttgatgatttatgtttatgtataaaacttacgactgtagattgtgaaaactaccaatctcttttgttgtttccattcactaatttctcgtttatacctatacgaaatatattataccgtttgatcttagggaaacttttggaagagatagaccatatactgaattacaactttgacgacagaataaaataatatacgaaaaatgtttgtgtaagaatgagatagtggcctaatggttgagtgcatcttaggaagaaaataggtaattggattgagtcttcatgggctaacaatcgttattttatttcaaaaattttaaaactaaatcgttttgcttgcaacagaaaatactaatgaaaaattaacgatttttttgttaacggaaagttaacgacatgtttgaaatgacaaaatcaaacaaaattttacaattttagtgaaattttcaaagtttatatttttttcatcccaaaatttttatataccattatatatgctcaacaccatgaaaaccaatacattataatcacacactttatgaacgaatatccagtttgaaggaagaaattacttcatgataatataaataattcaaataattcaaaaaagctaaaaattgatgataaaaaaaaactaaaaattgcggttctcattaattacttttcaaaaaatatcttcattttgttcttgtccggatagtttgtcatgtcctaaaccattataatattagttgtcttttattggcacgttttgtggatgcaaaaattggaaagacaagtcaacaccaatcggctgcctccacaatgacaaaactattcgtcaataagtcaatctcccatgttttaatatttatataaaaatattaaacatatattaattgattagtttatatggatatgcttcacgcagaccgattgatataaataagcacgaagtcttccaactaaaaattcatcacatcctcacacacaaaaataaatcatcacaagaccagagttaaaagagagacatgtcgacttcattcacaatgatcggcggtgaaggtcccaacagttaccgggaacattcgaaataccaggtttactatattaattatcatctaatatactcatgttttttttcttctttgaaatcatttctatttagctttagataattgatagcaaaaaacttatggttcatagggagcactggttatagctgcaaaggaaaagatcaatgaagccatctccacgaaactcgatatcgactttacttcaaatcttgttaacatagctgattttggttgttcctctggaccgaacactttcaccgcggtacaaaccttaattgatgctgtggaaaacaagtataagaaagaaagtaatattgagggaatcgagttccaagttttcttcaatgattcttcaaacaacgattttaacactctcttcaagacacttcctccggctagactgtatttcgcaagtggagtaccgggttctttctttggtcgtgttcttcctaaaaatagtcttcatgtgggagtttcttcttactcactccatttcgtatccaaggttcccaaagaaatcaaagaccgtgactcgcttgtgtggaacaaagacatacattgctccggatcttcaaaagaagttgtgaaattgtatctcggtcaatacaagatcgacgtgggaagtttcttgaccgcgagagctcaagagctcgtgtccggtggattactattgcttcttggttcatgtcgtccaactggagttcaaatgtttgaaacggttgaaggcatgatgattgatttcattggaagttctcttaatgaaattgctaaccaggtaaacttcaaaactcataaaacactagttaacttgtctatatgttagtactaattgatgctaacatgttctttctttctttttttctttctcaaaagggtctcatagatcaacaaaagcttgacacttttaaattgcctatctatgctccaaatgtggatgaattgaagcaaatcatcgaggataacaagtgtttcacgattgaggcattcgaaaagattagccacgcaaagggggagtatccgttagaccccgagtatttgacgtccgcgtttaaggtcactgttggaggatcagtagcttcactatttgggcaagatgggatggagaaaacctatgagcttgtgaaagagaagacgcaagaaatgcttcctcaaatagccaaagccaaacctggaatgcaatacctcattgtgcttcgaaggaactgatttcatgatatagatctgtgaaatgaaataaatcttgaggcctcagtgatgtcattacttatgtgtatgttctgttcttgtcattttaacagtctcttcttttaaatatcagttacaattaatattttccctaagagagataatgtttcccttatcctctcctctccattctattcagctcttaatatataatacatgatgcaagaagacccacctggatcaagtcaacttcaagtttttccacccaaactcataactcctcgtgaaatattcaatattcaccaatagtatggatatttaggcaatacacctttgtagattacagaccaaatcacatgagtgccatgagagctttcctagagtgcccctaattttgcgatttactacttgtttggacattagagctgttgtatttcgagcctatatagctcagctcatttctcattgtaaaatatccattatcattgatttaataaaagtttgttttcttttaaagactatctttgaattgttcttgttctttgtctttagaatctgagtgtggaattcacttcctttctatcaatttacggatttgattgcttgtggaatcaaaccttcttgtttatatgtgattatggaatcaatcacaaactctatctccatcgctaccaatatctactttcgcatgaagtttcaaaaaaaataaaaaatatatatatatatatatattatttctaattatgatgaaatagacgatgacaaaaaaaaactcaaatcgtttaattaatagagatgcaactacatcaaaaatgctagctgaaaattgtttaaaaataaataaatatattagtaattttaaacggtccaaaaaaatataaaacaatttttgtagttattatcaaacgataataacggcaatcgtgtttgcaagagaatcaatcaagtttttaatgacacattttaaattaatagttatatcctatttagcacacatgtttaatcatttctaaaagttctaattaataatgaatttggttgttgcggtggtcaagtgatccctgacaggctgcaaaatccacattattgggctgcatcgtgaaaagtgaatggtcaaatgattccctgcataggcttatagtattaaaatatgataattatgtttattagttaatgtattcgaaaatttgtttaataaaacgtggccaatatgtttattaatactagcaatactcaaaccctcaatggcaagccgattgatagatataaataagcacaaaggcttgaaactaaaacattcatcacatcctcacgcacatataaagaaatcatcacaagacaggagttaaaagagagacatgtcgacttcattcacaatgatcggtggtgaaggtcccaacagttaccgagaccattcgaaataccaggtttacttattaacatatacacacaaaaaaacttttaaatcatctttttatagcttgagatattgattgcaaaacatttatggtgtatagggagcattggttgaagctgcaaaggaaaagatcaatgaagccatctctacgaaactcgatatcgactttacttcaaatcttgttaacatagcagattttggttgctcttctggaccaaacactttcacagcggtgcaaaccttaatcgatgctgtggaaaacaagtataagaaagaaagtaatatcgagttccaagttttcttcaatgattcttcgaacaatgatttcaacactcttttcaaaacacttcctccggctagactgtatttcgcaagtggagtaccgggttctttctttggtcgtgttcttcctagaaatagtctccatttgggagtttctgcttactcactccatttcatatccaagattcccaaagaagttaaagatcgtgattctcctgtgtggaacaaggacatacattgctctggatcttcaaaagaggtagcaaaattgtatcttggtcaatacaagatcgatgtggggagtttcttgaacgcgagagcgcaagagcttgtgtccggtggattgctattgcttcttggttcatgtcgtccaaatggagttcaaatgtttgaaacggttgaaggcatgatgattgattttattggagcttctcttaatgaaattgctaaccaggtacttcaatctcataaaacactagttactcgtttgatcattacattatactaataaatccatactaacatgttatgtttttggctgtctgttcaaaagggtctaatagatcaacaaaagcttgacacttttaagttgcctatctatgctccacaagcggatgaattgaagcaaatcatcgaggataacgggtgtttcacgattgaggtattcgaaaatattatacacgccaagggagagtatccgttagaccccgagtttttaacagtctcctttaaggtcacggttggaggatcagtagcttcactatttgggcaagatggtatggagaaaacctttgagcttgtgaaagagaagacacaagaaatgcttcctcagatagccaaagccaaacccggaatgcaatacctcattgtgcttcgaagaaactgttttcatgatctatttagatctttgaaacgagacttaaataatgtaattgcaatgatgtgtgtttgtgtgtgtatgtgttgtattgtttgttattttaaatagtctctttcgtttatgtatatcacaaatacatatcacaacgttcatatttgcaatgtgccaaaatcctccacgtgttaaatccatttgttcatagtttctcgttacaagacaacaaatggtatcaatgtccacggaaaaattgcatacttgcacgcaatctcttcttcttcttcttcgttcttctcgtagcttgaaataagattcatcagaagagtaaataaacatcaaaatccaacaaaccaaactagaaaaatgtcagtagttttactctcttctacttctgcaacaatcaccaaatcccaatccaaaaagattccctttttatctcccaccacaaaattcccattaaaggtctcaatttctccatcaagatcgaaacttttccacaaccctttacgcgtggcggcgccgccgtctgtacccacttcggattcgacggaggagaagcggatcgaagaagaatacggcggagataaggaagaagaagggtctgagtttaagtggagagatcattggtatccagtttctttggttgaggatttggatccgaatgtgccaaccccgttccagctcttgggtcgagaccttgtactctggtttgatcggaatgatcagaaatgggcagcctttgatgatctctgccctcaccggctcgctcctttatctgtaatctctctctcttggaagaaacagttcaagtagtttataactgtgatttggatttggattagaagaataaattattgtagatgattgtttattgtaaagttttgatttttaaagtatatcaattaggttaaaagcttcaaagaataaaatattagggtcagaatcagaacagttttgtgttgttgttattgttatgacttatgagcaaaaagaagtaaactttgttgtgtatgtaaccaaagttttgagcttgactcattgatgtgtttgtgtatgtgttgatgcattgtggttatgtaggaaggaaggttggatgagaatggacacttgcaatgttcgtatcatggatggtcatttggtgggtgtggatcttgcactaggattcctcaggctgctacttcaggtcctgaagctcgtgctgttaaatccccgagagcttgtgctattaagttcccgacaatggtgtctcaaggtcttctctttgtgtggcctgatgaaaatggttgggatagagccaattcaattgaaccccctaggtaacgaaaatgattatcttctcaggcttccatgaacatagcatactcgttttattactcgttttattaaatgcgttgatctttaacataaaaggttgccggatgatttcgataaaccggaattttcgacggtgacaattcaaagggatcttttctatggatatgatactctcatggaaaatgtatctgatccttcccatatagattttgctcatcacaaggtgttgttttctttctcaaagctcccaatgtgtttgcatttccactaagggatattatcctcaggcgatgattacgtgttgtaaacaggttacaggaagaagagacagagccaaaccattgccgttcaaggtggagtcaagtgggccttggggtttccaaggtgcgaatgatgacagtccaaggataaccgcaaaatttgttgctccgtgctattctatgaacaagtgagtgttgagtttgctcactatacataataaatggttagcatacagttgcatagaatgaaattgtgtatccttgtctacagaattgagttagatgcgaaactaccaatcgtcggtaatcaaaaatgggtcatttggatttgctcattcaatataccaatggctccaggaaagacccgttccatcgtttgcagcgcccgtaacttctttcagttctctgtaccaggaccagcttggtggcaggtaaaacaaactttgattccatctctaatccgattttactacgtaaattcttctgaagctgttccttgttaggttgtaccaagatggtatgaacactggacttcgaacttagtctatgacggagacatgatcgtacttcaaggacaagagaaagtattcctcgctaaatcaatggagtcaccagactacgacgtgaacaaacagtacacaaagctcacattcactccaacccaggcagaccgttttgttctagcattcagaaactggctcagacggcatggtaagagtcagcctgaatggttcggctccaccccgtctaaccaacctctcccttccactgtcttaaccaagcgtcaggtgagccatcaatcatgcatcctaacatcatttgattgatctctatatatatacaaacacatgtctgaaaacgtgacaaatttgaacaaacagatgctagatagatttgatcagcatacacaagtatgctcttcctgcaaaggagcttacaacagtttccaaatcctcaagaagtttctcgttggcgcgacggttttctgggccgccacggctggtgttccttctgatgttcagattcgactggttcttgctggtttatcactgatatcagctgcttctgcatatgctttacatgaacaagagaagaactttgtgtttagagattatgtacattctgaaatcgagtagatttgttgtgtatatgtataatcatcatacaaagtacaaacattgtaaatcaaaatccagaggaacttttagcactataaaaccgatttaaccgttaaattttgggtactcaattgaactttataaaacttttaagtaagaaaacagaaaagtagaataattacggggtcaaattcgaaacataagaaaaacattcgtcacttcacttgagcaagcacacgaaaagccgataagaagataacaattactacaactgtgcgctcttgttatctctgctttgaagtgaaatcagctttggctatggcttcttcgacagctttgtctctctcatggagctcctctccttgttggtcacacagcttcaatggcggtgcaaatgaaaccctaaaagtatctgagcgaaggttcaattttgaagttgtttcccagaagaaagctaagaaacttcgcaaggtaaaagtcattacctttcatgggtttccttcaaaaatttgatttggcttttagttagtttttgatttgagcttgtgtttctgaagaattttggtggagatgaaagtaaaagacttgaagatgcttaatttatgggtttagtgtaaaaacatcgtctttgttcttgtatcagcgtagttaggaagaaagatgaatcaacattagaaaagtagacgcctttatattaccagtttagtttcaagtagtgaagataaattggtttgaagctttgtttctgtgtagagaaatggagtaagtgaaacactaatggtaaatcttgttttgtgtctttaaggtaattttgaaagaggatgtgacggatttgggtaagcaagggcaattacttgatgtgaaagctggatttttcagaaacttcctcttgcctactggaaaggctcagcttatgactccacttctgctcaagtaattcacctcaacttcgaaatttccgttcgcttttgtatgctcttactattcggttctaaggcctttgtatttcgagggactttgctacaatgttgtaagatcaacaagaaaaacatcattttctttctttttgtgtgtgtgtttttcccccagggaattgaagatggaagacgaacggattgaggcagagaagcaaagggtaatctgatatgaatacattgattgtttttatttgatcatcatgtaaagttttggtgtttgagtgatcaccaaaaaactctttggttattgattttcatctgtttgttggttttttctttgcgtggaaccttttttgcaggtgaaagaagaggcacaacaactggcgatggtattccaaaccgttggtgctttcaaggttaaacgcaaaggcggtaaaggcaaactgatatttggatcgtaagtcctacttaagcaaatctagattttaacagtcttgagaatagtgtttagcctgtacttaactttatattttcctgcagtgtcacagctcaagacctcgtcgacatcatcaaatcacagctccaaaagtaacaacatagaaaattttacatttccacataaaaagctacaagctttctcatgtgggcggtttagttggatcagtctacatttggtttttagtgttgttcgaagaacctaatatggttttatctgcttctctgtggctgtgttttgcagggacatcgacaaacgccttgtctctctcccagaaatccgtgaaaccggagaatacatagccgaactcaagcttcaccccgatgtcactgctcgagttaagatcaatgttttcgctaactaaaccttcaacgattcaagactcctactgcatcccaaggtatttcttgattttccatgatcatgtggcttttaaccataaatgaaactaagtattagttttgtcttagttcgtgtcttaattggcatgaaataagtagttaaaccgatgttctgaactctgaacatcggcatataaacattggtcgggaatattggctgttgaacggagttttgcgttttaaggtctagccgcaaacgcagatgctaattgtccatcgcactgtgtttggtgttttgaacttgcaggaacgtatagagagggaaaagagagtagcctcttgtggtgaggattgaaggttgtgaagtttttcctttagattgtttgatgcatttgtatttttgctatttttggaatctggaaacgctaaaagtataatattctcttgcaagttatgatatttacttgaagttatattgtattcatttgtctgttgaagtgatgagaatgcttaaattaacactaacaagctgtttaaaaaactaacaaataaccagaaatctgaaaaactatgtcgccgtctcttgttcccacaagattgactatttttagagagttgttgtttaatgacaaaacccagatgtttttttgtttcactgcttctcttcaattctgttaccaaaaccttttttgtttaagacagttatagctcttgattcggtttttataatcatatgattctcttgtttctatcatctttgttcttgttaacaagttttgtccaatggagtttaatggtgataggatcccttacctgagagatacatggagagatgcaaacatgatctgcggtatcttgcctattaacccgagctcgagcgggctatggccctccccgaagctcccagatcctcaagcaaacattgagttctggaattacatgtttccacatgttcagatcattttccttatcgtcactattctctggcaattcttccatttcttcctcagacgtctcggcatgattcgtttcacctcccatatgcttgtaagaactttactcaattcttgaatcttcaaatctctcttcctctttgtttgcattgcttatgtttgatattctgtgtggttttgccagactgggattctcttgagcaagtcgtttcttaaggagaatacaccggctaggaaattcctctcgacggaagactataaagagactctgtttggtttagtgggtgcatgttcctacatgatgttttggttcttgatgggagttaaaatggacttgagtttgatccgcagcaccgggagaaaagctgtagctatcggtctttcctcagtgttactctctataacggtttgcgccttgatcttcttcttgatcctaagagatgtagggacgaaaaagggagaaccggttatgagtttctttgaaatcattttcatctatttgatccaatgcctttcgtcgtttcctgtaattggaaaccttctttttgagcttaggctccagaattcagagcttggccgtctcgctatgtcttctgcagtgatcagtgacttcagcacctcgatcctctctgcggttctagtctttctaaaggaactcaaggacgataaatctcggcttggatcagtttttatcggagatgttattgttggaaaccgtcctatgaagcgtgcgggcacagtggtcttgtttgtttgttttgccatatacatattcagaccattaatgttcttcattatcaagagaacaccttctggtcgtcccgtaaagaaattctatatatatgcaatcatcattcttgtctttggatcagccattcttgccgattggtgcaagcaatctattttcataggaccttttatcttaggcttagctgttccacacggtccacctctaggctctgcaatacttcagaagtttgagtctgtggttttcggcacattccttcctttctttgtggctacctccgcggaagagatcgatacttcgattttacagtcttggatagatctcaagagtattgtcatcctagtgtctgtatcgtttattgtcaaattcgctctcacgactctccctgccttcttatacggtatgccagcaaaggattgcattgctctgtctctaattatgtcattcaaaggcattttcgagttcggtgcttacggttatgcgtatcaaagaggggtaagtaaatgtatttgacatatttccttcaaaatgtatctaacacattttgatacactcagaaactgagcttagtattcattttgattgcagactattcggccggtgacctttacggttttatctttgtacatcttgttgaactctgcagtcatacctccgctcttaaaacgcatttatgatccttcgaggatgtacgcaggatacgagaagcggaacatgcttcacatgaaaccaaactccgagctcaggattctatcgtgtatctacaaaacagacgatatccgtccgatgatcaatctccttgaagctacttgtccctcaagagaaaaccctgtagctacttacgtccttcacttgatggagctagtaggacaagccaatccagtcctcatctctcaccgattacaaacccgtaaaagtgagaacatgtcttataattctgaaaacgtcgttgtctcattcgaacagttccacaacgattttttcggctctgttttcgttagcacttacacggctttatccgtgccgaagatgatgcacggagacatctgtatgctggctttaaacaacacaacgtctctcatcatccttccttttcaccagacttggtctgctgatggatcagccattgtttcagacagcctaatgatccggcaactgaacaagagtgtcctcgacctctctccttgctctgtcggaatcttcgtctatcgaagcagtaatggacggagaacaatcaaagagacagctgcaaacttctcatcttaccaagtttgtatgctctttcttggaggtaaagacgatagagaagctttatcactcgccaagagaatggctcgtgattcaagaataaccatcacagtggtttcactcatctcttccgaacagagagcgaaccaagcaaccgactgggatcgcatgctcgacttagaactactcagagacgtgaaaagcaacgttctagccggtgctgacattgtcttctccgaggaagtagtgaatgacgcaaatcaaacatcacaattgttgaaatctattgcgaatgagtatgatctgttcatcgtcggaagagaaaaaggaaggaagagtgttttcaccgaggggcttgaagaatggagtgagtttgaagaacttggtatcattggagatctcttgacttcacaggatctaaattgtcaagcttctgtgttggtgatacaacagcaacaacagatgatctaggatttttaagaaatcaggagatgactaatagaacgagtgtttcttggggatagaaacatcgatcgatcagctggaaatggcaacgagagagtcttggggcttctggaagttgcctcggcacatatacagagatgtgaagccctagttgttaccatttcatgttagaaattgattagaaacaaagactttcttgagttccaagtaatgattacaatgtttttgaatgttgtatatatttcaacctatttcaatctgtgaatagttagagatgtttttttccgagttttggcttaaaaattggttacatataaaattagttttttttttcttttctcaaatctcaattacggattttaaatataaaaacagaatctaatttttttttttttttttttgcatacgttagttatgttcttttttttcttttttaatagattttcggcccaaacctgtaattattgcaatctcaggcccgaaacaatagcatttaatatgttagttatgttatgtgtactttagccatgttctgaactcttttattctctcggttccgtctcatcggtcttgttgtgaagttttaatggaacatcttcttttttttctaattttagtcctgcaatagtgaaaacctcttaaaagaatgagaaatgtatatatgaacaccttctaataaatatgttatacacaaacaaacagaacattttcacgtttgttgttgttgttggactaccaaaacagaaaccctagagtcgagttctctagacgctagcaaatctccaatgacacctaactcgggtagttcgacccactccatgagtccatcgaagtccggtgatgccatgccatgatctctcccaactaccataagatcataatcctcagagagtgatcggacggtagtggccacttctggacctccagtcacaatcctctctgtatatgcaatagagtttgtggcctctgtatctttaagatcctctaaaacctcgtgatcaagaatgtaatcccaattagtcgactctgtttctcggtcagagatgagtcggatcacagtgattttgactctagggttttgcttcatctttttcaccaacgagagtgcctcccgatcgtctttgcctccaatgaagatcacaccaacgtcgatattaaattttcttgttcctttcagcgacaactgtccacggtccacaagaatcccaatagaacaagatgcactcttgaggagtgactcattgagacgtcttatagcttcgtcctctgactcaaacgccccatctacggtccatttcctccccgaggggacgataataatcgatgtggcttgttccaaagcgaccttgcaaatttcatcgtgcattaagttctcgtgcgtgatggcagtgaacatggtcatggtcactgactccaactggctgaaggcaaggttggcggtatggatgtaggagttagttactacacgatttatttgcttgttgtgtgagattaggacgggaacggttttgccaacaagcttaacgagatggaggactgtgaccacaatggtggagggcaaaaattggagaaatgaaatggccgcagagatgttctcaggtctatgtatacaagtcaagatccggagatctgaatctggttttagattcatgatgttctttttttggtaaccaacgtacttccgcttcgggtcatatagtccggccaaggctgtggggataattccagagtttattagagcacaagtgatcaagaatgtatatgttgcttgcgatatatactgcaaaaacaaacaaaccatataaatatgtgaagatcatgacgaaatggattatggattggtagggaagttaccgaatcgtcgtatgttgattcgtagagaaagatttcagagaaactcttagagcatagaagaagggaagcggctattgcctccttgaatggtatcttgcagtacaagcaaggtaccatcccggtcgccattttcaaaaagcccgtaaatgtcattaagaagatgttgtaccaaatgtcatcatattggtagacgatcttcatcacatcgcatctcatcgtgctgaatgtgattgagattggtattagcacgttcattgtgagagcctcatacttggcttccaaggcagatcctataggtggaccttctggtatgatgatgccgagtaagaatggtcccaaaaggtatttcatattaaaaaatgaagagtatgcggcggaagcaattacgctcaaaaccacagcatgtacatacacatctgccacaggtttgccttctggtgtgcgttctactatccattctacgaccggccttaaaacgcaaaaggctactagaatcaaaatgatcaccgctataaggtcacgatatgctgtcatgggagagatgttcttgtacgttcccacaagataggcgaaaatgctgacagtagacgcgaagatgtcattgataagggatgcagacaacacaaggcgaccaagctctgaattgaggatcttgagttctgacaggaaatgaacgacggtaggcaagagaatcgaggattggctcgagatgaccacaatgcgctcggcaaggactttattcggcgacatgtagtaagggtctatattatcagtgtggaggtttctcacacagaagccacccaaaaaaggaacaatgaagctcaaagtccctatcacgatgggtagccatccgttgttgaatgccaatcgacggctgattttgactgtcataaaaaatgcaagcataatgtttccacacaccgaaaggcctcgtagcggcccgtttccatctagtgcaggatcccacgataatttccttgatgatacctccctaagattgaacaattgaggccccagaatcagaccagcctgaacataaatatacatttattagcatgtaggattgtcaaatgttgcttaaaacgttttcgtgcttgtcaagttacatctatttttcctgttacgtgaccgtcaagtttcatgtacaaggatacttaccaacatataagagggaatcggggaaatgccaaagcttttaagaaaactgtgaattatgatgatgaatacaaatatgagtaatatctgaaattccatgagaggcaatgaatacccgaaaatcacatccggtgactttaggttttcccaaaatccaaaagaagagatgttgaatactaagggtatgcaaccgcggatatagctcgttgtattcataaattgtggaaacttggtgtatcaactctggagaaataagaaggaaaaaaaaaaaaaaggtttgaagaacttgtgagtttttgcatatgaatttcagtggtgatcgtgtcatttttgttgtttactttgttttggtcttgatttttttttttgtctgagagttagttagtcaaaaactgtttggatattgatgggtatgatttgctggatgaattacaagctggaaaatctatacataaaacacacacaaaagtacagagttttatttgctgacaacaaatattttctgttactaattgaccctcaaatttagaaacactaatccacacataatttttttttctatgagtacttcacaataagtagaatcctaataatctgtaaaagtatacttttaatgagagctcgtttgtctctttaatttttccttaatttttttttgtctttttctcttctattgtttcttgaatattcttccggtttgaatcctcagattgtcacaaaaagtgacaaaaccacaccttataaatataagacatagatttatttttcatagggtagagttggagcaggcagcaccccaaatactaatcgttatgtgtttttttggcttgcacatagttttgacttttgatattaaataattaactacccgagaacaaaagtgttgtttctagtataataaaaggtaactcccatgttgtgagctgaaagcgtaaccagaagcaaaaaccagcggatttgggagagagtgacagcgtatccggcaaggttacttttgttgtgaacgacgaatcggagggtcccggtgcagtttatattccctctcatatttctccatgagcagtttttttactccggtggtctgaaaaagcccttgcacgtgtcaacagttgaggaaagattatttgacatcagtagtcagatatctcgaagagcatgtcaccctaaaactcctttcaacaacaaatgttggacattgaagaagaagagagcatcctctaccaagtgtatatggatgtctctaaaatctccaaatccttttctacatcaagagtctccacatactcgaccatctctacgaaaattgtgcttgtgaataagaaaaaaataaataatgtaccaacgtgctgttggcctagtggtaaatttcccagatgtaggtgatgtgttcgaggcacgttgggagggatctcttctccacaggagatgaatttaacctgttgtgggtcccgcttctgggagatgtaggatctttgagcttgaaattttagatatttaaaaaaaaaataaaaaaaaaataaagaagtaaataaataatgtaaaataaagctataaagacgcaattaaaaacatgatacatcaataaaagagaaggaagatggttgatatgagttaaataatggagttagagttgttaagttttgatatatcatagttcataaactaaatagagggagaatgttagagtcaaattaattgttaatatccttgaagaaaaaaaaattacatggaaatggaaaatggagagttgtttgaagtttaaagctagagtcaaattattttattctcctttagtgatttagatttttgttacgttttatgcttgattcacaacacaagatcttcacaaactttctaaaactcagcaatcgaaacttcgaatcagctcaagaacagaaacgaattgaagaacgaaagaaacaacacaagagatttgattacccagttcaacaagatcggtatgatcaagtttcggccgaatcagttcggcaatccactagaacagaatgagaattacagagtacaagcagagctcaacaatggagtttcaagcttttcttttttgtttgttacagatcagaaacggataatgaagaagaagaaataaaggccttttatactaattcccaaatagaaacagaagaccctctctcgcgaaaagaaggtttcctttagcctcttcaatccggtttaaaacactccatctaaccggtcctcaattcctcttaaccacaacacctaaaccggtcacttaaagttgaatcagaattaagatccacaacaattttttttttgttttaaagggatcttttgaagttttgaaaacttaaggaaaaatcaattagatgctttttaattcatttagaagatatatgtgtgtggagatgtgtattttaattacataagggtttcatagtctttgttaaacgtgcggccaaagagaaaaaatcatgtaatgcatgtgaggttaagagtcgttttgactattttaggactgatcattgtggtgttattgttcgcgtggccgccattgtataactggaatttagcgatgccgatattccaagagatttgtatggatattatatttagacaaatgaatgactatttatacatgttaaaattttctaaaggttagtcctaaaagaacgcatagtcttacggtcaaaacatgtcacgtttgttgttgttgttgttgaactactaaaaccgagaccttagagtttagatctctagccgccagcaaatccccgatgacacctaactctggtagttcgacccattccgttagtcctgataagtcttgtgatgtcatatcatgatctctcccgaccaccattagatcgtactcttctgcaagcaattggacagctttgactacctcaacgacactagtcacaatcctctctgtataaagaatatcttcattggattcagtactctttaaatccttcaggccctcgttatcaagaatatagtcccactctgactctatttcatggtcgaagatgagtcggatcacggttacacggacccgcgggttatatttcatcctcttcaccaatgatagtgcctccctatcgtctttgcctccaatgaagagcacaccaacatcaatgttgtacctattcttgctcgttacatagcttttccgcgagaattgtccacgatctactagtatgcctatcgaacaaggcgcacgatcgagtaatgactggtttagttgtcttgcagcaaggtcgtcagactcgaacatcccatctacggtccatttcctccccgatgggacgacaatcatcgatgttgttcgatcaagtgcaagtgtacatatgtcttcgtgcatcaagttttcatgcgagaacgcggtgaacgtagtcacggttacagactctaagctttcttgcatgaactgtctaaaggcaagatttgcggtatggatgtacgagtttttgtgaagccgcttcaacttcttgtcgtgtgacactatgatagggttgatctgaccaactagcttcacaaggtggagaactgtgaccgcgatagggaagtcatgtatcggtgaggaaaacaattggaggaatgctatggtctccgagacgttttctggtttgtgcaaacaagttagaattcgaagacctgagtttgcttctagatgcaatatgtcccttttctgataattaacgtactttcgtttcggatcgtacatgctccttacgaccatagggacaatccctgcacttagtagcgaatataggattaagaacgcgtaagtggcctgtgatatgaactgcaaaatcaaaccataaaaacatgtttagatttacggcaaaatcaataataacaataatagactcgtttgtgggttaggaggttaccttttcttctaatacagcttcatagagaacgaattcaacaaaacttttgtagcttaagatgagggaaacagccaaggattcactgcgaggtaacttgtagtacaagcaaagtgtaaggcaagcaaccagttttatgacaagtataagcaatgttaggaagatgttgaagtagatgtcagtgaactggctaaggatccttagtccatcacatctcatcgcgctgaatgtgattgagattggtaagaacacgttcatcgtgagcctctcaaacttagcctccagagcggatcctaacggtggaccctctggtatgatgatgccgataattaatggtcctaagacgtatttcatgttgaaaaacacaaaataagccgcggaagcaaatgctgtcagaatcacggcatgaatgtatatatcctccacgggcttgtcttcgggtgtgcggtctatgatccattgcaccatcggcttaaaaacaaaaaagacgatgagaaagaagatgatcaccgcgacaaggtcacggtaagctattgcatgtgaaacatgaatgtaggttgcttgtgtagtggcgactatcatggcaaaaatccccaacatgtcgttgatggcacttgcagataatgcaaggcgaccaagctcggagttgatgatcttgagctctagcaatatatatgtagtggaaggcaaaagtatctgagactgagttatgacaatcacagtgcgctcggccagggctttgtctaaagacatgtagtgagggtcgatgttgtcagtgaaaaggttcaggaaactgagactaaacaaaggagcaaagaaggacacgatcccgatcacaactggcaattttccgctatggaacgccacccgcctgctggtcctaacagtcattagaaacgtaaacattagtcttccaaatactgaaatgcatcttaacgctgcggttccatccaacgcaggatccgccgatagttttcctgaagacttctctagtatatcgaaaagctgaggccctagaattagtccagcctgcacataaatttatatatagtatgttatttttggaaaactatcttcatgcacgcattatcttctatgcgccttaaacaatttacgtgcatgtcaagttacatgtctacttttgtagttctaatagatacaaatcttaacttttgtatcttttagatacatgttttttcccatgcaaaaaatctttatttttgtagttctacttttctcttatgtgtttgtcaagttaaatatggaaagctgcttacaatcatatatgaaacgatctgggaaacgccgatgcatctgaggaacatatgagacatgacaatgcagaagaatatcaatattatttgaatctccaggagaggcaacgagtacccgaaaaccacatcaggcgattttaggttctcccaaaatccctgagaagatatgttgaagaatgatatccggcaatgcccaatgtaagtagtcgtgttcatgaatataagtccaagaaattagcaaaacttggggatgaaaataccgtctttgtgtgataaagtttcaagtctttgaatttgggttttgaaagaagtcgtgttagtttattgtgatgtttttgtctggtctttggtaagtatttgtcatgatctctctggaactaatggaactttccaatttagaaaacaaataccacagagaggaaaaaaaaaatagttggttctttcatggagaatttgctttgctaaataaaaaattgcaagttttgaggtttgatacactgctccaaaattagcacaaagtgtctgttcagggacccaagtttaggtctatagcttaaaatccgattacacataaatttagtctagaaatattttctaactgcttcaatatatgatctatataagtttataattaatgttttttccttccctggataatacttataagtataattattttggtctaataatacttctaaaattagtgaccaccctaaaatctgatgtactacactatgataaatttagacgtgcatgcgaaaaaagtgaggaaagatttaaaccatatttgaataggtgaagaacgaaaatgaaaatgaaaatggggagaaaatggagctagtacataagcttcgagaaagaagaagaagagaaaatgagaacaggagaagaagaagaagacaagaagccagcagccgagaaggaaaccgagttcttctcgtagctcctcgagtcgcaactaagttgagctgatttggaatccttttgcttaggtttagatctttagatcaatctcaatctgaacctacgaagatgtgaatgagatgagaaggagacgtcaatcatatgcgaaagaggaaggcacagacagatatatatgtcaatgtgctgtgcacaataacgtgatgtgtttgattttctaatggatgtctttttgtgtgatttttcttttcaaatttaatgcatttgtgtgtctagactctagatggccacgaggcccacgactggatcggcaagggagtagaggcatattgaagacggatgaatcctagacgttgaattgtggcccaagttagggttgcttgttttctaagagattattaagtgggttagaaggatgagtagagctgtagaggcatattggggttgcgtgaagacggatgaaccctagacgttgtattgtggctcaagttagggctgcttgttttctaagagattattaagtgggttaaaaggatgactatcaaactttgaacagaaaccttagcgagatatagaagatggagagagaatctcatctttcgactcctgatcccagctcctatgatatttttgattttgcctcattatcaacaattgatgtctctatatgattttatttgaggataatgcgtaacagtgtaacacacaagttatctatgttgtatattattaggagagacttcataatttctttactggatcggaacagagccaagggtatgtatctcagatcctgaacttgaaaaacatatcttgtcgaacaagttaggtttctttgtaaaatctaagacatgacttgaggccgttaaacttgtcggccccaaagaacaagttaggtttctttatcgaatcttgaaccctgctttctccatcgataggctcaatgtctttaatacttcttccttaaactcgatttgagatattattaacccttagagaaagcagatatacattaagctacatttggttgtaatttaattttgttgatcatatcaagaccactgtgatattagaggagtggagaaaagagaagagtaaggaagaaacaaagcaaccgaagattaaattggaaatgaacagatagatttccaaagactaacaaaagatataatataaaaccccaaattcagaaactttctcccaactagaactggtaatgtttttaatattttcaaagggtttcttcttagacaatgtttcttgcagttgaagaaacatgtttctttcttgaagataaacatggagtcgcttcgactttacagaccagtgtcagctttgggcaacctaatgttctaagaataccagaagctagtgaaagagtgaaagagtgaaaggacggattgagaaacacagagttgagctggaggaagtataacaatctgaatcaaagtttatggttattccttcttatggattctaagtatgtttaatttgtatataatgtaaaaaaatttgtatgaatatatacgcatattatatttaaacaaatgaatgactatttatacatcttaaaattttctaaaagtttgccctaaatgaatacacacagtcttgcggtcaaaacatgtcacgttcgttgttgttgttgttgaactactaaaaccgaaaccttagagcttagatctctagccgccagcaaatccccgatgacacctaactctggtagttcgacccattccattagtcctgataagtcttgtgatgtcatatcatgatctctcccgaccaccattagatcgtactcttctgcaagcaattggacagctttgactacctcaacactactagtcacaatcctctctatataatcaatatctttgttgtcttcagtactcttcaaatcctttaagccttcgttatcaagaatataatcccaatctgactctatttcatggtcgaagacgagtcggatcacggttacacggatcctcgggttatttttcatcctcttcaccaatgatagtgcttccctatcgtctttgcctccaatgaagagcacaccaacatcaatgatgtacctttttttgctcgttacaatactttttcgcgagaattgtccacggtctactagtatgccgatagaacaaggcgcacgatcgagtaacgactggtttagatgtcttatagcagtgttgtcagactcgaataacccatctacagtccatttcctccccgatgggacgacaatcatcgatgttgttttgtcaagtgcaagtgtacaaatgtcttcgtgcatcaagttttcatgcgagaacgcagtgaacgttgtcacggttacagactctaagctttctaacacgaattgtctaaaggcaaggtttgcggtatggatgtatgagtctttgttaagccgtttcaatttcttgtcgtgtgagactatgatagggtttatctgaccaacgagcttcacaaggtggagaactgtaaccgcgatagggaagtctaggttcggtgaggacaacaattgtaggaatgctatggtctctgagacgttttctggtttgtgcaaacaagttagaattcgaagatctgagtttcgttctagatgcaatatgtcccttttctggtaattaacgtactttcttcttggatcgtacatcctccttaagacagtagggacaatcccggcatttagtagcgaatataagattaagaacgagtaagtggcttgcgatatgtactgcaaaaccaaaccataaaaaaatgtttagattaatggcaaatgataccaataatcgactatttgcgagttaggaggttaccgtgtcgtctaatacagcttcatagagaacaaaatcagcaaaacttttgtagctcaagatgaaggaaacagccaaggattcactgagaggtaacttgtagtacaagcaaggtgcaaggcatgcgaccagttttatgacaagtataagaaatgttaggaagatgttgaagaagatgtcattgaactggctaaggatccttgctccatcacatctcatcgcgctgaatgtgattgagattggtaagaacacgttcattgtgagcctctcaaacttagcctctagagccgatcctaatggtggaccctctggtatgatgatgccaatcattaatggtcctaaaatatatttcatgttgaaaaacacaaaataagcagcggaagccaatgcggtaataatcacggcatgaatgtacatatcctccactggcttgtcttccggtgtgcggtctatgacccattgcaccataggcttaaaaacaagaaagacgacgagaaaaaagatgatcaccgcgacagtgtcacgataggctgttgcatgtgaaacatgaatgtaggtcgcttgtatagaggcaactatcatggaaaaaatccccaagatgtcgttgatgacacatgcagacaatgcaaggcgacctagctcggagttgatgatcttgagctctagcaagatatatgtagtggaaggcaaaagtatcgaagattgagttatgacaatcgcagtgcgctcacctagggctttagttagaggcatgtagtgagggtcgatgttgtcagaaaaaaaattctggaaaccgagaccaaacagaggagcaaagaaggacacgatcccgatcacaacgggcaattttccgctatggaacgccactcgcctgctggttctaacagtcattagaaacgtaaacattagtgttccaaacaccgagatgcatcttaacgctgcgattccatccaacgcaggatccacggatagtttccctgaagatttctctagtacatcaaaaagctgaggccctagaactattccagcctgcacataaatttatatatatgatttcagtttctgaaaaatatcttcaatagcacgcatgcatgatcttctttgtcccttaaacaatttacgtgcttgtcaagttacatctacttttgtagttctaataattggaaatatcttgtgtgcttgccaagttagatatggaaaacttgcttacaatcatatatgaagcgatttgggaaatgccgatgcatctgaggaacatatgagacatgacaatgcagaagaatatcagtattatctgaatctctaggagaggcagcgagtagccgaaaaccacatcaggcgattttaggttatcccaaaatccctgggaagatatgttgaagaatgatattcgacaatccccaatgtaagtagtcgtgttcatgaatataagccaataacttagcaaaacttggggatgaaaatgctttttttttgtgttataaagtttaagtctctggaaaagaagaaaaaaaagtgttcattctttgaatttgggttttgaaaagagtcttgttagttttttgtgttgtttttgtctggtctttggtaaatagctgtcataatctctctggaacaaatgtaactttccaatttagaaaaaaaaaatatatatatccagagagtaactgttttttttttccattttgtttgttcaaaaacgtaaaatctagaacatgaagaatttgctttgctaaataaaattgcaagcttggaggtttgagccaaaattagctcaaagtttctgtttggggacccaagtttatagtctagaaatattttccaactgcttcaatctaagtttacaattttttttctttccttcccttgataatattttttccgatctaataatacttataaaattagtgaccaccctaaaatccgatatacaattaatccgatagatctatatatacatttttgcaaccattttgtgaaataaatcctgtagttcggatttatttacaatggttgccactggattttaatgtttgtttttgataattaaaaagaaaatcttcgaattaaatatttgacatttaacaatcttcccaaaatctcttcatattaactacatgattatttactaaaataatacttctaaaatatttaatatcatttaattactacaaaattatcatttttgatattgcttttctccataactataacaattcgattataatcatcaaagcgcagagatataatctgatagcatttaattactacaaaattacaaaatatttagacaatgattcataaacatatcataaataagatcaacattaataaaataaatggttttttttacaggacgggtttggcaggacgttacttaataatatttgtaaactataaaataaaattattttatagatagatataatttgtaaacttttatatatatactaactttaaaaaataaattgttcccgtggtataccgcgggttaaaatctagtttagacgtacatacgcaaaaaagtgaggaaagattcaaaccataattaaaatgtttaatatggctggtggtcaaaagtttatctgaaatttctggtgcttattacctttcattacctcaattactaaaaacatctgaaatatgaaataattaaaatcagtattcaagttaaattatattacaaatattaaacatacaaaaaaatgttgtattttttattgttttaatggtgagaaatggtaaaatttttggaaaatgttttaacaataaaatacaccaaaaataataatatataatcgtttgatttgctcaaaggctgatttcaaatgagaatctttcaaaatctaccactgaataaatacagattaattggtggacaagatgtgagattcatgataatagagcaagatgatgaaattgaggacaagatctagacgcaacagagaatttccaatcgaagataatatctggagacaaaaatgcggaattatataagggtttgtggatctatggtcgttttatcgaagttatctttcaaaatttctttcaatctagatcttgaaaaagagaaattttaatttttatgtgccaagttcacattttttcttaaccattaatctgtatttatccacttttactaattcttgctatacacttttaattctacaatttttatacttattttgtttttggtgaatatttttatacttattatttcaaaactaaacgcaaatatattttatattaaaaaaaatttaaattcgagaaagaactctcagaaatgatcatggtaatttcttctccaaacgccttaatttgtttaagaaacctccctcaacttatattttgatgcataaatcgcccttctcgataaaggtgttagtcaaccgttattcactcgtatttttcgacattttaccaaacttctgagctctaagtaaaatacaatgaaaattgagataacttattaaaagtgaacttaatttcataaactgttataaaagcataatcttctttcacatattttaaaccatcataagctacatggtttagactatagaatcttaaattcttctgctatagaacatgaatcttatccgctgattactgttgaagccatttgtggagaatgctagcttggagttttcgaatttcaggtttcggacatttgacttgattccgaactatatgatggaggaatataatgagaatgtaaccattgcgtggtagagttagaggacgcaactgaactgtcaaaaaactatatgttgcttggaagacaaggactgcaatatgaacattgtaaaagagactaacattgtaatggttaacttgagtatgcagtttcaattagtgttcataacgtttaactttttctatccctatccataccaaatcttgttttcaggaatttcgagtatattcttcaactgaaactggtttgtatacaaaataaaaaaaatggtgttccttccagttttataaaaaccaacaatgaacccccatatcgatttctctaatatttataaacttattttataaaaacaaatgtgtatatttgtataattttcccttttagtaagtctcgttaattttattttcccgtaactaagtgtcaaatcaataaaaaaggaataagcataatcatgactttgtaaagcttcaaaagaaaagaaaaaaaaacaagattttctcgtacaatcgaaatttttcttgtctgaaaaaaagaaagaataagtaattttatagtcttgaaagaatttgtaagcaacaccaagtattggacttttgctttaattaaggaaaagaccaattaatagagagaataaggtctatatatataatcactcttaacttttccctttaaatatctacgtatacattattatagactttttgaccaaaaatccctcaactatttattattttcaatattagtccttacaaatataatctcaaacaaataatttataactaaaaatttacaattagttaattgcattaattagttgaattcactccaaagacacttaaattgttatagaaacttatcataactttttttgaatcacataactccaacgccacaaattttttatagaaagttttcatactcaacaatgtgcattcatttcaaataaaattctcacttcagatatatggtaaatatcaaactacatatatgacttttcctagataatacaagttttaaatcattattacttctaaaaaaaactcaattcgtaaacaaaaaatactgaattttagcataataaactaatattcagcaaatatcataacataaaacatgaataacacaagcgataaaaattatagaattttgaatatattattcatatacaaataataatacttataaaaatatttataacttttcaatgaatatatacgcccgcagtgtaccgcgggtcaatatctagtagactattaataatgggattacaaaactagtataccttcgtctaaatttttgataattaataacaactaaacttttgttctttttgtaatcagaattccgatgtttgataagtttatattaatctatgatattattagactatatagttacattggattttcaaacaaattatcattttatcaaattatgttaaatattaccttgatctgactcgagatcggaaaataattaatttatagtgattattaatttatcgaatgttaatttataaaggtcatttttcgtacaaagtatttacgaatctaatcggttttagtggtttttgcttcctagccatgaaaaccggatttaaacggatgagtatacagaacataaaactcaatggctcttcccaaacccaatgcatttcaaattttcttgttttcttgcatacatcttatattctcaatcttaatttggtaactgaataatgatcttttcttacaaaatttctcatagaaaattcaggaaattgtttctacttgggagagcgacatcaaatatggcattactcaagctcggtatgtacaagacttggtggatgttgctactccgtcatttcttctaagccgctagcatcaaaacgagtttcgagctccctctcttggagcagtgattggagaagttgatgatgtgcaatgtggaccttacactcttactctgtattggcgagtaaagatctgtggtatccatattattgggtaatgactatgctcatgacatacgttatcatcccaagagcacacaactccacggtttagcaatgaagatggatatgctagaggatgaaatgagcctttgcaaagtcatgatgctctatttagcagagggacgatcgctagagttaatagagaatatattcagatcttccaaaacgaaaggaagagtgatatataacaccatgatctcggtgtatggaaaacactttgctgagaatgcacaccagttgtttctggagatggtcaacaacagaattcgtctcagcggtcacaccttcaagtatcatctagaagcatggacgatagcctgcaaaccacaaaggactcttgaat

SEQ ID NO: 1355 - DNA, 89214 bp, Arabidopsis thaliana
gaattccgatgtttgataagtttatattaatctatgatattattagactatatagttacattggattttcaaacaaattatcattttatcaaattatgttaaatattaccttgatctgactcgagatcggaaaataattaatttatagtgattattaatttatcgaatgttaatttataaaggtcatttttcgtacaaagtatttacgaatctaatcggttttagtggtttttgcttcctagccatgaaaaccggatttaaacggatgagtatacagaacataaaactcaatggctcttcccaaacccaatgcatttcaaattttcttgttttcttgcatacatcttatattctcaatcttaatttggtaactgaataatgatcttttcttacaaaatttctcatagaaaattcaggaaattgtttctacttgggagagcgacatcaaatatggcattactcaagctcggtatgtacaagacttggtggatgttgctactccgtcatttcttctaagccgctagcatcaaaacgagtttcgagctccctctcttggagcagtgattggagaagttgatgatgtgcaatgtggaccttacactcttactctgtattggcgagtaaagatctgtggtatccatattattgggtaatgactatgctcatgacatacgttatcatcccaagagcacacaactccacggtttagcaatgaagatggatatgctagaggatgaaatgagcctttgcaaagtcatgatgctctatttagcagagggacgatcgctagagttaatagagaatatattcagatcttccaaaacgaaaggaagagtgatatataacaccatgatctcggtgtatggaaaacactttgctgagaatgcacaccagttgtttctggagatggtcaacaacagaattcgtctcagcggtcacaccttcaagtatcatctagaagcatggacgatagcctgcaaaccacaaaggactcttgaattcttgcatttcatgatattgttttttataaaggtatactttccatgtattataatagttttgacaccaaaacataattttgaaaaatgagatcagttagaaaacgttgacataattcttttcccaaatttttatggtaattattttcttttagagagtaaggtgagagttctgtttttttccttattatatatgttttttataaagtttcatgtttaatgttttctatgtatgttttgcattctgattttgattttaacaaatataacatctaagatctttaattatttttgtttgatttcttgcagggtaagaaaaagatgtaggattctaatttttttatttgatctcatcttccaagtttttaaaaatatttgagcaattgatgtcaaaatggatagaaaacagagaaataagctaagaatattgtataattttattataatatatgtatttttatttcttacgttttaacctccacaaatgatacgttgggttaattaaaaaagatatgtcatgttatatattttagtctcctataaaagaattgttactatgtaacaatctatattattaattaggaatcattcgatataatataatcttataaagaataatatattataaaaaaataccattggtacttttgcattttagaaaaaaatcgtcgaaggataaagtggaaaattggcaactaaaaagaatgcgggtcttgggcttggtatcggataaacactcggatctataaagctacaacgtctactttgatctataatattatctacaagtaaaaaaagggatattgttgaggcaactaagcacaaaagcaaaaagcatcggactaagaaatgaagaataagaacatttaggatgagaagactaatgagaaggaaattacatatgataataccaaagagaaagaaagggataaaatcaacacctaaatttattggtttttgatttttaggttgttcttggcaatttcttttgttttgtattctttatatccctatttgcctttgtgttgttttaattctgatagcattgttatgcttaataaataaagtgtctaactctcggtttaaagaatgaaagttctatgttatcagttggagaaaattttagagtgcttagacaacaaaaataaccaaaactaagatagaatacttacatatgatccatttgatggatagttctccatcgttaatcctagattaaaaaaagttataataataatagcggaaaaaagtcaatcccaaatgatttcatatatatctccgtgagtttaagtatgtaattttgtaaaagtaaagtaaacaatcacctggtacttttgttgttgagaagaagagacattgaaaacgaatagcttaaaaatactaagaaagtgaagcctcaaaaacaccatgtctgtgcaatattgagagctcacgagctccgacaagatggaaaaaaatagcaattaatgagccatgaaacgaactagatactacttcatatgtaacatatgctaacacttatctttctgttcaaatgtgtaattcaacaaacagacaacaaaattgtttcaagtattcatttgaaaacacaaaataatattttacaattactttttataattcatatctatactattatccaattcactaaaaaacagaaaacaaattctgtaattactaatactactattttaaaaaatatagatactaaattttatctaacacatatgttaaaataagaaatcccacacgtatgtgcggatcaagatctaatactatatgtaaagaagaattaatctaagggtctaaacctagctaactaaaaatgaccataagtcaaaattttacggatttgtctaaaaacactcacaaaatttcttgctcttatataaggcaattgtttactaaataatacataaaagcaactaatttaatatttgtggataaagtttaaatatccataattattatatgaaccacaaagtattatacataacaacaaaatgtttacattcacaacaactaattttgattgattaaatttcaaatgaaaataataatttgtatatagatctagcacataaaattataaatatctctatatttttctacaaaactaaacaaatctaaaaaattaatatatccattattatattatttagtaaattatataaaacatataaaaaaaaatcttgcgatgtaaggcggggtaatcgtatatatactgcataccaaacttgtaaaatccaaaactttcaatttcaaacaaatatcacacaaacaaaacaaaattcaaatattcaataccccaaataaaatacccaaacaaacaaattatttaccatatataattacataaagactcaaatatacaacaaacaacatagcataatacgtaatttatgaaataaattatgtacattcaaattatacatcttgattatgttatttaaataaaaataatattaattaaaataaaaaattctaaaattgtaaagaaaaaatcatcccgcggtataccgcggtcaatttctagtaatatttcataacgagtacatgaaaatatattattaaattgcatacggaatagtaagtttttgagtttttattatatatatgaatgctacaattatagcacattacatgaaaatacatttattaaattgcatacggaagagtaagtgtttgagtttaagtatatatattaatgctatatttatagcacaagttaaatgaccgtcgtaatacttatgatgttacttatgaccgtcttaacacttacgttacttactcttcaatctctcactaattatatactctcttattatgagtgattatcgtattcagattatattttcatatatttttgtacatttagcctttccaaatttatctaatctatctatgtaatgaaaacaaaagtgaaaggagaagcaacttgaacaaaatttccctccacatcagttagtaagattcaaatcacaattttttgtcccatttcgaaccaaattccgcattttatttactaagttaaacatcgaagaaattatcggaaaaaaaaacacattatatatattgttgttctaaaactatgtatgtgccaatttaccatcacaaaagatttgtttctagtgaacgaaacgagttacatttatataacgaatccaaacgatagttgatttatatccgtatttgagtacgacttcaataaattagattccttgataccataatttttagataaaattctgaatctgatgacaaaaaaaaaaaaaaatctgaactgaattttggatgaatccgttaaatgaccaaattggagaaacattttttttttttttgttaaaggaaattggagaaacttgaataaaaaaaaaagttaggaggtccatgcaataatatttagcacaaagacagaaatccgatttaagatcttcaggacccacaggggttccaaaagaacacatcaaatcctttccggttgttggcttacccatcgactttccggttaccacttcccacccatctcccattgaaatataatattgcattaaaataccttaaaaaaacttttagttatgaatatacctcgaagttcccaaaattaattaaacacctccaaaccatagacctcttaagtcttttagacttttagtagagatgggcatccgggtacgcgggtcggattttaataaaatttgattggatatgggtctttcgggtagaaaagtttaggacacaataagataaatttcaatctcggttcggtttctgtttggttccaatcggattcggattggttcaagtatagattttaaggtcatttttagaaccgatatccccgaatttttgggtaaatacccagatttcaggtaaatctttgagttttcggtaaaattttgatattcgaataaatattagcctatatttgggtttggttttttgggttgaggaatttaggatccaatagaataaatttttgggtttgggttcggtttcgaatctaacttttcggggcggttccggtttatttgcccggcactatcttttagtatatatattatatatatataatcaaagtctttacatactatacattacatttcctgaaaacagaaacatcacatttcctttagatttttagtattttacaccaaggtgaaattggattacaaaggaagaaaaaaaacacaaaacaccccaataagtttacattcatggagccaaaacatgaatgtaaaattgggtttaggaaacaaaacaagaaatcaataagcacaacaaaagaaaagcaaatagcaaaactctctcacttggtaaaaaaaacactcatgttcgagtatgagttaaaccaggggagtttcattcccatcactctctagatctaaaccctaaatggatcagattcactctccacaaattcaaatcaagctctatctacaacaaactgactaaaaagatcactctcactagtaccctaagtgagattaatactgaaaagtgatctgtatattggtatattagaaagactatatattagtattttgttgagtaaggataaaaagatcagtagccggttaatggagaagaactttctgatacttagtctctgaataagtttcatctgagattgagaatgcccttttcttgttggagttcccacagccattgttctgaaactgaggtagtggaatggtgacaggagggatctcagaggtctcaagtggaggcggtgggtggcgccattgaggcagaggaccagctaagagaagtgtctgaagcaaaggacctgccttgataacagcttgtaagagttttcccttttcaggcagtggtttgtcaggcaacaatgtagccaacatctcatctcctgagacttcaatctgttggttcatcgtcactggatcaatcactgatggtgacatgatgctttcttcagtgtctgaagacgaaaagctcttgtttgagttaagctgcggctgctgtggctgaacttgctcgtcttcaataatacttgaagctcctgataaaggaggagtgacaagttcttgtttctgattctgattctgttgctgcttctgttgaagtaagagattatttaagaggagatgattatatttctctagagcttcgtctctttctttgagggttttggttaaaacatcttctaggtggatcagttgttcatctctcttccttagctcctcgtgagccacaagctttgtttgttctaactccattgttgtgtacacgagagtctgtcttagctcttccgttgtctgaacaattcaacaggtacaaaaaacacaaaaacaatcagctagacactgagaaaccattgagcatttctttgcagattcataacaaaattagggttttggtcataaacacacaacaaatcccccagtaacatacaaagaaacagagaaacccctaaatttgagcattcatatcaaaattagggtttttggtcaaacagaacaaatgtccccaaagtcttgtcttttccagctaatttacatacaaaatgtgaaatttaaactaaaattttaagattaagaacacccattaagcaaaattaagctcagaaacagagtataagtgatttcaacaaatttgatataaaaatcagaaattgagtcaaacttaggggtttataacataaacgaagaagaagacacaagaaatttatgttttttagacacacattatgcatagatctaagcagaatagtgaacccatcacaaatgttaagaaaaacagaggaagccaaaatgttagagataaaaaaagtctctacctttccatgagagaagtaagtccagctaagaagagaattgctttggtccatgatcttgcaaaattaagcttaagagatctttaggtttagtgaagagttttatggaagaagaagaaggagggagagagagttataaaagtagtgaaatttcatggactggttaaaggaagcatatatgcctgtgactgtcaaatagagagctttcaacaccttttatcttcagtatccaatattattattctacaaaagttgataaaccccacccaaattatatatttatattataattggtaatttatgagaaattgtaaaggaaaaagtattatatcacttattaggtattactaaacataaaagtatggtttaattatatattttttcttttaataaatgatcatgaattagagattcttgactgtatatcacttacagtgaaaattaaaattttatcaaataatataactattaacctatttggttgtttaacatcgttattattcgagttcatattcgtataaaacatgaagttaataattataaaaacaattgtaaattttattactgtagtagtttaaaattctagatgattgtaccgaattgtctgtctaataaaatggtggtcctaattttttttaagaaaaataatttgaatgattaaaaatcaatgacattttttcacattttctatttaaaacctaaaataaaattagttttatatagaaattggtgggcactgaaaacataatttttactgtaagaaaactaatagcccttaaaacagaaaaagaaaaaaaagttgtttagtatgcttatctttcggatcgatctgccctaatcgtagaattaaaatatatgtagtttaaactgttcgatgaaatcatagaattttagagtggtaaatacccaaaaaaaaaaaaatactttcaacgaaagttttttttttcttccaaatagtcatagtgatcgaactatttatttactgtttctactaagtactttagcatatgtcaatggttttgtgcaatgaccaattccgtagtttacgtacttgctgggtctcactttcttagagtatttttgttttcttctttcgtgttgtcaatggatacaacagcatttctttggcttttacccaaagacgaaacaagtttacgagtgtaatgtcttcacattacacccatttcacactaccaagtctacaccgagtagaacgggagaggaatgctatatttcaacatttagtttcattatgtctgtgtcgagaagttaggaccttgatcagtagtaggacaaatataaaagagtgtctaacaattttcgaggtggatattatcaactcacgcacgcacatttgttcttttatttgacacgataaagatatttatataaattattaagctaaagtttcggtctaatttctcatttttttttttttaaaaattgtgtgtttttaatgggaaaagcaaagtgtgtacttgagaagagtactaaatacatttcttaaaatattatgcatgtatttgtacatgattcttgattagttgatttttatcttaaatcgagattgcaaaaaagatatagcatagtcatatattttaatctaagtggacttgcactgtttcacattgcttttattttacttttcctcctcttaaaatattattggttgcgctgtaagaaatttttaaagacattaaaaaagttacagccccaaaattgaaacaatcatgctttagctttccaattttttctcatagcacaaataatattttttttttattattttatctgtaagttcatgtttttctaagaaaaaatctttctaatgtccttttcatgatgtcccttttcaactatacccttttgttttatccattttcatttctaccctctttaaatttttaataaccatgttacccctatttgaaaattgttttaggttaataaaatgaaatattaatattttttcgcctaaaatatttaaaatgaatttcccgccaaaattttcccgccaaatttttttttccaaaaatatttttcccgcctaaaactttttttttacgggaaatagatttacaagggattttaaaagggttttaaaatatttacaaaggattttaaaaggattttaaaatatttgcaagggattttaaaagatttacaaggaattttaaaaggattttaaaagatttttaaaggattttaaaatatttacaagggattttaaagggctttaaaaaatttacaaatgtttttttaaagatttttaaaaggtttaaatttgttttaaaagggttttaaatatttacaaggaattttaaaagatttacaaatgattttaaaagggttttaaaatatttacaagggattttaaagggctttaaaagatttacaaaggtttttaaaagagtttttaatggtttaaaagtgttttaaaatatttacaagggattttaaaaaggcttaaaagtgttttacaagatttacaaggatggttttaaaagatttataagagatttttaaaaggtttaaaaaagttttacaagatttacaaggatggttttaaaaaatttataaaagattttaaaagggtttaaaagtgttttacaagatttacaaggatggttttaaaagatttataagagatttttaaagggtttaaatgagttttaaaaaatatacaagagtttttaaaagatttttaaaaaatttacaagaagacactttaaaaactcttgtaaatctttttaagacttttttaaatctcttgtaaatactttaaaactcttttaaaatctcttgtaaatattttaaaacccttttaaaattccttgtaaatcttttaaaacctttttaaaatctcttgtaaatcttttaaaacccttttaaagttccttgtaaatcttttaaagtcttttaaaacctcttgtaactcttttaaagctcttttaaaatcccttgtaaatctatttcccgcaaaaaaaagttacaagaatttttaaaagtatttttttggctctggaaaaaattgttatgaaaaaaaaaatttggcggaaaattgttttttcgggaaaacaatttggcgaaattttttttttggcgggaaaaataaattttggcgccaaaaattttgcggaaaaatttcagtttccaattacatgttcctattagatgagggtaatttggtcattctgttaaagtgaaggggtatttttaaaaatggacaacataaaaaggtattgttacaaaaaggtagtaaaaaatgtagttttacaaatctccctttttctaaaacacaattttatggtctttagaaggtctgtacctttttttttctttttttcactttattttctcattttctttaaaaacattactatagttttcatatatatatatatattaaatttagttttatggatataaataataggtaaatacctactttatgacatatatataactttcattatttttaatatatatatatatatatatatatatatatattaaattgatatttatgaattctattatataacacataagtacaatttactaataatatttttttgtttaaaaatacatacaaccataatctcatttctacaaccaatttcttcaaataataatatttaattaataaaatttacaacctaatttttacaacaataaaatctacaactacagtcatcatacatacaactaaaattctaccgcaaaaaatctacagttacagacgaaccaatcacacactatactagataagaaattaaaaacttataagcagattttcccgtaatatagcaatatgatagttggtctactactacatttttgtttttggctaaaatctacgactacattttctataatatcttttaggactttttgtacttatattacagatttagaagagttttttttaggatgttattaattagaagagtttgatatggtcggatgatattattcgaaatcagtttcaaaaatcatagcagtcatatcaaatttacggtgatatgaataaatttttgctaaatgttattaattcacatatatcctagtatattatttgggaagtacattttaaatgtaaccttaatttttgtaattaattacatgacaatgccattagaaaaaattaatcaaaaacaaaatcctttaatgacatcattaaggttaccaaaatcatttaacgacaatattcatctgttaattatagggtttattggatctaaagacgggtcatcaagatttcataaactgaagcaaaatatactgaatatacaaatatttatctgttaccaaattataaacaaataaattcgtaaaacaatttaatattttatatatgaaatcaattaaatcttaatcacataaaaattagcacaaaaaaggaatcaacaattaaaaaattatcaaatctctgtttatataagttttgatactatattcgaataaagtgtaatctaccttttcaatttgtattctttaactaatttaagctaactaatatatttgccaatcttatacctacaaaactaactatcgtttcttatctctatagtatttttgcaagactttttggtggatttgggtaagtgcattcgggtcatatggcatattcccctattaaataaatatggtgcactcctatgttattagctaaaatgtttagattataattcagaatcatatcataaataaaattaatattaataaaataaatagctttttggcaagacggatttggagggacgggtttttgaatcaacattaataaaaaagtaaatatattattaatccaccgtttcaagacgggttaaatctttaatttattattttttaagaccactaatattaaacatatcaaatcatcctaatttagaaaagattatataaaaccaaaaatgttatgtgctatgtatagtgttactatatttaaaattaaactataaaatataaatgtattagagaatgatataatttgcaaaacttttatatataataaataattcttaaattttaaaaattactattttaaaaaaaaatcacgggacgggtaaagaaattacagaacgggttttattttggaattgggttatatggtggatgtatttgaatcaatatttataaaattttaaaatattattaatatgctgttttaataggggttaaaactttaattttttaacaattgtttcatggattcgtgatatagcgttacttaataacaatcataaactgtaaattataaatattttataaatattactaaataatttataaaaataaaatttgcaagttttaatatatattacttctaaaaataaatcgtcccgcgatatactgcgggttaaaatctaataccagcttgacaaagaaagtggtcaacaaacatttctggtagactttagaccattcatgtttttccaaaagatatatcgacattaatagaaatagtaagtcatctcccgaaaccatgtgcatacagccccaaccaaagaaagtcacaggttttgtctaaatgaaggaaacatgtattatcggcggcttgtatttcttgaaattaaggaaaatgtaatttgacttgtggggtgtgtattttcatgctcctagaaaagaaaaatagattatttccattgaaggcaatttagtttaagggtgaattgcaaaagtgacgtttttgggtgaaagaattaaatatatagtactataattggggaaattaagaaagtaataaatgaaggtgaggaaatgtcatcaaactcccttttaaacgcgtggatagattgtaaaagtgaatgacgtggcttgtgtttttaccaacaattttattactatttggctcaaacagtacaaaaaatattatgtaaccggtttcatctaaactccatcaaaaattgcagactatcttcaatttatgtgctaacactagcacaagattttgatatccacatgaccacattggcaacggtggtggctccgacaacggtggtggctagctccggcgacggcggttgctccggcgacaatggaagctccggtgacaatgggaaccccaacaatggggtggtggctccggtgatggcattcattctggtaaggttggtaactccggcggcggtggtggtggtgatgatggcggagacgtcggtggtggtgatgacggcggcggcggtggtgtgtggttatggtagagatggttgtggtgataagaaacaagggtataatggcaaatattgtagaaaatatactgaatatcatccactttttttcttttggttagttagtgaattattaaatttttgtaggttactgatgcaaatttcccttagtttaatgtttttttcattttaatacaaatgaatatatggtatcactctacagctggttaattatttaaaataatattttgtagattataaaagtttaacttttagatatttagatttacattgtatctcaatgatttatgctttgtgtttgtatccagctttcatgtgtatggttggatgtttatacacgcacatattcaaatatgacgtggattccattctcagcaaaaaaaagctggtaagtaaacattttccaccaatatttaaaaagtcgatccttttcaattatgaatctccacaccaatcttggctctcaattttttttcactttggtatttagtattttcaatatctaaacacaaatttgaaaatagagatttaccaaataaaaatgttttaaatatatataaaaaaattgaatcatttgactatagttagtcgaaattcctatgtcttttgtttccaatactcatagagcgatatcttagatagcataagaaaataaaataaagcaaataaccataaaactttaataatgtatatatatagcctttatttaatgttcacaattgtcaatataaaactctggctagagatccttttgcatagtcaaccaactttcttgctatttatctaaatttactttaaactttgttgggagatagacgaaattgaccatatatatatatatatatgtatatatatatatatatattatatttagtttaattgtttgtattatgcatatctaaaaagttagattaggtcaaatcttatttataaattataaaatattttagaaatatttaaaattttcatataggaaaacaaattagaaacaaatattagcatctttgattgaacgagaccaccatcctttgaaggtttttagagtacaagtctaacatgtgaaggttgctgtttgaggatttaagttatttttttaaagtttcgcaatagtctgtttaccattaatgtaagaagtaatttgttgaggtttctattttattactatgtttgaacaaactttgtttctaccaatgtatgtatcactacacattaaaaaatttggtaccaaaacattttagtatacaatcagattactacgcagtttctacaacaacctttccaatttttagattaaaaatcttaaaatcattatttttcatcttggtaccaattccgacgaaaacataaattgataaatgctctttagtataaattagaaaagtttcaactgaataaatacatgtaaataaaatttaaatgagaatattgtttttattcttaaatgataaacaaaaattacggaggattttgtttttgaaatttaaaatttaaaattaccttattttcaaatctttttaagagcgtctataaatttatctatattatagttagcggcaaaataagaggtaatgattaaaaatattcataaaaaactgaaattttagtaatttatgtatatacaatttctgttatatgttttaaaatcgtcaaaaattaactttaaacctgaatgagtattttttttctggatcaacaaaagagttgaattaatgtccactttttgtctagctaatgtctatggaaataaaaaaggagaaaaaaatagaaatgaacattaaccgtaagtggaagtaattaaggaaagttatatctctatttttggctcccaaaagaataatatctctatttttagttcttggagtaaggtagcatcataatatttacaatcatgatggtaatattaatgggtatcacatggtgatatatttattagttatgatgattatattgaaatagaggctttagtattgtcgctaaattttagctccaatcgaattagcatattatatattattgatataaaaaactaagagaaaaagctaataaggtaaatacttccttccttaagtccttttatatatttattaattagaaattaaattgacatattttgttttaatcttttttctttgttttttgttttcttatataattctcatattataatttttttaaatctaaataaagacatttaaaatttaaacattaatatatatatatatatatatatatttatataataaaatgcttatatttacaacgtttacattttttctgtggtgacaacatgaacaaaaatgtcaagtcgtgtgcattataggcttatgtatgtttggaggcgtatgcttcgcatgttgcatccctaacgtccacatgaattgcatcaacttaaccatgatagagtaatcctcagcggtacatgactccaccatcgtagtaatcctaaacctataaaacgaaaaagagatcaaacgtacaatttctcaccatatctaactttttataaataagaattaattaatagagatttattatgaatattttaagttgaaattgtgtttttgacatttagcacgaaataaaattctgatagaaaatatacaaatcaaatatctacaacccctggaaaaaaccattgttttttataaaaaaaatttacatgtgacagtcgtaatcaatcctaacaatttgctatatttgggtcgttctggctaatatgcagccacattacaacaagaaatgaccactttgacaatacatgtaattgcttgactttagtctatccaccgctaattcctgcgtcatgcggcaacaaattggttattggactactactcaaagttaatttcacacagattagtaaaattttgcctctagttagttttggaatggcaacattaacttttactgtaatcacgtccattccgtaaaaccaactttttacacttagttatttaaccagtgacccatttggatatctaatattggaaagaaaagtttaccaaaaaagcataaacaaaagtaaatatagcacaacgaaccaaacaatttgttaattatttaaagtgcgtagaatcaaaaagagggtaaaatgtctaaatctatatcatgcaaaagcctaaactcataaaacatatgaaaacgattacaattctcaactctcaattcagaaaaatccgtcttatacgtatacgtttgaaacaatactatgtaatacgattcgatctagagaaatattaaagctccgaacgttaaggaaaaagactttgacgttgatttactattttactcacatatacatatttattttcttttctgagttagaaaataacatatggttaattaaatatatatatatatatatatatatatatatattagtataaaaatcggttatggttctttaaaattctcaatggatctaggcgttttcgtacgaatttcgacaactaatttaaaatagttcatatccaggatatggacaacaagaagtacttagttatattggttaaatgacattctcacaacaaaacgaagtgattcttgaaatgtttaacatttgatagagtcatagacatttcattttagttcgacattataatatagtacatgagaatgtccaaacatgtatcatgtatgaaggcccacattatccaatattcagtaacgcgcaatgaatatgatcgtgtttgcaatctgactaacatagattattcacttgcacttattggttaaggtttgtgttcgaagccacataaatgggagcttgtataaatgcataaacgagacatgctttgtgtccattatattcaatataactaatcatgaaactgaattataaacttttctgttcgcgcattttctatctcattaagttccttaatcacgataacaaggcacaccaattgcatattttgtcggccaataattccccatgatgttcttaaagaaaattactgataattaatgaaacatagttagtacaaatcttaactataaatatgaagaaaataaaaccaaccgaatttccgttttgacagttaaagaggtatcgattctatagaaatgtctttaagagaatcatagtgtaccattacataaaaatatatgtataatgttttatacctttgacactttctctgaacgctttgagtaaagtggttattgtttctatgatagtataatttactcttcaatgtacttatatatgattttgatgtgatggtacgcaaaatttagttttgatatatttttcaatcttctcttctgtcagaaaaaattacattatttatcttgaatgtagactaatatagtggtggtctaggtaatttgggagtgcaaaaactgtcaagtttgagttttgatatatactctaaaaatataatttaattaagtaattatgaactttcgacccatagtttttatttatgtcagtaatcacaaagtgtaaattaatctcctccccattgtagtacaccaaagctatataacaagtcttgtttccattcaaaagctctttaaaaacaattggtaaaactaccaataaatctaagataatatttgctttattttttccaacacatagattctaatgtcaatggtgacataacgacaaaactaatacagaacaccatataaattatattatggtccttaatattattcccgcataattgtctaaagcctaaatgatattattctatgttaccaaatcccataatcgcattcccatatatagatattttataagaaaaagtaagataagaactagtgttgttaacattgagatagctatattttgcttttaaccaatatgaggtagagatttatggtcgtgaaatctaactaaatggaactttatgcaaatagatttttattcacccctaaagtgggttcaaaatataaaacattatggatgctacttttatatttatgcatatattttactagaaaccgtgtgggtccacttcattttaaacattttcaattgaaatttctatcgacaattggtccattcgccacgatgtaaaaaccttttggtgggtcgtcaataccaaacatcaaccgtatcatattttggggatcttctagattcttaacggtcattgtttataaactttataattgtccaaatatatatattttctttggtatcaaaaaatttgcaaatatgttttctcgtatttcgttttttttataacaaaagtaatgttgtgagtaatttagctttatctcctgagacacccttgttaaaaaggtcgacgataacaagtgaattgataacaaattattcaatacgtaaaccaataagaaaatgttaatgtttatgattgttcgttcgcgacaacaatacctaggacatactaaaattcaaacaacaattaaacttatttttcattttgttttttatcatcaagtgactttaaaaataaagcatgtaaattcttatatttcaccactactaattaacgaaaggtaacacattctgataaactttaatcaacagtcacgatgaaaataaccttattatagttggttagcaacagtattttttatgcattaaccctagtttttatccattgtatccaaataaaagcattgtagaattctttctcataaaaaaaaaagaagaaaattttctcattgtcattggcatataggattcgattacaaaaaacaaaaaaactattatcccccaaataggccttagagagcttgccacggcccatataccaattatcggccaaccaaaaatttagtagaaattgcgtctgccgggagtcgaacccgggtctattgcttggaaggcaattatcctaaccgttggactacagacgctttttggaaggattttgttaaagtcaattataatcttaatttgtcaatttctaaatcatacagattcagactataacaatgccttctatatctttaaaatttaatattttctaatcatagagtagaccagaactgacactggttgattttatcgttagcttgtgtatactgtttttttttttttgataaatgttttggtaactttaacatctaaaaaatagtcatatttgcagattaaaaaacaatgctacctttatgaaattgcctcttattttttgccattttaattactgcattaaaaagaaaaaaaaaagaaaaatcaacatgtagtctcaagccaacgaataagagctagctgctacagcataaggttcggaaattcaaaacaaaagttcatatatcaatatcttcccaacgcctttttgcttcggagagccgttgccacatccactttctctacttttcgttgtttttttgttttggctcgcttcttcgtttcgctctcaacttttcctttttacctagaaaagaaaaagagaatcttcttcttcgtttttaacaaatacatgtctctgcttttaactacttcttatgtttctttcaaaatttgaaacttaagtctcaaattgtatagtttcaagaataggagaagatgatgaaaagatctccatttcgtcacaaaatgaggcagagtctctctgatattactaactctcagtctcaagaagagcttaatcttcacaagatcggttccgagccgagtggacatgtaaaccggctgatgaaggttgcaatctctaacttttgatttcatcttcttttttttcattgactgaatttgatttcgacaggagaatttagcattggttaagcttcttgaggaaagagagtatccttttgttccaagcaacttgttttaagtaatgaattcaagaagatatattttctttaactatcaaagtaaaacaattgatataagtagatacgaattgcggaatttacgcgaaggcatacacaaacttcaagtacaaaattggagccttgctcaatccaattcccaattcttaggcgtaagcttcatcgtccactttcgttttcttgattttctctttgattcaaatttctgaatagtatcaaattgttttgcaggagatcaatttagctagaaacaaggtgaaaacataacttctctatggtcacatgttttagaaatttttttttgtctaaagtttagataatgtttcaggtgaaagcgttgcaccatgaggttacttgcaaaaatgctttgctaaaggctaaatgttgtgacaaagaggtttgaacatttttttggcgtttctcttattttattcaaattttgttatacatttagttagttatcattttaaatcaaagttggttatgtgttgctgatgttattcgcacatttggatcagaaaggtgaaaacactaaaccaagaaatgcactaacaactgagagtgtgctaaatataacggacgaagactcaccgtcaccgaaaccttttgtaccaaccagaaggcgattcatcagaagcaaatgtatatatctcattatcttcttgattcttctataactatctatggttgattttctaatttccttgatggttttatctacagccttaggagcatctactacaaacaagaatgaggcagaaaaagtgaaatcggaaaccaaaaggttttcactttaacccctaaaattcaatttttgctacgctccatcgatgatttcttgtttgttacgttacaggaggcacttaagaaggagatcgccgagagtgagatcagcagcgcaagaagtgacagagaatctgtttgagattgaagatctccagcttacaatgcctaatgacatgtctcaacaagataacttgacaatggaatcacatacccgaaagaaagaagaggggaaagaaggtttacggacaagacatcatgattttgagatctatcgatcaccagtcgatcgatcattgcgtagagaagctgagaggatacactcttacaagggataaatatgttggttaggtcctactatattagagcaaaatgtttgtactgtgatggtggtgttttgagattctacaatctctagacatgtatatgttacttcttggtacgaaactcactaacatatttatctatatatggtttcggaatatgaccttatattataaatttgtttgagatcaaaagtatattagaagtagtcacaatattatttctgttaaactgaatgtgatggcaatatttcaattctgttttcaaacaaatatcatgttatcatttgtaatccaatattgacttatattgttcatgtaatcatgtgatctcgtagataccatactcctcaacttagtgactcgtagatatgtacattacatttcaaaatcctttgttgaggctccaacttcctttcgtacttacagaggaaaaaacggagtcatggggcatgtgactgctgaaacaattatatgtatcattaatatactataaaaaaaactgttaatatcgaaagaatagctatgacaacgttatggctatgtgcgttatccacaaacaagatacaaactttaaaaactaaaaaatgtagctattttgtgaccaaattatgaatagctacaggcaatcatttgtggatatacgtagcaacttaaagataaaaagcgcgacaattttttttgtatctaattagctacgaactatttacgtatatttcgttgcaaatataacaacaacaacaaagtgtagataagtgtgaccaagacaaggaacgagttgtaactatttctagcacattttgtttttagaatagtcatatcaaattatgcagtataagatattttgcctaattaaacaacaaatatacagatatgaccacaaaacaaaatgtggttattttgaggctgaagccacggaattgttttggcgaaatttcttgcagataacaaatttacatgaatatgaaacacttattatacatcatgaattgttgtctgaaaaaaaaaaattattcatcatgagttattatactctctccatttcagattagatgttttcaaaatttcttcatacatgtaaggaaaaaaatcatttgtatccttcattagtatatttgtattattttttcattagataatacactaaaagagtaaagataaaattagaaaatttattaaaactcacattgaaatataaaattacatataatctgaattaaaaaatcaagcatcaaaacaacaacttaatatgaaatggataaagtgttgtcacgatatcacctgtggataggtaatgtattcaattttatataataaaatatggagagaacttttgtgatcattttgtctccacgtcacaattttagtatattatagcgttttaataataatatttattaccatttcttttttgaaagcaataaaataaatataattaaactcgaataaaacaaacataataaatactattcaatacatgtctcctacataataattattaacccgatttattatatttgttttatttgagtttaattttatttattttattgcttttaaaataggaaaaagaagcttgattccacacgtgatattgtgataatacttcttcataatgttaatacttaatagtgattaaaaaaaaatcgatgataaacccatagtgaaagttggtaacatgttgcatattggctaacattagtattagaccatcattattggtagttgcttagtatagttcttagattaatcagattagaaatataatgtttatattgatttatttgttaagaatggctcttatataagagaaaaaataaacttaagagctggacaggtggcgtcttttggatatttcttcttaaattgtttattatatcaatatatgtctctgtgcttagaatctaagtctacgaaaattaggcattaattctcaaatccgtttactatattgattgttctcacaggtcctagtcaagttctcaaaagaaggatcttgttagacgtcaagttctctgtgttaaaggttgcctggcaggatcaaaagctgaaaacctttttgaacaatgcgatatggttctggcagtccataagatgccagttacatgcttcaatgacatagaaactgcttgccaaacattggataagggtagttacagcgatgaaaatctcaatccaaccagtgagttttaccatgtatatattttgacgctgaagatggccggatattagacactaccattgtgatagtactgactatggtacgtacggtgatgacgaaacggccttttatatatattttttaactaattggtatcatcctatggcaggtgttatagttgacaacagtccgaaggctcagtgttacaactaatgataattcgacttcgacagttggatacaacgttagtatttcgaaaacgattcgaatctcatacgtatgaagtttttggggtgttgggaaatagaccaaaactatgactcaaaagcaatcaaaaccgaccaaactcacaaattaatcaagatcgatcaagattacaaatggagatcaaccgggcatgtatatgtttgtaaatatattggcataggaagtttagttttatttttatatattaattttatttgtcatttttatatataattttcatttgtgtttattttagttttaaaaaggaagatgcctgaatttgtgaaataataaaaagaaaactaaaaaattaggtgctatttcgcacgcatcacttgagctaacacatgcatgtgttccttctatttcttgctatatacgaatctctttaagaaaatttaccagccaaaatctacaattctcttttttgtttgttgcatatataagtcaaggtttgaatttcataaaacggacacaataattaatatagataaatggttctagtttctaaataagaacactttattctatgcaacacataaaaaaactgatattgaacaaaatcatattataatctatgtgttcgacttctacattttttaaaaaagggactattattgtaaaccattccccaaaagtgaactttatatccaattcacatttttcattgaaattctgttaatatttttaaaataaataaccatgaaaactaatcttacaattaagaatactccctatcattctaattaatccgagttttagaaaagaatacaacattttaagatggtcaagtttgtcggcagttttttagaaactggcacatttatcatctagtttgttactctaggattcatcatctatataagacccacgagttcatagttccaaggcacaacaacatgaacttgttttggaacacaggattttgtgttatagttttagtggttgcgagggttggtcattggtggtaccaatggtcaaaccctaagtctaacggcaagttacctccgggatcaatgggtttcccgatcatcggagagacattagatttctttaagccttatggattctacgagatctccccatatctcaagaaaaagatgttaaggtcagaactctctctctctctatttatatatgtcattttcttacagagatgaagtcttgtgtttgagtattgtgtgagtcttttaggtatgggccattatttcggacaaacattcttggagtaaaaaccgtggtatcgacggataaggatgttaacatggagattttaagacaagagaacaagtctttcattttaagttatccggatggtttaatgaagccattgggaaaagatagcttgttcttgaagattggaaacatccacaagcacatcaaacaaataactcttcatcttttgtcctccgagggtttaaaacggaaaatattaaaagatatggaccgtgtgacacgcgagcatcttagttcgaaagctaaaacaggaagattggatgttaaggacgcagtttcaaaagtagtcaatcttttttttttctttgatgaatttcagttacaatgttggagttagcatgttattacgtgctagtctcacactttttagcatgttttaatctttgtagttgataatagcccacttgacacctaagatgatgagtaatctcaaaccacagactcaagcaaagcttatgggaatttttaaggccttcacttttgattggtttcggacatcctatcttatctctgccgggaagggtctctacaacaccctttgggtgcgatttttttttctctttatttctttccttaggagtcacggtaagtatcaaactaacacgaatccatgatctcttaatgttaaatgcaggcatgccgagaggggatgcgagagataaaggatatatatacaatgaggaaaacgtctgaggagaagtacgatgacttcctcaacacggcaatagaagagtcagagaaagcaggagagttattgaacgaaaatgcaattataaccctcatctttaccctttcatgtgtcactcaagataccacctcaaaggcgatttgcttggctgtgaaattcctattggaaaacccaaaagttctcgcagagttaaaggtaatatttacatacagatgtataagatggtaaattttacatataaccatgtgttagtatcgaccatgacatgtagtagtttttgctagtgatgttggtgtgtcacaatatggattcaaatccgcatattgtatgttgttattgttaataaaaaaattatgctaatctggtagtcatggtcctgttaagtaggttcaagatcttttgcattttgtattgagaaaatcatatttatatcaataattcggcagaaagaacatgaggtgatccttgaaagcagagaagacaaagaaggtggagttacttgggaagaatacagacacaagatgactttcaccaacatggtaactattcatctaatgctaatacaacatattttctgttttacatggtgcttctttttatataggttatcaatgagtctcttcgaataacaaacttggctcctatgttatttagaaaagcggtaaaggatgtggaaatcaaaggcaagtagtagttagttctcacgtggcactacttgtaaattgtatatggaatttttttcttaagataataatcagaatttgacgtttttgtggaatcaacaggatacaccattccagcaggttggatagtgatgattataccttcagtggttcattttgatcctgaaatctatgaaaacccttttgagtttaatccatggagatgggaggtattgtacatttaatttagtcttcatatcattttggtcaactttacggaaaaaaagatccatttttaaattcgaaaaattttcataccaaacgtatttctccatttttctagctagatccaataattgcaaaaatatatgcatattgatattaactctggtgtacatatatgtatgacagttgcaagcactagcttggctgttttatacacttgaccgcctctcattatatatagatatattgatattaaatctgttgtgtaggggaaagagttgcgggctggatctaaaacgttcatggtgtttggaaccggacttagacaatgcgctggtgcagagtttgctaggcttcagatttcagtatttcttcatcatcttgttaccacttataatttctcgttgcaccaagactgcgaggtgcttcgtgtaccagctgctcacctccctaatggcatatctataaacatctccaagtgtcccaaaaaatgacttgaacaaagaagccgccttatcgaaccataccatctcctcctttttttattgtataacaatattataataatgttgattcagtaaccctatcttcaaccacattacttggccggaaaggtatgtggccatgaaatagggacaattatactatcctatcaatacgacttatcttacttgttggtccactgcctatgggtaacgattagtgtagtaatagcaatgccatgtaataaatacgttattttataatataagtttttataccataaaaaatcatcaaattcattaatttttacaactaataaaatacaaatttatcatacaaaattaaaataacactcaatgtaattttttttgctaccttcaaatttataaacttttggtaaataatatgtaaaatcgaaactttcgagaaaaagagttttactcatatctttagaaatttaaattttttaatatatgtaactgtgaaaacgtttacaaaatacgtataagagttatattaactccctagaagaggacatattttataataattgttttttcttaaaaggtgaaactatatctaaataggtaaatccaaatcctaaatgaaaaggaaaaaaacaaaatcctaaaccctaagaaaagtaattgtaaacaaaacaatggtgtattttcttgatatttgttttgttttgttaatttagacatttaaaccgttattgtaattttccttacaaatttcacatccatgaacaataaaaataaacgtatataaggtatgattttaaactaaccaatatttatttattatttctttaaaatcactgaaattattgaattcttcaaaacacagttttttttaaaaattatgattaattttatagtgaaatatttaattatgttttatgctcaacattttgtttaactttttaaaaaataaatgaaagaccctcttcctcttacccaccgttagcgctcagctaccatggtcgaaataagccacggccacgattttgtccttttatgaatttctgtgtatggatagctgtgttcgtgaacaataaacagtatgtaaaaatatgacagttgtgacaagttgattatgacatatatatcacaatgatatgtgatttgtcgtacatgattttttttatttttatttttgaatagaatgttaaattaaattcaaaagaaaggtatagcgttgttacaactagtgcaacttttttaaaaatttacaaaagaaaaaaacagagattcttgatctagcttatgttcctcagagcgagacagagttggaatctcctatcgtatctgtggtggccattagctttaagtaccgagagctgattacggatgagtttatcaatccacgagactaaacgacttgctgaatgtggtggtgtgccatgctttcgatcatttctctcccgccaaatagagtggatcgaagcttgattaacatgatttcgaccaataagaatttctttgttttcccgacaaaaatctctccttaattaactagtctctgctcaacaacaatctcaatttaattagtgtgcgtattcccatttccttgtggattttttcaattgtactaaaagtgactcaatcgtgcacttgtggttaaacaattcaagtttaaaacttgagctatcatacatcgacggtttggagtaaccaacatttttcatatctacatctgaagtagcttagcaaatagtatgattggaaccgttggctgggagggtcacaatagtagaggcctagagggtaagggagagtttggagggcccgaccgtgaagtagatcccttggctttcatggagcctggagacaagtggaggggctctctcgtgcttgttcctctacatcttaagatagcatagatgtggtaggtttcatcatcataatttagtggtgacatgtgtaggggctctctcctacaccaatttctcaactaatattaattgagaacaccattcactatctaccatattaatttgatagacaattagcctatatttgtttgtaaataatatcatgatattttaaaatgttgtgattgaattgaacatgaattggttagttaaattagatattatgtagataaaacgtgactggtttagggtgatgtgatatggttcaaattattttaaaacttctatctcaaataagagatcaattgtagtatttaatgaaagaatatgcggaattatagtttggaaagagtaagagaatcatgaagaacaagagagatttgtgatgggaataaccaaaacatattactaaaattggttagttacctttgtgtgtttacactgtatttaaggacacacaaagggaacatagccgtttacacttaacatgcgaatgaaagagatatgagggaagagattccttggtcttaatggtgagagcggctggtccttggttgaccatgtcgctaagaccactcgtgagtcctcttcaacggctacaaaagatatttgtgtgccttcactcattctagaagctccccataggcttcttaggagttcggcccaactccttgtagctcatgcacaatactaggccttttctttttatttgtacggatggatgctcttattaagtcttgatcaatatttaagggtcggattccacaaacttcttttgttcacacaatgagctaagtatcaagattaagctagaagagtataaaaaaataaaaagaaaataaagtaagcaaatagcaggttgattggttgcaaatcaagataacaaaatgtcaggtttagggtattctcaggaaacaaatgattagtagatctaaatatagataggttgttatcgaaccgttcttaaactcaaactctaatatcagaataaccggtgatgttccgtgaaactcactatgcctagagctaagattctcagtgatgtgccgtgaaatcctaaacctaaacatgcatgctaaatgagttcaataagttcaccttagtagataggctgattcttattacacacctataaaccatgctcatcaaatagtagttctggtaccagatacctatggtgggtatatatattatcttgaatcaagttctagttaattactctagaactagcattaagaacaactaaagatgaagaatcgtacagataacctacagataacctagcaagggggcaatctactaaatcatatgaatccctagtgagaaaccctaaccctaacaagcagactgctcagacatgatggatgagataaacagcatatatgaataagaaagcataaacaaattaatagaaagaagagttaaaaagatctcttcactgttactgaaatctgatgaaactctgaaaacaagggatgaatagcttatgaaagtactttggaaataacttggttgctagaaaacttgataaaaagcttgataggtctaaacaatgacctttaaaacaatatatatggcataaaaaaacgtgtagagactagtaatgaaaatagggaagtcttatggggcaaattttcaaattttcaaacttaaaagcgtcatgaacttctctgggccgcaactggtatcgatcgacaccaagagtgcgtcgatcgacactctcgactagatctgaaagtgaattcgtcctttagcttcttttcttcaacttttgctccaaaatgtcttctcatctccattgttgttcctctccattgaatacctaaaaaaactctaaaaaaactctagaaataacaaaaagactcaaaaacttatatctaaaacataataaaaacagtaaaaatagggttatatcatgatgccacctatgtaattgtttacgtctctttctcatgggccaagagagtgttatgtgaggttagtggctggtcagctttggttgcgctctctttagtcaacgacatcaatattgatatttttggctgttatcttcaacctatatttatactatcttttgtttgttatggagtatttatcgatttttcacgatcttgctagttacacttttttttatttagtgaatgtaaaatttattcaactaaaacacctttattacaataaatgtatctttttgaaaatcgaacgctggtttgaaaagttttgaaaaaaaatagagttttagttttctgagtcgaaccatatcttaacattttcatgtttgtgtagatcaaagagattgatagaggaaattttattgtgtaacaagcgatcgagagacttgatcagttgatttggtgcatttgtgatcacaccatgtatgcgtatgttccgttccaatcaaagtgagtggatagttgcttggaagagaagccttagaataaaaccaatattgcctttgaaagtagagccttaaacctccataaaactgtttgtgtaactcctttgaagtagtcgacgaattagcacctgccaaacacgtgaagagaatgtacaagtgaagaataagtgctcccaagtctccatcgaagattgacaagaaacacacaatggatttaatcacttgttccaatatgatatacactcaccagtggtaagcttattatttgcagcgagccaaagcaagaacaagtgtttctaattttcttgtagtgaacaaatgagggtctgaccgcagataacaaatttacatgactatagaagacacttatttaaatatcatgaattattatattctcttgtttcagatttcatatcgtttaaagtttcttcatacatttttttaaaaaatcgtttgtatccttcatcaaggtattgtatcattttctttacccgatgatacattaacataatagagataaaattatactttataaaaaaaaaactatgcattgaaaatataaaaggttttttagtaataataagacccctcaactaaaaatggatagtaagaaaatttatcaattatttatttagtgaaaaattccttaacttaaaatatgctaataatttctttaagaaatttatcaattatttatttcgtgaaaattggacagactattgtcaaaataaaatgcaacacttttaattgtctctaaggttgatgtcgaattctatgccttttagaaaagaatgtctagattcgcccaattgttttaaaatggtgttaatttaaatttagtaatttggctttatggtttaacaactcgtatgaaccatttgcatgttttaacaagattgtattatattctcaaaaaatgttttacgatggatcgtgtatgcaaatataaaaagcgattggacaagtttaaatagacaatttatactagatacattatttgttgatttttctttcaatttgtagagatattttatcttcaagacaataggttgatgccatgagaatatgaccatatggtcattagcgcgtggacattaaatatgtgtttgtataagaatttctggaattatagaaaaaagtgatacacatgtcctcaagggcataatctcacgatgataagttgtttgcttgatcaacattttgtggccttaattagagaagatgtagatggtgaaaaaccgagatgaaggcatacaaagtagctagagaatatagcgaccacactcatgaccaatttccttccatatcttgaagtatgagttatatagacaagagttaaatgtgataagcatagagtctatatatgattctctacgattaactatctatgcttgtgaagattcatgatatgattgggtagagaaataatgtggttactattgtttgaggaattgaagatctcattatcttgtctcgtgttgtgacaatgatgtttgtccataatacaatgttcattataaatttggttgaatgtttccaaacacaaagtggatattttaagaatgactaaatgatatataatgatgtgagtgcccatacacaagtaaatattagtcaaagaaaaatgtaccttttacttttaattaatgattgtcattcatatataaacttgttgctaaacttcaaccggtcaacatgagatggtcaagaaacacatgttgctaaacttcgagtctaaacacaattttgtaaatatgaatcagatctttacatattctgataaaaacattaatcgttcataaatttagggcacgaactttcttattctgttttcacatttgaattttggtggcgacgaacctcattctacttccacatcagatccaaaagacaaaaacaaattccaagatggcggaggtgcgtctctgttagcaacctgaaattattcatctcttttctagaagaattagtaactacatttttacaaaatttgataataaaaaattattgaagagttaccgtagctgggatcgtcgggcaaaaaatcaacccttgcatcgattgctaataagatgtatcaatttgctcgtaaaattgaggaaacggatttttttctctcatccccaaactcatataaagattcgatcgactacacgtctttgaaaaggtttggttatatctctataacattgttaaaaaacaaaaaaaaattacttttttttgaataccaggaggttttgggccgaaccccgtaatccccccagacccgaaaccacatcatatataatactagttttgtcccgagcgtcactcgaaccggagacctttaagcttcgcctagagtctttaccaattaagctaacgacatttggtaacatcgttaaaattgtactcaacctatacgtaaaaaaaattgaaatcaatcgatggacaaatcagattaaaggttggaagcgcggcggctacggtggagagatacagatcgcgccattgcagcagacatctgtaatatagcaagagtcaaggtgagcaagaggatccggtgcggaggatgaaaccactgctgatggttttgcaacagatcgatagagaagacttggggagcaaagaggtcccgcggatctagtgacgatatggcgagggagacaagtctcagaatggaaaaattgagcccaagtggagtcgaaagattcatccactgttgtctttgaatcgcaaggtgtgggcagagaatgaactccgtcggagagcactgcttcaaagaggggattcaatagcagagaaaagctcgataggtttggattaaaaggattgcaaaagagaaaaattagatggaaatgaagctttagatggaaggtaaacgagacagctcgagatatgagagagaggttcctacgccggcgagcttcagctctaccggcgtcggagaagaaataagagatagcttcttcgataatagtgtcagagagttgaatgggtactaatatccaatttttcttcaaaaagatgaaataaatatctttacttttaaaaatgcatatattgaataaacttatattgaaagtgcgaacaaaccctaaattaatctttgttatttcttttattaggttggaattacgtggttgattatggttagagtatatgtatatcggttgtaatgtatgtgtgacgttaacgggctttgagcccatctcacatgactcgtagagtgtctgtaatatatagggctatctacgagtcccttactttgtatgttctgaatggagtatttctttgttaattgcgaatatactgagttttactttatttagttataaatcttgtgatttgtttgacaaattggtttacacatattatactctctttcgtgttagatgatctgattgagaatactttggctaattggtttcaaaactaatatttgtttacacctattatactctctttgttctgtgacgattgatgttgtgggtattttcttgtttcataaaaattgatgttttggattaatactattgttatttttatttgtaacttatagagagaaaggagaaatagaattgattatgtattattgttttgtagcgttatatcaatttatcggtgcaagatgataatgtactttgtagattttgtgttctaattttagcacaactaatcgaagccatggccaatttcagatatattcccaaacctatatttactactctattcaggagcagaactacgtagatgtgcatggggtcaaataacaacaataaaattttaaattttaacttttcgtcattgatattaaagaataagctagatcaaatggctgaattcccatagttgatcccatcaacatgtgtttgcactccagttgaccctcaaaatttgaggactcttgttttttaactgaggcttatgatttattttagagtacatttgggaaagtaccttctctatgagttttccttggaaaaataccctattgttttttcttttaaaaattgtttttgaatatattaaattactaaaatagccttattaaaatttagtaataattaaaaagaattatacttaaaacataaaaatccattaatgaaattttaaagataattcttatcttaaataatttttaaaataaatcgtccttacaaatatatatttttaaaacaatatatgattctgtttgttgtaaaaaagaatattttttatagtccaatttgaaataaaaatcaaagataaaatttagccaggaagcaagattcaaaataattacaattagcgttctaaaactgtcgcaactcgtaaccactgcactatagtgaactttgtatatatatgccattaacgttaacgtttacatatattattaatgatggctaatccagagctccaacaaacggcaatcaattactgtgaaatggacacttttctaattattttcttaacagtgacactgaaaatatataagttagtttacgtaaaaaaaatttacttacatcttcactaaataaagtttgtgggtcaatagttatatttttgcaatcaatcaatacatgtgtttaaatgcccaaattgactttcatgcatcaaacaattgttgtgttctggttcaagctctcgtaatctctttcgttttctgctttatgttttatattggtttttgaatactccatttctaatcaataacacataaataaaacaaataatattatgtttagaactattaggagctttctgtagcatcataacatgtacatccatgtaaaaatgtaaatatatgttattatgatgaaatatgtaaggcttgaagaactttttgtagcatcgtaacgtgttcgtcaacgtaaatatatgtttagacacgtatattataacattctaccaccatgtctttatttcaaaagatttatgagaaaaatatcagacttcgattttttttttttttcaaaatctcgaatttagttttaatctattaaaaatacaacttttactttaaatttggacaaaattgtcattttatatattaaacattatagtcttaattgaaaatagataaagatgtatttttcaaacaaaaactcataaagaaggtagttttcaaaatctccctttattttatctctgttttaagccaaaatgtttttccgttttgtgcattagttataaggaaaaaatccttaaaaaaatctaaagtaatgttaatttagacgtttaatacttaatattttttggttggaaaacaaatatctcatataattatttatggtcataaaatattttgtatttaaattattggtaaaattaaaatcgcactgttaacataattatttaacggcgttaaattttaaacgtccaaattgaaattactatgggtttttttaaggattttttccttagttggaattacatttcttttttattgtattaacctatatttgtaagcaaaatttctaaaatacatatatatgataatataaatgcttcacaaagttttttttgttgttgtttttgtgtttcatataatattgaccccagtaaaaacacggtctagactgtatttcatggtaatgttaccactatcataactatcttgtgttacgaatttgactgaatcgttgttgagcatattatctttgttgattaaatgtataatatatttttttccaagcgatttattatatagaatgttggtacataagtgatatcttcttgttactttgagaaggaagtgatattttaagtacaccacactatgtaaacattgtttgctgcgaaatcgaattatttaggtacatagttttagtatatttttgtttgtttgttgagcgatagttaatctcttagatcgtttaatctccggaagttttttttatcaaaatatttatttatggtaatcgagacatcagtaagtttattttgtaattttattaatgaaattctatcaaagttttggcgtgataaccaatttccaaacagatttataaacttatccacgttgaaagtgcatatggtaaaccaagattttgttccatcattttgtttttatcaaaaagattttgttccatctaaaattagaactcaaaacggttatcaccgaaaagattatagggaatgggaaccaaacatggaggatgacgtcttgcacataaccgttctaacccattttagatcttttcagctttttttgctttttcatttattagttgtcacaatttaaagtgagaacggttatgtttgttttccttttttgacataaagagaaaaaaatctagctcgattcttcagtatggatacttccaaataagattttgagaaatatgatggaaaaaaaaaaatcagatttagaggttattttgcaatttcctccattgcaccattacaaagatcaaaatatgtgctttagattaggattcgggtgaagattaacgcacaaatatcacaagtaaattgtaaagagacactgaaaaaaaaagcaacaaaaaaaaattaaggttttgattggtgaaaaaaataaagtattacaatttgtacaacttttatttttatcaatcacaaaatttttataaaaacgttacaaatttttttttcagttttattgtaccgttttctcgtacagctctttttttataattttgcactattgcgaagaattttacaactccaactaacaggtaaaatttttgtaaagttttgtgttactaatcggactctaaaaaagtaatttcttgatattttattgattgaagaatatgaaaaatatattttatacactattggaaacccaatttttttatttgctttttaagaactaaactcaatcaaaatacatattaacattataaataaatacaggacacctttctaataatttgtttgatattatacagagtaacataataccaaacaagtaattagtttttttatattaaaaatagtaattagtttgtttttatttaagggcctaaaaatcatctatttcaattagaaacacatcatattccattaatatatagcaaataataaaaagttgcggggacgtctttatcaaaaatgatgtagacaaccgaaatacacatacaaaaggccaaagaggaaaacaaaaaacgccaaagagaaaaacaacactttggaataagacaacaataattaacaagaatatatttctttcaattttaacttaagagggtaacgaaatcttcgagaatttatattgggctccacactattcagtgtgttcactatctctttcgacgttgggaaaagtggtcatcatcatcattatcctcatctttgctcatgcaccattaaccgtcccttctagattcttgatttattgttcgatggcccctctttgattttcattttcttaatgttatagattctgagaaattgtttataaatttaaaacaccactaaagccgtaatttgttgcactatcaatatgttatacgtacaccatttcctaccgtttaatttgttttgtttgtgtcgaataatatctgatctaaccgctaattccatgatccataatgaaagtacaatggtccatcattgttcgaggctgccaagatttgtttgtttatgtataaatatattttcatttttccattcagttgctctgtatatatcatatacaataatacaatctatgtgtatatataagtttgatatatgctaaaattattcgtccataattgtttaataatatattcaatttgctatagtcattactcattttgttatagtatttgaactcttaaaagtatttgaccactaaggaaaatttacttcccaatcaaccactaatctaataattatcgtgtagattcagagattcacttgttaatatataaatccaacaaataatttaagccaccttcgaaagaacaacttccattctttttctttcttttttggttcacacaacaatacaataccagatattaatatatgtgatcacacaatattacaattataagaaagataccaaatggaaacattacaaagtattgaaaaacaaaaccttttctttttaatctcaaatcatagaggaccggacgctcaactgcttcaatatagtttccagtgtggacccgtcacaagacctccaattattcatgtatgtttgataatgcaaaataaaattattataacctttcttttgtttgtttgttttaacattctggtgtttgggtatggtctcttttcggatcatggcaatagttatagaccaagaagttcctctgtgcccatgtcaatgccgccatctgctgccggctcaacccgcggttgcgcatgggtgcaggcgatggcggtctgcatgagctagagctatccgctgtgcatcccgctagcttaaagtttttgtacttagccacaaatggttggtatcgatagtcggctttgatccttccattttctgtggcccagtccgatgcatcccatatcgatccgtaaacccacatcggtcttgtggggaatatagcttcattctttctattatatgtacgtatcggtacatcgtctacaaagaatctttatacatgaaaaaatcgtccaagttagtatatcaaacaactagaaaatgcgtatacttaacataagaattcttgacttacacaatttggttagggttccacaaaattgcgtaatggtgaaaatcttgagtagggtcaaaccacaaggtaaatttcatttctcttccaatgacatttcggtcgccacttcccctaacgaagacattcgtttgaagggaataaggcttccctggcgttgtccctagaaactcgatatcgacctcatcgtggtctccaggatgctcttggttgtttgagagctaaagatcgaaaaattgttagaatttgaaatttagtaaccctttaacaacataattattaggtggttaattaatcagttcgatcatatgcatacatagagggatgtatccactccagcagtgaagcctggttggagcttaatggaagcaccaaagtagcccgaccggtatggacgaagagacttgaacccactccctgttcatgctcatatttaattagtcaataaaatcaatttattacatacgacaaaaatgattattataaatgatagtatgattaaaataactaattgggaataaaaataataaatataagctaccgacacagtcctacaagtcgtgcagtgtattaaataacactagaaacttgagtgaggtttgacaaagttatcaccacttactaaattgattctaatcagtacattcattaattttaatggtctgttcataatgaatagcatataatctcttagtgcattttataacatggactcaaatttggttgaaaacgaaaaaagtaaagaaagaaaaagaccagtggatttgtcgagccaaagagtgacaacgtcttgctctctacgttggtgttgagagccccataaagtacggaattcacgatcaaaaggtgaagtcggtactcgggaactcgggtagtatcccggtgaaggagaacgttggctgtgaccactactagggcacaacactaagagagctagaaagataagagacaaagccatttttgagtgaagtaaaaccttttgagtggttactacaaaaggggaaataaacacatttaagagagacaaatatgtatgaaatgaatgaagaaaagtgagagaaggcaggtgtgtataaatagagagtgatgcgggtccgacagttataggagtgagtgactgttatccgtcaattggatgggcctcttggattgatcccatgtcaaaatatgaaacatttaatgtcaacttacttcatatatttttttatcaaaaaaaaaacttacataaaatattatttaacaaagaaaactaagtacgaaaatgaaaaattcaagaaaaggaaattgaggaatatattataaaaaccaaattcctatatagagatgatatttgaactatggttttttcttttttgaaagtataaccgtacaagtacaactagttctattgtgctcctatcacgtcattcaaagagattttgttcctctacctctacctattaagtgaaacaacggaaggaaaccagcttttacccatttattccggatctacctacgaggctaagaccataaacaaattcgttgaagaaactaaaagtggaataagtttttctactactaaatattaagtgggagtatttagtaactttaattttctaagaataacgttgtcatccaaaaattctcaatggttttaaatcaaataaacatggttctaatagtatagtatggactaaacaaatatttgactgtaacttacttttgcagttttagtaatgtcatgtaaaaaactgtcggttcaaaagcattaatatatttattttttaaatgaaaagaatgaggacgtatcgaaaataaatagagtgcaatgaacatgcccattttaatgatctagaaaaaaaaattatatatatatatgctttcacataagaaaatgacactttttgcggccaaataaaaaaatgacattatctttgttattataaattttaacccatttcattttggtttctgttttttttttttttttaaattaggataaagtcgaagatgtaacatgtttggtcaatttcatagcggaggtcacatgcatggataagaaactagatcaatccaatgtagcttcatagcttttaaaaatctaatagtttattaataaatctcaactcaaaaagtttataaaaatttgcatgtaaatcaatccacaattttttttattttcttgctaacggatcttgtaatttattggaaaaagggatttgtatttctttatataattataatatgtattcaggataagtcgagagttgaaattatggttagttcgacctttttctttttgacgttatagttaatttgacttgataggtgatatagacacatatttcctaacgtagcagtttatgaaaatatagagtaaacaaaaaaattttagataaattagatgattgatttgcggaagtcacatatccactagtttgcccaataactaattaatcctattatataatgtatagtgttttttaaatttgtaaggattataaattattgcaattaatgaacatatctttgttggagatttagggcaacttctgttaccgattctatagttagttacaattaatagattattgcaacttctgttatctcaaccttgctcgatacaatggttggggtgatgttttctaagagaataacatggtcatgacacatgatcacgtcaaaataacagaagcgaggttaacataactaactatagaatcggtaactgtccctaaaaagtaaagttttgtggcttaatatattttattatctaacatttgaagttggttcaacaaatattcaaaaaaaaaataaaaaaaaattgaagttggttatggtattggaattggaattggacttgtaggtaataaaatcaggtggcgtaggtgcatgaatcatgccgagaaaagctacttaccgtacggaaataatattaactataacatgaaagagaaaaattaatcatcaaaagtttgatgtcaaaacaataataacttcaaatttaaccatgtcaattactctatcagtttcttagtgttagatacttagatatttcagagaagaaaataaaacctattgcactaatcctactatattatttggaaagtacattttaaatgtaaccttaatttttgtaagtaattacatagatatgccattagaaataaaattttaaaaagtaaattaatttatctctttaaggattaaaaagtcaaatactaatttaattaattaaatttaattaaaaaacgaaatacattattattttccaaaaataataaccaatcaaaatcaacatataagatttgatatctaaattttaattaatttaatttaattaaaaaacaaaatacattattaatttccaaaaaagtaaccaattaaaatcaacaaattatatttgatatctaaattatcatattaattttttattaattattatagttcactttccatctttatatgattttatttttgcggaaaaataatatcatcattataaaaaaagaattatagttattttgcatatgccacaatttgaatttttaaaaacgaatataaactgttcaatacatgaaaaaatattataacgggtgaaaaatagatttaagaaaactttctactgagtaacgggtcataatttgaaatatttatattcaatttcatacatattatattaaaaatttataatcttatatattacaataattaataacatattagatgtgattcaatttttaataaaagctggaaagtcctagaatcgacggtttagatcgatattaatacaagatggaatactacaagtgaaactcttaaattaactatcaaactacaagtgtataatcttaaacactaaacaatatagataatatcaacaaaacatatacatgaaatcaattaaatcttaatcacataaaaattagcacaaaaaaagtattcaacaattaaatttttatcaaatctctgtgttatataagttttgatactatattcgaataatgtaatataccttttcaatttgtattctttaactaatttaagctaactaatatatttgctaatcttatacctatcaaaaccgactatcgtttcttatctctatagtatttttgcaagacttttttggtggatttggataaaagtgtattcgggtcatatggtacattctcctattaaataaatatggtgcactccgatgttattagctaaaatgtttagaatataattcagagtcatatcattaataaaattaatattaataaaataaatgactttttggcaagacgaatttggagggacgggtttttgaatcaacattaataaaaaagtaaaatataattaatccaccgttttaatacgggttaaatctttaattaattattttttaagaccactaatattaaacatatcaaatcatcctaatttagaaaagattatataaaaccaaaaatgttatgtggtatgtataatgttactatatataaaattaaacaataaaatataaatgtattagagaatgatacaatgtgcaaaacttttatatataaaaaataattcttaaaatttaaaaattactactttaaaaaaaaaatcacgggacgggtaaaaaatttacagaacgggttttattttggaattgggttatatggtggatgtatttgaatcaatatttataaaattttaaaatattattaatatgttgtttaagtagagattaaaacttcagttttttaacaattatctcatggattcgtggtatagaaattataaactgtaaaataaaaatattttataaaaataaaatttgcaagttttaatatatattacttttaaaaaataaatcgtcccgcggtatatcgcgggttaaaatctagtaaagatgttattacgtaagttactcatatttcttttacgttagaaaatattgtaccaagtattaacgagctaacactaagaatttatgaaaagaaaccatgattttcgtggctaaagcttgacagtcgtgtatataatttacttagccacggatattataggtcctaaattcctaattaacaagtctgtgatgataattgagtggattaaccgttatcgatccttgttgaacaaggaaatgttctcggaccctattgcatgcttttgtgtgcacctatgttggttcattatcagttttaaattgagactaaatccatgtaagtcatgggaattgaaccaacttagtatggttaataattgatagtgtaatataaagaaatggttaggttcgaagcaataatataggtgctgatattggttggttgttgatattgattagttggtcgtaagttaagtgattgtgtggttgaacgtagatatatggctagggctgataagacataagaaagaaccccataaaaatatagattgcaaatgtaatctgagaatgaattgtgatgttttttgttatattgtaaacccgatttgacaatttggcctagatcatgagattgtgtttgacaatttgggtatagtccacggaaaaagttcatattttggtgttctatagttctcgaatagcagaatctcaaactttaaacttatactattaaaaacttcaaaatataaggttttgaacatcttttagagtttcaaaaccatgcacaaaattctaaagtttaagcacaaatcgcaaagaggtagagctgtattttcaactaatggaatccaaaaatggacacttgagaaaattgttaaccagtgattttgaaattaattagtatttgtggactttatatactccctcggttcctttttgtttgattgtttagaaaaaaaaatgtttcaaaaagattgattttttaaattttcaatacaatagttattagttataattgataaattgtaaacttcaatacaaattagtgaatattattggtttagagttattgaaaattgtaaatcacaaaaaaaaacaatacatttaaaagtaacatttaatatgttttcttaatatttatgttattagttataattgataaattgtaaacttcaatacaaattagtgaatattattggtttagagttattgaaaattgtaaatcataaaaaaaaacaatacatttaaaagtaacatttaatatgttttcttaatatttatgttttttctaaaaaatcaaacaaaaaggaacataaggagtatattgtttatcgttttctaaatttggcacatattaaatcatatcacacttactctcaaattagatttatcttacaaaaaccaaatttgttatttggttgattaaaaaataattataaaatatttaatttaattgagatttgcaatttaaaaccattagctatttatttaataaaaatagaattaaacaatcaattgaaacgtatatggtcagtggacattattttgatgataaaatagtatccataaaattaatataccacccactttgaaccaattaattttaacaagaacaatccccatctaacatgcaccaaatacttgacgtgggaatcgatcagtgtacaacttagactaaaataagctcgacgagtatgcatcaccgtccatcaaagaccaaagaatgaatgtcctacccaaataaaaataaaagaccaaagaatgttacatggatccgtagaaagtatttatgaatgggttttgtggaaaaatatttggtcaatggtacatgaggttgtgaacatttattttggtcaatcgattattttcccattttccaagaattgtttatttattaaggttttttaatcaactaaaaatattattttctaaaattttagagttaatctaaattgaatggactgaatattttttgttttaaattttcttaagaggaaaaacgtccacttatcctttcattagttttattcctcaaattttaactttaaattaccaattttctaactctacttttaaaagttaaaactacctaattgtaataaattatccttaaacttttgatcctactttctaaatcacaaatccaataacagtaaaactatacttatattaaaaatactaagtaccgtgattaaataaggttcccttaaaaatttcagttgcttctatcattttcagcaaaataactttgcagataaaaaatctgagtgggggaaatattgttatctaaatcttaattagaaatgtgcttaccgacaaaatatgagtgggaaaaatattggaatctaagcttaattaagttgtgtcacttcaacaattctgaagaacattctatcctctctggtattgagaacaaaacagtttcacttataattccataatgattgatagtgttttcataagaaaccattaaccttttcaatacaacaccaaaatgaccaactagctagtacgtttaggttttcactgtaacagactattaatgctactaattaaaacatataaagaactaaaaaagatccaactgaatctggtaggtattatcaacaaaatagcgttgagatgtgtcggtagattaagaagacttttgatcttgtaagttcagcagtcatgatctcagatattaaatttaaccctagttgcttataaaagttagatgatgaaagttttgcatggaaagacggcaatatatagtataaattcgtttcgaggtgcacatttaaattgttataattggtatcaagttctttaactttaactttagtatcataaaattccatttattaacatattaatgaaggttatagtacgtactgaattaggtagatgacgtttatatgggaagaaatttgatgatatataaatttgcaaatagagtttttgattcctaagactatctccaatctatgtctccatttttctctaagatagagagttaggttttgctcaaagtcaattccattatggagttgaaacttaaaagtggaggtctctaaacttattgcaaattgagataataagtctccaaatatggcgtaaaaatagagattaaaaatggaaatagagatgaattggagtaaatctaattttaaactctattttagaaataaaaatgaagatgagtcgaaaatgctctaacatttttgaatattttaagagatgactataatcagagccgcgatgactacaaagagcaacttacgcggtcgtggttttgattccttacatgagaaatatgttttttattttaatttgtagatacctatatatggttgttggtgcaggaattggcacctccgacaataccggtctaaaccgggaaatatatgaataaaatcgagaattcgatttaaccaggataccccggttagcctgttaatgggcctaagttatgagtttgccagaagacctaatttgacagctgagatcgtctagccgacttcttaaacttcagaaagagaagacttccatttcgaaagaagaggatcttacgaagaataaaaataatgaatatatagatccttaataattagaaatttatcatatttagacatgatcaaatcattgtataaatagagggggtttgtcctctattacatccatcttttaacctaatacaagagactacttttcacagagcaaaaccctagctttctactcaagcaaccttgttcatcttcttttgattactcgtgagctaagagagaagtgaatttgtctaaccccttagtataaattcattgtttgatttacagaatcaacaatggtcaaaatagttttttgctgcttgtggctactaattacccaacgacggtctcgctataataatagcgatgatacgctatttttttaatattagtaatgtaagtataatttgttttttttgggttgaaaaaatgcaacaaatagtttcaaattatataatgatgaacacttccgatgattgcttatggtagtagtgatgaaagtaccccaacgatgttttggagatgatcgatgaagatgactccgacagatatgatattgatccgacggtgatgactttgaatctaacacaaaaaaatttgtgaacaagaaatttgaagacctaccaagtcttgtaatttaaaattggtggaaatacataagaagttgtatttttcttgtggttctccattaactacgaacataatagtgactactttgacccacgaccgggtgtaaacgatttgaaccctacaatcgggtataaacgatccaacggctgggtattgtagccgctttgactccatgacagggtataaacatcgatgataacctggcggccaggtataaagacgctattttgatgatttgtccaatctcatacgtgatgtatgagcttgtcgtgggtattgagaaatggaaaccaaagatcaatcgagatcgacggtcgagatgacaagatatttatcattatctctaaatataatatttacatttatgtttatcatagattaagaacctaaaatcaatctcatctctatataaaagaatctaatttgtaactttatttttatgaaagtttattataattttttctaaacaaatttatgttctttattctcagcaaattcactatatatatgattatctttgctttcatggatgtcatcaaataaataaaaatattttgtataggatcgctacgacgctactagagctgatgagagagatattagttcatgatgaagacaaaggtaagggtattttccacaaaattttgctcatatactactcattttagatgctaaactataagtcatacaccgctattaccccattaatgaatggcctcattttgtattttaacataaactacatctaaaaatcgcaaaattgttacatttttatgtatatatatttaacaacaatcatgagataacaaataaaactaaattaaaaataaaatgaaaaaggatagatgaaaataagttattaaaataaaataaattatgtgatgtaaaacaaaaccagttaatagtgatcctttaaatatgatttgaaggatacatgtccaaaatattagttactattataatttaatgaaattaaaaggataggatctaaaaagatttgttattcttcaatcagtagattataatataaatatatatgacataactataatttaaaagcatatatgtcttagcacttactattaccaatgtttataaatctgaccctaacggtgaatcggactaccttatggatcatcggatcacttgatcagccggattcgacaacaagtcaattgattcaaacttatttaatgcatttaacgtttatagagatcatatagttttataaaatatgaagaaaaaaataaaattgggtgaccgggcggtttgcgtcggacgatttgaaagataaatatgtacaattagaacgatttatctattcttaatatgagatcaaataatacctcacctgaaaaatactctctgaagcaatacaatgataagattgtttcaggagtgatgttagatgaaagttcaaaataattgagaaaaacaacaatatgattaaccaaatgataagggtccgtgattttcatttaaggaggagttctctattggggccgagatctattcccatcaaacgtgaaactatctagtttttgttatttggtggtcagtcaaaatagtgttatactttacatccattaaaaactccggtgaatggtcactcgacggatacaatcatctagagaattagtcggatatatagtaagaaaaaaagaccacaacatgataaatcatttcttctttttagctacgcttcatctagtacttgtttacttatatcactccttcaacaaatatacatgtgaggactaacaaagtactcttagaacatgttacaccacaataccacagttacttaaatccaactttgaagaagctaataaaaacaacttttgaacattgtcgacaaagtcaatatgcaaggataatagtaatttaaagtgatcattaaaatttacaatacatatttcggtaatgtgaatagttagttactcgatcattcctagaatagtggaaacgaatagttggagaaagagccacaaagtcttgaatggctattacattttcaataattccttcaacaaaaaacaaacaaacaacagtcgccaatgattgctccatagttgttacataatgatttgtttattaaagttgataataattaacaaatcaatgatgacgttactaaaaataaataaagcaatgacccgatggctcctttttcttgttgacaatgactaattcaaaaacagtgtaatcaaactgccgccataaaaacaaaatcttaaacagtgtaaaaaagcttaaacttctcctcatttgatttcataataaaaatgattatgaaaaaagaaaggttgtaacataatcttgaaatactagtccatcatataaattaggggtggatattttaccgaaccaaccgaactcaaaccgactcaaaccaaatccaggcttagactcaaactatttggttatgatttttctcaacccaggtcggttgggtttcggttaaaaaccaaaccggaccgataattcaaggcgtttatttattttcaattgagaagaatccaatttcgtgaaaagtatcaattatttatgttttttaaacaaaaattaacactgaaattttggctaagaaattttgaagagaggtactagtttagctttaataattgagtcaatcaaaagctacaaatgaacaatcaacattgtatatctcttgatatatgcacgaatcaagagatatacaatgtttaaccggaccgataattcaaggcgtttatttattttcaattgagaagaatccaatttcgtgaaaagtatcaattatttatgttttttaaacaaaaattaacactgaaattttggctaagaaattttgaagagaggtactagtttagctttaataattgagtcaatcaaaagctacaaatgaacaatatgcacgaactcttattttttctttgtaagaactaaacattttggattcactatatttatatccaaaatcttcaatattattgtagtaacaatataatagaagtaataaaaaaaaaactgttgtggaattggaaaatcaaaaatttcagaaagaaagaaatcaagaaagtgatgaacataataaagcggaagcaaaacatttagtcagtaagaaaaaataaatttgggcctgccttaatgcctatctccaaatttgggctttcattattggtgaaacgaagaagcccaaatgttgacctattttataaacactgaaaacattcgtactcaaaagtgaaattttaaaactttgagggctctttgtcaattgttcatggattcatcttctctctttgaagtttgaactttgaactgaagaaacagaatttgaaatgatacaaagttcaaagcttttggaattgcaaaatcaaaagtttcaagaagtaagaaagaaatgaagagagtgatcagattctttaagcggaagtctgatcctaagcaaaagcttcgagattggcaacgaaagctacgataagatgtccgtgacattgaacgacaaattcgaggttcttgttgcttttttctcttgtatttgatcagattcttaggaaagtttcgaaatttgaggaatttagttagttatatgatgatttatattgatgggtttagggttttagattaaagatccaatttttgagaatgactattaaagtatgttcctttcgtacgaaattgcttcaatttgataatttggatttagggtttagtgtttgaggattagggtttatactgagtgagagtttgctttcagatattgagagagaagaaagaaatgtgcataaagctatcaaagactcggtaaagcggaatgatttggtcactgctaaggtaaagtatgaaactttattagtaaatctgattcaatggtggaagaaattggagtttttaaagtgtttctctgctttgtgtgtttaaaggcacttgctagggaaatagtgagttctagaagaacggttaagcggctatacgagaataaagcgcaggtgaattctatttcaatgcatcttggggagagtattggtaatgatcaaaagctttacttggtggttttcattgttgttatgtgatatgttttttagattgttgtttacgtttctttttgtgttgcagctactgcggtaactgttgggaatctttcgaagagtggtgaggttatgaagcttgttaatagtctaatgaaagctccagagattgctgtgacaatgcaggcatttagcaaagagatgaccaaggtagttaataaacgcttttgagtttcgttctctatgttgttcatattatgtatatgtatctttctctaatgtgtggatttatgtagactggggttattgaagagtttgtgagtgatgctgtggataatgccttagattctgaggatattgaagaggagatcgaggaagaggttgataaggtattgactgccatagcaggagagactgcagctgagctcccggaagcagttaggaagcaaaagatgaatgttccagctcaaaaggcggaaactttacacggggtaagaactcttgcagttgaatgattgcaagtacatgaaaaaagatggaatagttacagagaggaagagatcaaatctgaaaagggaacgtataatgtattgcaggaagatgcaattgtagaaggagttgatgctgaagaagaactagaggccattagatatcggctagccaatgttagatcatagctgatatatactggatcatacttgtgacttttttcttaaccgttctctcttattgcatggtcgatcttttggtcagtgattgtgcgatttgtatagacactaaagaaagttgagctttagcttcagtgtttgtttggtttgcttgaatgtaaagtttttagttttggagtatgaaacccggttctggttcatcttgatttgatttggtccggttctatttaatttggttgaaatttgatattgtttatgttgatttggctgtatactacaattgcatagttatatctaaaccaaaggatagttttcaaatttggtcattcctgttgagtttttttttttgggtagaattcctgtttagtttttaatgtgtacatttatatacactttatatgttggaattttctgaaccaaaagaagaaatttatatataccattatgacatttagtgagcacataaattgttagtatatacaattatttaggcaaaaactaaatggatcaatatgaacataaatgtgtagttgctgtgtatgtgtaaagatgcaattttgtaccttaaacttaacacggcacttcctcattgaagtgtcatgtttttcttgtgatccaagttttgtatgtttctgcatatatttttttataatctttttccagttaacacttttagtaactatttatatcattagtaattaaccactcaaaactagattatttacacttccatcattcactctcttccacatcacatagaaaaattcaaaacaaaaatagcttagttgccgtttcctctttctccgtcacttttattttttcatttttcttctatttattaatacaaaaaaaaacaattatgtaaaattctgtaaaaagttaaatgcaattttgactatctctcgaaatacatgttacaatgttactgttagtctattaagttcttcttcacaattgtgtactaaaatatgggtgatggatgcgtgtgtgtgtagatgttttgaataacacgtatgttttgagcgagttaattattgaacctggtacaagaaatcaatcaggaactaataaacgatgatcttcaagtgatacatttgggcttcggctctagtgtggaagtagtaactgaccatgacattgaagaaaatgatatcacaaaatattgaaataaaagaaaaggcatgaaagaaatgaattttcatgcatatggacgaatgtgtacataaatattttgttgcatagaatgtatgtaaatacataattatgtatcttgcttctttaatttgtagaagacaaaaaaaattcgacgaagtgtcatgtttctgttgtggtctaaattaatactctagaaggcgcaaattgtgcataaagcaaaggcgttatattgctgataaaggaagaaaatgacgttacataaaatataaaattattatagaatttagattaccgaaattcattttggaactgtcagtttcttttttattctaaaatttaaaactaattattctcaaactagttttttgctaagaatgtaaatatttcattaaaaatgaaaagttattagaagttacacaagatagatcctaaagtttggtcccatggcaaaaaaggataaaaaacatggaaacaaaaacaatcagtctatcgacaaaatcagtaatttcggaatcaataaagtgataaaacgattttgaagtatccaaagtgatgacacctcaaaggagtagctttatgcttccttcgttttcacattatcgtcatcaagttactacaacttcttccactgtgtcaaactcctataattggaaactgcattgaagcaatgtgtttcagtagtaaaagaaatgcatataacataaagtattgttagaaaatcttgagtgaaggaatgaaatacatataaaaaccacgagtgaagcaacagttgggtcggtcaacaagggaacataagacgcatatactattatttgggataagtgtttacatcatcttattcactttcagttttgtgtttacacaagacagttttaacaaccaaaaaaatctggaagaaataaatgatagttaaatgtcttggcaataaattttaaggaatttcgtaatacatttattactattcgatgtattaaaattttcatttgtcttagtttttaaaagtatactgtaatttggttggaaaaaatttctaaaaccttacaggttttattgccttgcacgcaacaaattatgagattgagaatctgagaggccgacttaggccttttgatttattttcttgaaaaggaaaaacaaagggtttatttatctacctggtatatctttatttttcatgttcactaaaggaaaaataaagtattgacaacaactaagaaaatgatattattttcataattatttcgtgagaccttaatttttttctttgtttgtaaagaatgttagacgtgaataaaataaaataaaataaaaaagtttataaataattaaaacggtttgaaaatccaaatcggaaaagaatatgatcaaagagttttggaggctttgattacaaatgtttcctaatagtttttttaaagtttgaaaacccaaatagaaagaaaatggtctattaattctccatatagttaaagaataaaatctaaattggagaaaacggtttattaattctccaaatatattatgaattagatacattttcttttaatatttgtttttgctttactagccttctttgtttaaatgtcaattttaaatttatatttatcattctgcctttaacttattaaaaaaaatattttcatatgcctatataatagttaaataatgtaaaaatattagattttttttaagaaaagttataaaaaaattataacccctacaataatgatttacgccactacttacatcacaatttttgctattcctcttctttttttttcctgtaacgtgacgagtgaagtagagaaaaacttaagtgtgagtaagattcctgggatgagaattgtggaaggtgaagtcgtgtaagttgatgtaacacaggtctcggatcttcaagcataaaactacttaatcatcaacttgcgcaaaatatatctttattataacacatatgtatatatcagcaatgacaaatataaccaaaaaaaaaaaagaatagatattttacaaaaagaggttgaaataacattgtggtgacaaaagcatatatcttgtgtatagtggtgatttgcacaaacaaaaaagagttcataggtttgtaaactatagtgtattgacttagttaatcagggtcgataccgactaatcttttcggatgattattctaattctgatgattaaattttaagtttttgcagcttcaaattctgcataacaagagaataatgatggaatcatagatataatgttgccaatatttgcaaattattgtactatgttcaacaatgatcaacatattatttatggaaagagggaactttatctttaaattttagtactagtatgtaattacatttaatgaagaaaaaaaaaacagtccaaccgccacatgttaagattctggctaatatttgttttgtaaacaattaacatacacaatagaaaaaaaaatcaacaacattaatcagtcattaacaacattatttgccatcgttaatcgcattttggctggtgatacacgccaatatataagccattatagtgcattgatttgtccatgtctaaaggattcttctatccaaacacaattttatacgcaaagatttgaattaaagcaaggatttggacagaatgtacgcaaaagcaaaacgaaatagctagcgttcacacaaattacacactgtctttgtctctgtctttatcataaccgaattaattgcaattgcgaaaatttatgtacatatgtataaaagaaattaaagatcctaatatttcggtaggtacgtgtatccatcttaatttaattttggtgtctgagttttttaaaacaagagcaatcatatacacacttttcttgaaagaacaagtggggtttatcacagtatgaaactataaaaagaaagcaaaaggaagtcctgtgagtggctacaaatcaaattaaaggttttgaattaggtataatatattactcaatttagatagaatgttttgaagaaaagacattgtgagttttcgtaaataaggttgtgttttcatctggcataatattctataatataatatctatcctaaatcatacgtaaaatccatgatattttgaaaattcacatatgacaaatgaatctcaatattatgaaaattatattcactattttttatatataaaaataataatcgtattagtcttaaactaaatctctacaaaatagctatctacttcttctttttgacacataagtgaaaaaaaaattttcgtctgaaaatttatagttaattttattatcagttttggtctatttttttttattatccagtctgaaagtttgataataacagtttgaaaaatatttttttctattatcctaagagtccgaaaaatataaagatgattttcattgattctagcgaccattacctttttcgaggtggcaaacaaaaaataaaaaattgacaaatttttcatttttgtaaggcaaattgtaaataaattcaaattcttttaagaaattaaataagtaactttataatattttgatccacagtttgtttagtagactaacaaaccaactatataaataaaatcatcgtttcttgaatcccataaacccaaaattgtaaataaaacaaaatgcttttaggatactaaataagtaactttttaatatttttgatccacgatttgtgtagtagacaaacaaggcaactatataagtaacatcatcgtttcttcaatcccataacccaaaaattctctcacagaaaaccaaaaaaaaaatggactccaaaacaacttttctcacatttctcctctgtattttcattttctctcatttttcaccctcaacttccaaatctctgacagaaaagcccttatctttctcaccgtcggcgagtttgccgactctcacggcggagagacttatcaaaggattcaatttgatgcctacacgcgacgtcaatgtcatcgatgaagaaggttctgaggctccgagactggtcgagagagcattcgatttgccggcggcggttgaccgtcgtggctccggtggttctccgtcggttcaagattttggtcaccatgctggttactacaaactccctaactcaaaagcagcaaggtaacttccatttgcttgtaccggaattaaaccggttcaatcaatccggtttactttagattttcttctaaccgtttcatccggcttcctagttcacaattgttttcacaaatatagaccaagccggtttaatttaaatttttctcttaaccgttctaattagtttggtacacattgacatttgaactcaaccggcttcttaattctcaatttcttctcaaagagcaaacaaatccggttactttatgattttatataaccgctcaaccgttttagtaatatttggaaccgtctcggttaacttcggtattatgactaaaccgagtttttctattgctcaatttctttctcaggatgttctactttttcttcgagtcaaggacgaacaaagccgatccagtggtgatttggctaaccggtggaccaggttgcagtagtgaactggctctgttctacgagaacggaccgttcaccgtctctaacaactcatctctttcttggaacgaatttggttgggacaaggttggttagaaaaaaaaatggtcaaccaaaacacgttttctcatatctcaacaagaaaccaaattattctcaaccactttatttcaattttaatattataggcatcaaatctaatctacgtggaccaaccggtaggaactggtttcagttacacatcggaccaaagcgatcttcgtcatgacgaggatggtgtcagtaatgacctttatgacttcttacaggttcggtttcaattctttcctctgtttcatcacattaaaaacatgttcttgacgtgacacattttctttgcaggcgtttttcaaagagcatccacaatttgtgaagaatgatttttacattaccggtgaatcctacgctggacattacattccggcattggcttcacgtgttcaccgtggaaacaagaacaaagaaggaactcacattaaccttaaggtaaaaagaaaaaaaaaagtccacattgatcagacattttgtgttttgtctttaaaccaaatatggtttatatcagggttttgcgatcggtaacggtttaaccaacccggagattcaatatggtgcgtatgcggattacgcgctagacatgaatttaatcacacagtctgatcatgataacctcaaccgttattacgcaacttgtcaacaatctatcaaagaatgcagtaataaacaatctctcaacttctttttattacaaaaatgatagtttactttaagtttgtgattttgtaatgaaatatgtttgctttctttatgcggtttcaggcgcggatggtggtgaaggggatgcgtgtgcttcttcttacactgtctgcaacaacattttccaaaagataatggatattgctggaaacgtaaacgtaagcatcaaaactggaattgaattaatctcttttacttgtttattcttgaaataatagctaacaagatttttggtctctctgttttgaagtattatgacgtgaggaaacaatgtgaaggaagcttatgctatgatttctcgaacatggagaatttcttgaaccagaaatcggtgcggaaggcattaggtgtgggagatatcgagtttgtgtcttgcagtacagcggtctacgaagcaatgcagatggactggatgcggaatcttgaggtcgggattccagctcttcttcaagatggaattaagctccttgtttatgccggagaatacgatctcatctgcaattggctcggtacttttcctcgctatatccaagtgtatgctgaccatagttacatctccggaaaactgtttaagctgagactgattgagtattttttccttcgtatataggaaactcaaagtgggttcacgaaatggaatggtcaggccagaaagagtttgtagcagcagcgacagttccattccacgtagacaacaaagaagcgggtttaatgaagaactacggttcactcactttcctaaaggtaaaccgaacaaaaatcgagaaactgaacatatctctatcgatatttgtccctaacctaatcgaaatcgggaaaacgttttataggtccatgatgctggacacatggttccgatggatcagccaaaggcagcattgcaaatgcttcagaactggatgcaaggaaagctcagtacacccactggtcggaccgctcatcagtaaatccaaattccgaaccggctgaattattatgtatttaggagatcaatattttacttttaagaaaagctaaataacatatacttgtgaattatttctatcaatacacaggaaacttcattgttaatttctaaccatcatataaccaagtcactacatgagttagattcgaactctatcatctaaaacctgataaatacttgattcattgaacactcttatcagcattatatgtcacagagatttgactattccaatttccaagttacacatagcgaatctatcactagagaagataacacataaaaaacaaagattgtgaattcaccgatgaccctcaaaagaacgatcacgatactcatcatcatcatcatcatcgtcaagaatgagtgtaacaccattgtttctaagagagttaataacagcccataccttagttcgactcttaaaccctttcttttcgatttctttcttgacatcagcatgtattcctcttccttgcccatcctgaagcccttccactttcagcctcattgctaaaacctctcctacgatagccgccgccttagcattgcaagtacggccacactctagggagttcttgatcgtgtgctctacggttgaagctgtcgtcactattctcccgttgtttctgtccactacgtttgctgttatgtacttgatcgacatgaacagccttaagacgtaccttttcaaaactgtcatttgcttctacaaaaacacacaacaaatactcaacattgtaagcactgaaaaagagaaacttgaaccaaattctttatctcttttacattaaatttcaattttggtgtttcgatgttcgatgtttttaatggatcacgtgaaattgagattgataaatcgttccaatcaaatataatcactacaaacaaaagtatggatataaagctcgtaatttgcgttagttttagtttaaccccctttgaaatgaagcttctctactaattaatctctcagaggaatttcgtcgaacaccttacatgcagcaattccagccaagaatatactcaaaagctactaaaatttcaaaattaaaactgaaatgagaaaacaataacacaaagaaagaagctaagacacgaggaaatcaacaattcgtagcacaaaagcaaaatctctgtctagataacataagacaacaaatcgtagaagagaaaaaattttacgaaaattttttgaactttggttgaacttacaagttaagggggattgaacttgagctaatcaagaagaaacgttgcgacgagaaatcaccagagcgccaagattaaggaaggtggacgagtgacgacgaagaagtcggtataaacgaagcgggtcgggttttacaccaataaccaagtatccatgttgttttacttggtccaatcgtaatgggcttttaatttgggctaaaaccggtacagcagcaacgttatttatcagagagcatctccattcgtgagatactccatgagtacatcataatatattattaatatttttatgtttaatttaagtagaaaaacttatactaaaattgtacttccattagtgagatactcttataagtatctcattaacattaacatattattatatgttttttatattaaatttaatatctctacaatacttttaaacatatcaattatttatttttacaaattatattattaaatagttttattatttttaaaaccataattaaacataattaaacattactttacatacaaaatcataataaaaaatatataaattaaatataaaattacatataaaactatgataacataaattaaatagaaaaaatatataaattaaacagaaattacatataaaaccatgataacataaatcaaagctaactatattatctattatggttttactcttcatttgatgatgcaccaaacttttgtcatatatgctcaactaggtcatattttagttgttggtgcatacctctatcacgaagtcgaattcgattgccgagaatattgcaaaataaaaatagaaaattttaaatgtttgttttctaattaaaaaaaactattatatttataaattattattatgtttaatgcttaactaacaccaattaaataatattcgtatataatttaaacatatacatgatagagcttgttatatagataatttaattttatgaattttaaaagtaaaaataaaaaaaataacaaacatataaagtatttaattgatgttataaagtataaatgattttatttataacaaaaaaaagaaattaataacaagatgacatgtggaagagagagaaggtttcttatttcaaaaacgattctgagaaaaactaattaaaaaatattattttcatatttttgatttatttttaatttggagtttttcaatgagaaaccatagatggagatgatctaataatcatctaaattgttggttgactttttgaatttcggacaacttgtactactaatacttggcttttcaaactgtcatactattttgtcttagtataagtaaattttagaaattagcacaagtaaacacgattacaagttgtaatatactgtatcatcacaaaacatgaaggctattaatatgagagtagagaacataattataatatcaatcttcaaaatctattcaattaagaaaacaaaagaacttgagtttcagtacaacaaaacatttgtttcttaaaagagaaagagcaaaaacagaagtaagagagtcgatctacgagtcggcgatggtgacctcaacctcaacaccaggttcaatggtgatggatgtgatttgcttgaccacatcaggagagctgaagagatcaatcactcgcttgtgcaccctaagttcaaatctgtcccatgtattggttcctgtttacaacaccaatagttaaaagagtctcagccaatgtgaagaagatacttgaagtattgagcacaatcacatgttctaagatctaaatccgcgacactttaggaacggttcccaaaactcaagctctagtgtttttgaagacataaaagatgagagaaccagaagtataccttcaccacagggagcttttcgggtagtgatcttgagaaccttagtgggcattctcactggtcccttgactctaagtctcttgtccttagctccacgaaccaaatcagtgcacactacatatatcatttgcagcaacagagcaaaaacatttattcagtattcaataattggaacatctctcagatagcctcaaaatactctaatgtaacctaagactagtgcaacgcatttccctagaacttagagaggtgattaagaaaagaagtaaaacctttctcaaggttcttgacattcttggaggagagagtaatcctgatcttgtgaatctgctcgagtggctcttccaaaccagcctttcctggtttcattggttgatacgctgtcgccatatttgcagagagacgaacgaagctcgagtcgacggcggatagctttttgcttcaagagagctcgaattataacctaagaagacgttttatgtaatataaaaaccctcatttatatgggcttgttgggcccaaccaatataaagcccaataactacagctatgtttgctctgtttgttttctttcatattccaaaagtgtttgataagtacttgggccaatatgggccttgttatttttagatgggctgctattttgttagcatgttcatctctgtatttaacattggtttgtcaaacagaggaaagaagattggttcttgcagagaataataatacgtaggaaggaaacaaaaagttgagatcaaaaaacacatttgtctcttaaagagatacggcaattaacaagaggaagtatggttagtagtaagatactttgttatgtacatgaagtgaaaaaacgtagaatgttgactctaggcttaactaatttacaagcagaggagtgagtagaagacaagaggtataaaggcattgtctaactgcgccgtgtaagcttccaacatcccggtggctgtcacagccaccagaagcgaccaccatccttgacttagtatataacccattgatgctaatattgggaccagaacaaagcacactgccatcatcgatgttattcccgctgctgttccttcaaccgttttctctgttccgcaacactcatgaccatattagtttccgatgaaaacagaagttgatatttcgaaaacaaagaaaagaaatatgctcacttcctgtcttgctccatctcaacaccccatatttgtgaccaaccatcgatgcctgtaaagcaagaatgtttatcaaacacaagccattctgaatttctgagtaacgttacattggaagagacctaagcttaccattgtatctccaattcctaggctgagaattccagcaaatggagataaggctcggtcattgaacccagatgacatccaaatcggaagcgcacacccaagcaagagtgagaagtggctataaaataagacataatataatcaatggttatacaaaccaaacaacaatgtgataattctacactaagttttcccatccatggtttaaacagttttggcatacctgacaatcagatgctctgagtcacgatggtcagtgaaagcattcatgaattgatgtaaaggctctccaagaggctgaattctccatatctggttttcacaatgagtatcttgcattaaccccatcgaaagcaatgaaaaatagaaggagatttctttcaaaagaagggagcttactcgaatgatctccaatgcaacaaatactgccaatgctgcaccaaatgctagatcgagaaatttaggctgaaatgaaatgacatgaaaatagtaagaagctactagaggagcaggctaacacatacggattttctgaatagtgaaataagtttttattgatcaccagttacctgtaagacaagagctggcaagaacattaaaacagccatcagatggtagtacttccgaagcaagattctctcaaccttgctactcctcgagatgttataaaatcgtgagacagacacaacgatcaacagaatccagtagatacataatgaaagtctcttcagaggttcagaaaagacaaatgtgagcaccctgcaatagaaagagtattgttggatacaatcttagcatgtggaagttattgtacaaaggatcgctaccgacgctgagaggacaaaagataagtaattgatagtagagattaagtaccataagaagggatgctggttgaaatcgtgtacaaactgcatccaagaaggaacagccacgaccataaaaaatagaagtgaaacaaagaataagacagattttgcagcatcactgcagtttctttgtcgagcatctctctttctcaaagagctttcatatatatgcagaacaaatctaaacaccatcgggaaaagtagaaggcccaacagtagaccctgagaaggagacaggtaagttgttatgaagtaatacagtaaaggctattctgcatttactttctatttcttattatgatacctgaacgattatgccggtttccgttctctttattccatagcttattgagacaagatccacaggtatcaatttctcaaaaatctgtaacagtcatcataccaaagttatagaaacaatgaaagcagacaagattgaaaaactgacgtattctaacctttgcaattgtgcatgccaaaaagtcgccaaaatagagaacaagaccactggtcacaagaagtgcttcccctataaaagtggcattagttggaaggtgaaacagaaacatgtggaatcaaaagagtaaagtttcaattgaatcaagagttccatagagacaagaccatttcatgactgcgaacaaattgtgtaaaagggatatgctgaaagctatacaactaaaacaactacttaacccaagtcatgaatagcgttgcaattacctatcgaagcacacgatgggaaagtgcaaagcaaatgtcgaatcaacttcacagctgcaagtccatgaaataacatccacaacattttcaatgacgtattcaagcctgtccgagataaagaacaaactgtagtcaaaccaagcgaaacaaaaacaactcaaaaccccccaaaaaatatcttaccagtgtgtgaaatcatggaaagtgaaacaaaacatgctactccatacaacactgtcccagtcaagctaactctcgtaagccaaatagacgatgacgacaaagattcatcttttctcacttgtgacataatcactgatagatatataagtatagcacaacaactagccgatgctgcccaatactgcattgtcacatgtgcaagctctacacaacaaacaaatcaaaccatgttaatgatctaaatactaacattagcccaatacaaaagctgtgaaagttaccatcttgttcagcttcatggattgaaatagctcttgaaagctgaactaacttagatatcataacagaaggaagtgtcacagctcctagtaatatccctgaagacgcaccgcgtctacaattttccaaaacaaacacatcttcaattgaaatcttcttcccaaaagattgaaactttattgattctgagatcggaattttgaaattagattaagggtttttcacctggagctgaaatgagagagaagaaacggagaagtctcgacgcggatctcgacgaggaaggcggagagagagaggaggaagagggagaagccatgggagataagtgataaaggaagagataagagaatacgagaaaccacgacgaaaactacaactctctctcccgttacaaacgacgtcgccgtcgtcttcatcgccggagaagatgatgatttcgccggagattcgttgttttaaggcgcgattgtttattcttggtggtttgttgttttattgggccgccaacaaaacgtgacttgtatgtaattgggcccacgaaacacggtttggcacggactttaaggtcacgctaattttccacgtaatgataaaagtcaatttgttcggtttgattcggtttgttttggtttaatgtcggttattgaaattagattttaagccgttgagagagactttgtgaagaagaagataacgaagtcatgaggatgagagaaatgataattcttctgttgtgatggagcttagtctcatcaagctgcaatctttttcgttcccttcttcagtttcaagtaagctgaacaaaaccctaatcctcgattttgttttgttttctctcggagagaatttgacgcaattctatgagcttttgatggtttttgacctgagaaatttgacgggcaaaaagcaaaactttcttggtatttctgataataatttgagtaaaagcatttatgacaatccaatttagagatatttcgagtttgggtcttagatttgtttgattcccttacttctgaattaagaatggagcttagagtcaattctcttagttctcaagtgatgatttcttacttaacactctattgtctgatttatattagcttataggacaaacattgtcttgaccatatcactcttttaagttagaaactaaaaatgcttattcatagagtctttacctctggatattagttaagttttcattgttgatttttgtttgtaggtgtgaaggatgtgaggttcttaaaccttgatttgaaatcctcacatcagagagctaagagatcatcaactgttgttcctgctttagctgaaacagctgtttctatagcgattgcagccacggttgttggtactgcagctactattcttgttaggagaaataacaaagcctccgaagaagccgaggttagttgttttagtatatgatctatgccggtttctctaggttttactgatatctgcattgcttgttttcctctgtgaactgaattacaggcttctatgaaagaatgtgaagcttgtctcggttcaggaatatgtcctgaatgcaaaggtgaaggatttgtattaaagaaactatcagatgcaaatgctgagaaagcaagacttgcagctaaaaacatggccacgcgatatacagccgggtaattaattaactccctcggtgttctttcgctccaatctcatcgatattcgttcattgattgtcgataaacacacattcttaggcttcccaagaaatggagctattgcactaaatgttcttccacgagatcttgtatgatatgtggtggtagtggaaagacaagcatctagctccttacgcagagtttacaagtacgttaaactcttttcttcagaaaccgattcaaaggtttagcatagctttcttgttttgtttcatttatgaaagattctgcaatgtttgaaaactttcatacaactttaagttttacatttgcaatcttcacctgtcatactagttaagttgcttcttactctttccagattctttaatgtgatctgtttctgagacgtaaagattactaaagtcaattgcttcttcttaaggtatgactagttgtgcctcaaaacactcttctcattttcagtatttgatcgattttgttaaatcaataatatgatcttggaagacttttaaagacacggcttgttgataaaacagagagaaaactgatgcataagtcttatatcaaacgacattgtacatcatgagcaccgagctcactgaacctcacttatcaagtcaggatcttactcggtacatctctcataagaggaacataaaacatgcaaacataaagctaagtttgagggttatttatatgtggaaaaagatgtaatgtgactatccttcactagacatgagccggagatccggtttccggcgttggaatatcagccaacatcgccttgcggcctctctctgaccggctgttttcagcaaatttaatgcttccttcgtgtagtcctaagctcttctcttcctctgtccattccgctccatagtaatgctcttcctttgatttctctccatcttgtgatggcctcaagaacatgcttccccactgcggaaaatgtataaacgcaaccggaagagagcacacaacagccataacgcccatcaacgatagtccttccgccgtactaaacctcgaggaagagaagaaaagaagttgagtaactcccgacccaaaatttccaccagcaccagttaatcccgagataagtccaagagaacggcgggaaacaaaaggagcaacaccaaagagagctccacaagcagcttgtgtgcccatggaaaaaagcatcatggctaagatagctataggtagtgaactagcacgaccaagccagatgcaaaagagagctccaacagtttgtaagatccacaagatccataaccgtcccctcataccgaagagccgtgcagctacatctgaagcgtagccaccaaaaggacgggcaaagaagtttgccataccaaagctggctgctataataccagctgtgtgaagcgtaaggttaaacctatcgtagaagtatccagatataacgttgttgatcgttaattcaactcccatagaaaatccatagagcatgaataagatccatgttctatagtttttcacagcgaaccaaaagacctattaaacaaaacaaaattgtaattagaaccacatgcattattgctagtattgtcctaaaaatattgatcatgtttaatatattaccttggagaatttgtctttagaaacttgaccactcttttggagagtactgaggttaccatcgggaagatcttggccgagagtgagaacgagaatacccataactatctgaagaatgccggggatgaagaaggcgaacctccaagccgtgaagggagtggctccggtgagtttgatgacgtggaagaccattggcattagtagctgagtcactcctcctcccatatctccccaccctccagcacatccgttaacgagtccgataatctttccagtgaacataacactcgtccagtactgacatgatacgaacgttgctaagcaaaaaccgatcatgaaccttacggctaagtagcttcccgcgtcagctacgaacgacatggagaaaactgctggagctgtaagcataagtgagaaggcggttccataacgtgcccctagaaggtcacatacagcacccatagcgagtctcgagaaaatggcgccggaaactgatgcaactccagcatttccgatgtcggttttggtcaggtcgagattgtcgcgaatgacggggactagaggtgcggctgcgaaggtggagatgaagcaagtgaagaaagagatccatcctaagtggaaggctctcatatgtggtttagcgaatgatagtggtttgaacacttttgccctatgttcggagtccactggtagggcaaacttagccgttggatcgtttgttcggacggcttgagatgaagggacatcttcttggacggagaaggagaagacttgctcccttgccgtgactccatgcaaggaggttccaatagagccgtcttcattagaatggttgtgagccattgatctttagttcaaagaaaatgggagaagttaagagagagagagagaagagactttaaacgttgaagaaggttttcttcttctttgtggcctttgttgttttctgtttttggtgtaagttggagaagatgagttgcatagtatttatagagatttttggtgggtacggttaggtggatccaataataagagttgaataatactacgtgaaatgaaatgagcgatggctttttgttttaattttttttttggtgaaatagtattacgaaatttattggtagaaaacaatcaatatgtaaagtctcttgtacattttagatgtagtctctttgtaggtttttgcaaacgttttcaatagcaaaaaaaaaaaaaaagtcctgatttatttatatattttgttaataaactgtgttgagggtcgaagatagtatatattttctctaaccgaattatcagaagaaaaattacgaaggataagagaaagttcacgtataaccgaatgatcagaagaaaaattacgaaacgataagagaaagttcactagcttttctttatctttaatctttcgtagtgcaaatatcaaaacggacaatttgacacgaaaaatctataccgaactgcatcatataacatatataaataacattattatgaatggctctcctaaattttatctaattaatatcggttaataaaaaaaaaaagtccaccgctccaaaaatagttcattcggaaaagagaatatcctattagaactaagcatatgtgtgtttttgcataatgcaaattacgtgctccatttactattaaaatgtttataacttaacttaattagaaaatacgtttcattgactacttgtaccatatctctatcaagtcgaaacattatataactttatagaattaactattacgtacgaatggaataaaatgcagaagaacaacgtgtctctttcaccgccggcttagcgtccattttgcgcatccgtagctaatgtacaacatgcatgtgtcttacctaatgcattgatgtttccagcttactataatattttgaaaatattgttgatctttttgtttaatggttatacttatacattatatataaatattgttaatttacgagaatatcttcttattctttttatttttttgttatagagtcatctaagtacaagaatatctttatggagagacaaatgtttgacatttgacatcaaccaaaggtcaatgagactatgagatcgtacggttcattgtaaaaagctcattcttctaaaaataattgcagtttgtcttttgtgtattccatgtggtcgactcatcaaattaattttacttttggaaatagttgtatcaactttattcaaaaattcatttttttttttttgctttcaattacccaataataccataagatatgaaaatctcttgatctttatttatttttgggggtttaaaacaaggtcgatcatttcttatttggaacgtaaactcatattttagaaaaaaaactaaaattgcagagagcaaaattttggcaaccaaaaagaacgaaacaagtaacatcagcttttgaaagttatcaaatgaattgaatgtagcgataagttatctttcttacatattcctcgatccccgtaccatctagataatctttattaattagtttgttacacactatgtcactatattgaatattaaaaactcaatttgttttttatgaatagcctaataattactataattttagttagtccatacagattgatgcatttgttaaaaaaatttatatcattttgtcatttatttagtttaatagtttgtagtgaattataggtaaagaacatgtttctttaattcttttgtcttctttttttttggtgcattttacgtaaccaagtaaagaaaagtcctatctttataggtaaagaaaattccaataatgcgggataagtcaaacaaaaactcgtaaccattgatctttcatcgggatggtctttgacttgtataaagtgtacgtttttctcttaaaagtagttgcaacttgctagatttctagtgatattatattcgattcaaaaagctaatgcacaacaacaagatctaactaatttatatcacatttgacaatgttatcaaaaacatacatataaaccatcgttagctccagtattttagagaaaaacttggttgtttcacgagatttctagctaattgtccttctagcataagctagtgaaatatatattcctatattgtaaaagtttcaaaagtgatcctgtaaatctacatatattcatgtttaatatatggtctaaagtgttattttatttatttttatcagacaaaaaaggtcagctacttacaaacttttgataattcataatcgctgcttatattgcggcaagtttcacgtcattatcaacgtggggatgattcagcagaaaacttagaaaagtgggttgatgcttatcgtcgtggtttctgataggcgtactttacattaatgataatctcttggacttatattaataatttcaaagtcgtacctatgacttgtactatttaataccgtacagatcacagctgtttcttatgctaatgacgtggaagatgtacgggcagctgactatgatccaacacatctgaaattgatacacgtctctttttcttgccaactttgtacttatgtgtatacatagatctctgtacttttttgctgcttcacatgttaatgttaggtacacttttcgtagatcactgtaaaacttattaaactgattttatgttaaacattgtaaattaattagtttgcgtaagatcttttgcataatatagttgcttaggaaggttataaaatctttcagctcatgttatttgcccctaacttcggtggctatgcctagagatttttaggttatataaatacaaacaatggttttgaccagtattttctgtactactttagaaattattaatcacaaaaacgtcactaaaaaccttatttcagtttttttttattccgttattttatactattttaatatcacttatcattttcttatctgttaaaaaacttgtaccgttttctaatttacgaatttaatctaaatattacagagaatatgtaattacaaatatatatttcataaacataattaacatgctagaatgggtatgaattcatgtttgttggtccatcatgtcatggtagtctaaactaatctaacactttgatcatggtcaataaagtataaaacttaaaatatatgactattagtttgacaccaaaccaatttaattacagttgtttagtggttgatccttgggtgttaattattattcttgcttcggttttgtatcatttcttttaagaaaattatcatgatttaaaaatgtatctaaactttgaaattttgaacaataaatcaaacaaaagtggatgaaaaaagagttcgaatagcgatattttctggttaaagaaacgtgtaccatgcgacataagaagagaagaagaaaagttcccttctatgtatgcatgtaagcaagctgtatgatactgtgccattttgtttttgaagtccagcctatttagtagacaaaaaaaaacataaaattatgaaagtaattaacgttccatttatttttgagaagtcttgcgaaaattgactagttaaagaataataagtgctatatatgtctatggttatgctgtgtagtacctttccattgaggaaacaaacaacattattttcttttttattatggttaatatatatatatatatatatatatatatatatatattattgtgtaatgactttcataatcataattatgatgactttcacatggcaagttgtgatggaatacgggtcacaattagagcactcacatgtaagtgtcttaattggacgatgactcgattaaactaaatgttgaaccccttaatgttgctatgtcgcatgaatatttattctaacataaacggatattattattattgaaaccgttaatgttgcaattagttattgaaaccgttaatgttgctatgtcgcatgtcgcatgaatattttacaaacattggaaggacattactatttaaaaaacatgtaaacttgatcacttaaactgtcattggcttattgcaataggcatcttgtattattttttttgttatttataacgtttgatcgatacattttatcaaagtatcgtgtcccattctcaaaatatctctatcattctagtcttccaatggctttcattgcaatgccgtatattagcgagattcgcctcaattacattaactatttccagcataaatagttatattacgtttaaattaaacctagaaagtgacacaatattgacactagcatagcaaacgaaattacattacatatgtcctagtcgaaagtaaaaaatttatagagaaaaaataataaatatgaacataagtatctaactagctcttttttttcctaaaattaaagaacagaatataacaaaatcaaagattccaaattatataatcgaaagaaaccacaatttaaaattcttgaaacgttgacaataaacgttataatcactcaccagactttcgttttaaacaatatgagtttatgcatctgcagcaccgttgcctgtaaataaaggacaacgcgataagtgtagcaatcaagccacgtttgttgactttgaaacgcgtaagatacgcgagacaagctaagtaagtacatatcaaatacaaaagataaccacttggtcttataaaatagtcctctctacggatccatactttattattgtatttaccgtacagatcatcatcatcatctcccacctttttttttggtatgaaattcatttcccacttttcaaagccaagttgatgttgctcgttaaagctaatagaatgatccataatatatatttagaagttatttgtattgccgtacgagaatgtaactctggtacgtagaagcgtatcaagttgattatcatttcttctcatcttacaaaatattattttagtaatatgtattttattctattttttcttgtagattttttttattacatttaaccgaagaatcaagatcgtattcaatgatttttaattttatcaattcatataatttcacaaaaagatgctataatttatgtttatattaattggttctcgaagcggttcatttactacaacaaaatttttgtactgagcgttatatgctaagaaataaatttcttaaagtagacggaaataaaaataattagaataatagagtcatcaacgttctttttttttttcttgcaaaacaaagttttttcttgtctacaaaattataaataatgtaaatactaaatagtgataaataaaagaagtaaattgtgaataaattagaaataaagtcgaatataagtgaacccacgatgaatacagacaggttcagtcatagatcatacgtggggagatataacttctcgactcagtaaccaaaaacaaagaagaaaagcaagatagtcagaagctcttatcaaatgaaactgaaaaccatgagtattataatgaccgtacagatcatgcattttatatctttatcacaaaatacagcctgtctttgtaattatgtattaagcatattctgatcccatctaactttccaaagcaaaaagactaaacaagatttatctctcctttaatttctttttctcgttgtagagaaataatttattttcctgaaaacttttgtcaactttgtgacatttatgaaatcaaaagtcaaaactcttcctatgatttttttttatttttcgacagcaaaaacatcatattttattaagcttgttaaaaagtatagaaatacagcaaaaacaccaccgcaactaaaaaattcatgtgaaaatgtttgttaactagattttaacccgcggtacaccgcgagaataatttattttttaaagttagtatacataaaagtttataaattatatttatctataaaatatttttattttatagtttataattgttattaagtaacttcctgccaaacccggtccgccaacccgtcccgtaaaaaaaatatttattttattaatgttgattttatttatgatatgtttatgaattattatctaaatattttttaattttgtagtaattaaatgctatcaaatatctctgcggtttgataattataatcgaattattataataatggagaaaagcaatatcaaaaatgataattttgtagtaattaaatgatattaaatattttaaaagttttattttagtaactaatcgtgtgttaatgtggagagatttagggaagattgtcaaatctcaaatattaaattcgaagatttttttctaattatcaaaaacaaacattaaaatctagtgacagccattgtaaataagtctcaactacatgatttatttcacaaaatggcttcaaaaatgtatatgtagataattagttctcaggttataacctactaaatggattaaaatcggattagtcgttgaagcatctatctaatgggccatacgtatcggcccatataaaccaacaaccactaagaaaggatcgtcctcgggtgatgaagaggaagcaaccagagtactcctagccaccatcataaataaaacatttttgatttctcaagactttacttaaaagagggcaaaaatgcttattttcaagcctcgttttgttttatatactaaaaagagagcaaaaatattccaacgatctctttgttactcacatagtttgcttttagggtttacgctattcagcaaccacctagtattaccaagaataatatatggtaaagacgagacattagcaaatacatatttagaatagaaggtacgaacgagtgaacgaaaacaaagaccattattcataatcattattacatcaaaaggaatagaacaacagcataagaggtagtcttattattacaatgcacaaactcagaatttcaaaccagagttttgaagtttctcttgaatgatcatgtcgattttgttctccatttcaggagtcaaatagttcttccaatcaccaacttctcctttacggaaaaacattttgttttctctaccagaattcaattttccggtcttattgatctccaaactgctcagattacgtagagaacaaagatcgataatctcatccaccgatccgctctcttcttcttccttagtaaaaggacaacctaagaactcggcaaatttcttgatctggtcacgaggttctgctttcatctcttcaaacttcataaaaagcacatggtttggatcttccaagcttcctctccaatagcttaagacatgatcccaaaaaggcccgaaaatgctgactcccctacaaaacatctcaaacgtatcctcgaaactgcttattattttttcatcggtttgtttcttagtaaagaaatgccaatatgaaaccaatgtgtcttttacgtttctagatatatacacaattttacaagtagaacctttgagaccttcttgcaacgtatgtgacggcacgtgtgtcgaaaacagcctcggagatgatgagaacttggtaaggtcaggattttcgctacgtagatagagatctatctcaaagtagggtacaagaacgtgtggattattagaaagaagaggatgatcatcatcatgagaaggctgttttgatctatgaaggagtgcgaatgtaagcgccttgagccaagtggtgccgcatttagggaacgaagcaacgatgatatcggtgtcttgaggcttgaagcttttctggaaattgaggacagcttgaagaacattgtgagtataccaacatccttgatacttgcaaatagttttcccagtgaaatctttgtctgaaggaagtgaagagattagagtctttgtttcttcgtttaggtcttcaattctcaagttcatctccatctttttcacatccattacaaacaatgattctactatatataacatcatcactatgatttgtattgttttgcaaaatgcagcgttttcaaccaacattagtttgtttatttgtcaataattgtggtagctaggatttgctacggtagtagttttgtctgcttatatttttaaaatatgttttgatataatttgagtgatgacttgtgtgtagtaagaagtaacttttgttataaatgtgatgattatccatcatgttacttcttttccaaacaaaatagcctccaaacaaatgaataatattatctatctctttttataattttattagttatttgggcatcaagtttttttactttataaatacatgtaagaagaagataacatacgtatgtgtgtgaagtaatataagcttcgtctctttactctttatatttctttcttatacacacaaacaatagaataatattattttcttttacgttatattttacaacagctttatatttttcatctacattatgatttgtgttatttgcgaaatacagctttatcaaccaacattgatttgtttatttgtcaattattgtggttgctaggatttgttatcgtagtagttaggacttttttgtctgctaattatcaaaaaacaattattcgatataatgtcagtgatgactgtgttttatagtagtttacatttttaccaaaggatttaaatagtaacaacaacgaaatctgcggaaaaactattttggatttaacaacatttaatgatgatattttttagcagagtttggcaaatgatcaaattatttaaacaacacggtttgttgaacttgaaacatcatgcaaaattcttacaaacataatttattgaactttacttttagttgaattggggaagttaacttaaaattatagaaagtcaatcgtaattattgtggtaatagatatctataaagatcatggagaaggaagtctcgtgtattgtgtatctaacagtgtcagaaagaattgtccatggtaaaatcactatgtaagtgttttcattatttacaataaataaaaaattcggacgtttttaaaaaaattgttttgataactagtttcataataccaaaatagatcaaaacactagcctagcaacctcctagtgttaataatatataatatattcaagtccaaaactttataaatacttcaatacaaagtataatatggtaaagacgagacattaaccactatatatgtagaatatataaggtaagaacgcttacacgagagcatacagaaggaatataacaacaacataaaaggtagtcttattattacaatgcattaaagaaaagctcaaaagcacacaaactcagaatttcaaaccagagttttgaagtttctcttgaatgatcatgtcgattttgttctccatttcaggagtcaaatagttcttccagtcaccaacttctcccttacggaaaaatgttttgttctctctaccagtactatgcaattttccggtcttattgatctccaaactgctcagattacgtagagagcaaagatcgataatctcatccaccaagccgctttcttcttcttccttagtaaaaagacatcctaagaattcggctagtctcttgatctgctcacgaggttcttctttcatctcctcaaacttcataaaaagcacatggtttggatcttccaagcttcctctccagtagcttaggacatggtcccaaaaaggcccgaaaaagttgactcccctacaaaacatctcaaatgtatcctcgacactgcttattatgttatcatcggtttgtttcttacaaaagaaatgccaatatgaaaccaatgtgtcttttacgtttctagacatatacacaattttacaagtagaacctttgagaccttcttgcaatgtatgtgacggcatgtgtgtcgaaaacagcctcgaagatgatgagaacttggtaaggtcgggattttcgctacatagatagagatacatctcaagggagggtgaaagaacgtgtggattatcagaaagaagtggatgatgatcatcatgagaagggtgcttcgatctacgaacgagtgcgaatgtaagcgccttgagccaagtggtgccgcatttagggaacgaagcaacgatgatatcggtgtcttgaggcttaaagtttttctggaaattgaggacaccttggagaataggcggagtataccaacatccttggtacttacaaacatttaccccagtggaatttttgtctgaaggaagtgaagagattagagtttttgattcttcgcttaactcatcgtttctcacgttcatcgtaatctttttctcatccattacaaacaatgttttttttttgttgatgtattcttaagcgaacatcactatgtatttttgcaaatcgaagcatttccaaccgaaactaatttgtttatttatcaattattgtggtagctaggttttgttatggttactacttaccaataacaaaggatttgttatggtactaattaggaattttttgtctgtttattttttaaataatatattttgcgatgagttcagtgataactacaaaataagtaattttatatgtttatcaaaaggtctaaaactataaagtaatgtataatatcttcattatgacatgtgttgtttgcaaaacgcagcaatctcacccgaaattagtttgtttatatgtcaattactgtagttgctaggatttgttatgaaagtagttaggattttttttttttgcttgatatcatttcagtgatgactattttttatggtaataagtaactttacatttttatcaaaggatttaaatagtaacaccaaaatctgcagaaaagttatatttgaagttaacaacaatttaacgatgtttttttagcagaatttggcaaatgatcaaattatttaaacaacacggttagttgaaacatagggaaaaatttcttacatacataatttattgaactttacttttagttgatttgggaaagttaactagttaaaattcattaaaaaaaaaaagtcaacagtaattgttcttctaataggtgtccatcaagatcatacataattaagtgttagaatcactattaagagttttcataatttacaataaataaaaaatcaagactttaaaaaaatattgttttggtaaacagtttcaaaatagatcaaaacactagcccaagagttgaaataagtgagactattaatggtgcacagagatgtatgaaattagcaaattttgttttacacttcaatgagttttggaaacctaagctacctgataggttaaaacacaaaaaaaaaaaaaacggaaagaaaaaaaaaccagaaaaccacaggcaaagaggtcacggggcactttagagtactgaatcagtctggttagccaaaatctggtcatctatgattgaaccatgtttcccgacaggcggaatactaagtgaacgtttcctcatcttggctttatccgaggcggctactcccattctgtttctgtattcactcgtgagctcaagggattcagtcaatggctggttcgttgtcttgaggaaaagatcgaggttttgggagtatttgtcatctttgttggtctttgaagcctcgttgtggttgttttgcgataccatggagattgtgtctcgagactcttcttcttcgttgtctgtccagtaactcttgtcttccattgccagatcatcgtactcttcatctgactttgtcgattcctcatccaccgatccaatctggtttaagattacatgtgagagtcgtaaaactataccgaaagctacactaaaaacatgataaatggcattaacatcctcccaatgactaaagatttggttacctcgtcgcggttgcgctcgtcattgttatcgctgagatcttcatcagaatcaggctcatgaaaatcatcgtcgccttcttcatcatcttcatcgctcccattcacagactgctcctccatcagctgcatggaggatatgtggtaaggtaaacaatcttcacaaaatgcaaaaaaaataagtgtctacacattgattaatgcaagatttacctcttttgaaggcccatcagatgtccgaggcgaactgcagcaagaagagtaatgcctgcttccggtttcaataatatctgctcttaagtcatccacactcccggcgtggctagttgcgccatcactaggccaagcgctgatcccaaagtgaccaaattgaagattcactggttcagctttatgtagttgatgctctgttccatcatccatctcagtattcacgacgggcttcctgatcttaccaacggaagcaacaggccaagtttttgctaccgtaccatcagtattgcaaagagccataaatcgcctagaggagccttgtctttggatcacctgaaacattcccttggaagttaatgaattggctgcacattggttcctatgctcgtcgtcaataacagaaacggtgtttgtggttgtatcatagagcttctctccagtttcacgtctacgcaggcaaccaaagaccgtcgcgtggattgtagccacgctcttgtcgacatttgtgttgtttatcttaggaacgagatgtttgtcagctcgtttgcatagataatcctgtattgttctgatgttacgtatatattttacatacttattctttgctgggtccaatgtcatgtacttggctcggacagcaaaccgttccaagtgtttctcctcgttagcgatgtataccatgaagggaacaatcgaagggtgctttttcatcagtcccatctgcaaaaaaggaaagaaagaaaaagttagattgaaaagacctagtagccttaaatgattaaataacaacatgtaatgaaacaaagataagacttaccacaaagttgaggcttaagtggactccttcaacgactactgactcattcctctcttcccaagtggtaatgagcctatcaagactgtcaatcaccatctcactttgtgccttatacccttctatagccatctgcttatgacttagcaactcagtggtgctagagtttgatccagcatccgtcttttgggcattggagtttacacctcgagagcctttcagttttttggcttttcttttggcttttgactcggcaactgccacagggtcaaggtactctccagcatggtatgttgaagcccacagcaaaggattctgcttctcatcagcaaagctcctcatcatgtgccttatagagtcagttgataccacagtcgtaatacccaacctgctaccctgtaacacatatttagatattgcatctgattaagaacacattgaaaccagttacaccgtacgaattgtatcactctgaaaaacattgaataagtacatagcctaggagttcagtatacaaaaaaacaaaagacaagaacttcttattgtcaatctaaagcatataaatggagggcatagaaatttaccagcaatgcagacaacgtagatttaccacagccgctggtgccacagagcaaaacagttacagattctttcctttctcggattctgcgagtgataataagaattaaagacaatgtttgaaataaaagagaaaaactacagttcaggacaagatatatgaatgggaaagtagcaaatccgaggcacaataaaatcaaagtacagccgtccatgcattactaatgtaataggagcactaaaggggattaatgcaggaacgtatgaagataaacacgatcataacatttaacagtcagacaaccacaaaccacattaattatttatgtgaaattcatagtgacaaggaaaagagagaacagttgacatatgggaaaatcaagagcagctatgattctaaatgttaatagagacatgtgcatgataacaactctttattggccattcaatagctgaacagtctagctactatttctatcacatagatacgctagataccctgctaaagaatctattagaaatggcataaaaaatatttaatgcaatttttcacatggaaaatatattttatgcatttaaagaagaacaacagacatatgcagattctatatgccatctctcttttttgacaatacataccaagatatattccaaaagtgaagaaatttacctgcatgccagaatcaaatctgccctttggtcgcgaccaacatacttatattcagccagtgcatcacacacaacatcaacgaatatctctcgtgaaacaacaacagttgtccgtcttttgtacatctcaaatggcttactcttattcttgtcaacatcaccagcaacaaccaaacagttaagtttctctacacaagttgaaccaccaacttccttagcaaattcaggttccttcccattctctggtgaagtattacaagatccctcacttcttattaactcaaaaaccctacggctgatctgccaacagagacaaaaatctatcaaggaatgcaaaactggttacttataaatatttacacacccaaagatcatcaaaggacctcataataagtctttcacatgaagaacaattcatgccagggcaaccaaaagattttacataataactatatcaggcttgcagagaaaagtaacaggactgagcacaaaccacaccaatcttgaaatatactacgagtttaagaaaagtcttgtccttaaccaaatcctaaaaagactattagagacattgataaagacgtgcattaactaactctcacagcagaaagctcaatactagtataacaaaatttccaaatttccaaactatgtaagatcaagtttagtcctttcaagatccaaacacatcattgatctaaccaatacaaaaaaagtctcttcataagattgatccatcaaaactaaaatcagaaacaacattcaatgagacaaaatcgaaataacaccttgaaggcgtgacgagctttgcaacccataagctgaagagtactctgcaaaacaggacgcgtatacctaaacgaatcatctccattattatcatcatcatcaccttcttcacgcaccactatatacaacaccttcgtcgcctccgtcatcatctctatacaaaacaaaaacaaatctcacaaaattttcagagaaaattcaaacgatcgggaatgcagatcaatcggtaacataccggagaagagaaaaatcggagatcggagaagttagagagaaagagaaaaactgttggaaaaatttagggtttataatgaggatcgtgataagaagaagaagaataagaagagaggaaagatattttcgccattgttgttggtcactcgcctttcttcaacgcatcgctcgaagagagccttcacgacttcttaaaagataccttcttcttctctctctctctttctcacgtttctcttttacacagacccaaaatataaatgtttgaactcaaccaacattttacttttcttgacaaagacgtccctagattttgtttttagatcaaattggtccatcttaatttcgtgaaattagaatctaatttttggttgccaacttgtttagaagcaagagattaaatctaaatcaattttaataaataatacaacatagtaaattagaaaattagaggatgaaatctaaaattgaaaagataaagtgtgtgaatttaagagataataaagtagagggggtttttaataattttattttttttggttattttggtagggttttctttgggtcaagatttcagttattagaagtttcaccgactcatttgatcaggtctttgtcagcaatttaactatatgttacaagaaaagtagattcgatatctaaccataagtgtaataatctcaaatcgaatctaaccataagagtaattatctttaatatatatatatatataaacataagtgcatatatatatatttataaaaacttaaaaaactttagaaaaagttatatcttaaacccgaaagaaaaaaaagctatgaacttggttttggttatgttactagtgaatcttttttttccatggaatataatatatgcacttgcttatctaattgaggtggtaagaattttaaaatagaagaataggattttacttcgattgagagaagaagagtatgaagatgtaccttcacaactgttttgtttgcacaggttctatcgatttgcagagagatgggattggttttcttcttgtgatatgatgtaaaccgtatttatagcgtttaagattctgaaatatatttagttttggatttgtgtatcgtgcatcattaaattttgtattttaaactacacaaaatcaatatccaatattgaacatatgtttttttttttcacttgcttaaattcaaaatataatgataaaattgattaatcagtattgaaggtcttaccaacattatataaaataaattttaaaatagtcaataattataattatattaaaaaggttatttcaacttaaaataattatttattcattatatatatatatatatattgaaataaaatatttagttatacaaccaatgagttataacttataaattttaaatttatttataaacaaaaagttgtaatttaatttttcacaataatgtaatactagtttattttctcaccaatttgagtatatttcattccatacaaaatcatggcaaaataaagctctagtggaaactacaaaaacaattaatttagtaaatggaaagagaaaaaacaaaatctaaaacttaatcactatcacatgattcagattcaccgtgtggaccccaaataaacaagaatcaacaagtggtaaaagtgtaaatctggtgtgggaacaatggtaataaaaagttttcttctgtgaatgatttgtactttgtcgggaaagaatctctaaagggacaaagaaagtgggttccatcgttaaacaacaaaaattccaaacgttacatccacgaagttttaagccctctataattggtcaatatattttcttgttaatttcctattgaatttaaaaaatacattataagtatctaccaaaactaggataaaataaaacatcatgagaaaaaatcgtctaatcattatatattgttatatcatagtcataactcataacacatttgaatgctctatactggtcggatgatgagaaatagtctcatgaaaaagtctatagaaagaaaaatgatgaccggaactttaaatgttcaataggaatatagttatgtgaatcagatttcagtattgactaaatatcactatacatttattaatagttgtaaccgtttttggtaagtgaaatcttgaaagaattataacttgtatatatatacaaacaaaatctttaagtttttttgctcaaaccatcatctaaactagactataaaaagagacgaaacgcatgtataacttcaccatcaaaagcagaaagaagtagaaaaatgagaagcatttcattcaaacttttgttattggtttctcttcttgtcgtcgtttctcgtaagtatacataccctagctaccaacagtatcattttcaaacaagccaacaaaattttacatatctcttcacaaataattgaaagtaatctttgttaaaatccattttataaaagaatcgagtctgaattttgtttaaacaaactttatattcgaaatcattttctagttaattattttcttaccaatatgcttgtatttaagataattttcttatacttttgtttgtttattaaggatacactcttgcgtatgaagattcttgttcgacagatgaagaatgcagaagaaactgcctatgtgatgtagcatattgcgacaaaagccgtgataagtgcgattatggatttatgaatagagttgatgtccgttttcccaaacatccttatatttcaaaaaataaagatggtagtggtagatgatctccactgcagtgattgaaattgtaatgatacaagtgaatgtatgtcgtactcgtatctaataaaaaaaagttattttttgaaaactatttttaaaattttttttttttttgatgtgtttaatatgttgatgatcataattcatacatatatgaatactgcctaaagttataaatgagattgattaaagtcacataatatatgaattc

SEQ ID NO: 1356 - DNA, 79723 bp, Arabidopsis thaliana
aagcttatcctgatacatatcacggttcgctccaaactcttgaagaggctgatctcttgacaactgcccatatatgctgtaacttctattgtcatacgcttgactatttgattcttcatgccgagcaaaagagaacctagactggtcattatgttgctttaggaggttagaagattccagagtactggccctatgatcactctgaccaagtaattttgcaaaattgtgttgcgaagtcaacgattcatcccagggatcaaagtctaaaatgtttgaaatgatatcatcctctgtattctgaatgttgcttctgccttcattagcaaataatgaatgctccatattggacatagctttctcagaaaatccatttggaagatgcaatctatcactacctatttcaaaggaggatccagtttttgaatccatcccacaagaagtttcccggttctggaacgaacgagaagctagatgatttgaatccagaattgagattgatgaactaaacttagaagtcgagtggctaacagcctctgcaataccacgtctgttgttattgaatgatgagaaatcattgacttccaacggttccttaacatctatctgggattgcaaacctgatctccaatcccactcaggccttgaaccatgaattccattcagtgatatgtcagcttctgcataagtgtttgtaggagactgttttctacattgctcgagattttgtacatcgttatcagattgtgtaatagaaccaagatcacaatgagtaccgataaccactggaacaccaggggtttcatccctagaatttgtagttatccccatccatgcaacatcagcagacaatttaccaacatcgaagacatcttcagcaatttcacttgtgtgttcaagagaattctcaacagcagaaggcttgtcaatgactctgctattgtaggaagactctactaaacaggatatctgattgctactagggtctctattaggtgatgtagttctcttggactcgggatccaacacaatcttctgctgcaaaggcttcaacacaccaggtttgcttttttcagccaatgattgaatttcttccttgagaggtgctttctgaagactgttactagaggatacaggcccattagctgcctttgtaacaactgtagacgtagccaaagttccattctctgatgttgatctttgattatccaaagatccatttgacaaagctgaagttgctaaagagtgttgatttgttaaacgtgcccccctgtaatagcattttcaattttttttaaatgaccccataaaatagttcacatagacagcggcttgcagaaaaaaaacttaccatgatgctgcagcaggaagagcagttgatttacccgagctcccactaggtggggaactcttaggagcactaactgaagtctgcaccaattaaatgaagaaagaactaaacattaatccaatacagcattttcgtaaaacagaaagtcaaggaaaataataaattctaaaaaaacacatgttcacaatttggagctatagcagagctaagtttctatggaatgctgcacatcgacacaagtttatagtgagcacatccatgcatttacccatatatgactaactaaggtggtaaagccacatgagataagaatgtaaatgtgaagtttcgttgatacggatgacacaagccaaaaagcaccttatatcacggtaaattagaaaagcttatagagcttacactagaaggaacttttgcaattggatttccagtagaactgtcactggtataagcatccaatggtggaggtagcatgctccctgaacggtattgcatagtatttgttgctccagtgatttgctgaactctgcttattcaaagttactaaaagaattaactaaccgtctaaatacctgacttccattacactacatcttctccacatatttattcccactaataataatcacgagtacaagaggaaaacttaaaacaatatgataatgaagattaccttgtatgggctgatatgatctcatcttttgtaaaactatcctcttgagagccaacctcatgcaaatagaggcaatcctgattgttgcatgcctgggaatagaacaaacaatccatattccaataatatcagtagcaaatttcaactgaaaagaggaaagctgaaagaaaatttctgggggccagagagcagaacaagagtgcatatagggcataccacgtttctcaaccatgcatggcaatacttggttgtcccaaaacatgccctgcagatataaaagaaaaaaaaattgaagtcaatgaacagactgagtaatcagttttaaacaacagggtactcgagatgacttacttcagtgctttaccatccaagataaacccatgaacagactgaatacatcgaatggcctcttcctctttgccatatgtgatgtatctggagtaatatttggttataatcagaacaaaataataatacaaaacaaataacatataagaaatccattcatgctaaacgataaatttggttgattgacactagaaaacaaaactcacacactgcatgtgttgttaggaaactgttggatgagacctgttgctgttcgggacatcgaaacctttagaacctttccatactgaccaaaatattctttacgctggagaagctgaaaagaaaaaagaaaaattcccgtaaggccgtaactaagcagatcgtatgatataattacaggtttttcgaggaaaaaatgacgtacatcttcatctgctagattaaggggcaatccaacaatgtaaacaagatttctttgaaccactcggacacttgttagtggctttctcccatcagaagatttcggtttcgacttttgtatttttttgcgatccatgttgccttcagaggccagtctgagaacagaaaatagataagaaacatcagcaaactaaaactgacactgaacaaaagttcacatctcaggtgtcatatcatatctcaacctctcctgatcaacagtcatcccaacaatcttttctttgtcatatggagtgcggcaagctggacagcgcccttctgattgatctttctctgccatgtccattatatggtgccagcaccaaacacaaatctgtaagattgtaggtaaatacatatcagatcagaaaattatcagcagaacaaatgtcaatgatctctgaggccaccacaataagtataaattggtatgctctaagtatataccacaagccttcaaagtaaaccatagcacaactgaacctaatttttaatcctgatcacaaaaaacaatgaaaatcagagagagtgtctggacctgatagccacatttgcaaggcttcaattgctggtcagtcaaatccatctcctcagcacacaaagggcaagtcttttcaccgtaatcactcatttttttcctgaacaagacagagataaaaagactggaatcatgtctcatcataagacatacaagcaaaagcaaaccatactgacaaaactacctaaactttagtaattcagcaacattcgtgtatagtggcacagaataaaaagatcgacagttttactaataacagttcaaattgaacatcttcccgatcaaagaaactaatattatacactaatccaataaaattgagttagcaaatcttaaactaatccaaagtatcaaactttcagatcgaaatcgagaatctaacaagccaaagtccataatgaatccgtgcatgggacgcgacggttcaataagagacgcgtcaacgaaacagtacaatcgaaaaaaaaacatatcgacgacaatccaaaatctccatgagatttctacatacaatcggaatcagtaaacacgttgatctcaataactactccggaactaaaatcgaaacaccagaattagggttttgagattcggcgattcaaatcccaacatgaaagagtcaattacgagagaagtgaaaacatacggctgagtagagagattcgatcggagattgtggaagatgaagaagattgagagaagtgggagattgcaagagacaacaagtgagagagattggatggctgagattttggccgcttctagatccacgattgcctaataagaagaattaactatgcccttagattattagtttattacggatctgccactatctccggttcgattatttttggttggcgtcggttaaagactgatttaatttggtggtggttttatttcaacccaatgattatattttaatttttgttcttctacatatccgatattttcagaaatcatgtggaaataaatctaaaaatttagaaatttagttacaagttttataaaactaatcgtctaatacaatgaaatttcatcaaaataattatttttctataaattatgatgatctaagtaccggattaagaacaaattacaaataagaatactgtacacaacaaaactcaaacatgtgacttcagaaaatattttactcgtaaattaaaacataaacatacacgaatactatccttcatatatatctttgtatctaagagtaactcaatgttcaaaataaaatacagctaaaaaaagtaataagcaaaagaatatgggataaactattttaagctgaaaaagtaacaaagtgatagaacacactcatgcatcattagtttatgtaacaaagaagaactcattttaagttgttgcaatggagacttgcttcaaaacctttgaacagtccacaagtttcaagcttttaaacgttctacagatgaacaatggaataaacgactaggccattcttttcaaaagagtgttcataagggaaatatcatccacatgcatttggaagctctttataagctttcgattttgcccgtacctaatgattttcgtttgtccatctaggaagtactcgatttaaagtttagaactaatttaaacaatcattgttttgataaggttaagtatttgaaatcacttttagatgactttggaatagttttagaaggttataatccagtgaagtttaacgatgcatcgttattccttaacataaatagaactctaacttaaataaatttcataacaaaatcaatatttttaacgataatgttggaacataaattatatagcgcatacgattatttagaggaatttgtaaactaaatattaatatcttgttcgaactcgaaaatagcttacttttttttcttcataagtgttggctttgatatataacaacaaagtgttacaatagtggaaaactccacttacagaattcgataggctaatgagcattacgatattaaattatcaaacacatatagataatctcctttaattttcatctactcagaattgaacattttcataatctgcaagttctgctttatcttgtctgctttcattggaaatgaaatggtatatgttggtcggtaaaagacgaatcaaatttgtaaactaacaatgaactattgaaagagtaaatcttacagaaatctcaaaagaaaataagatactaaaaagggagaaactgaatctctcacttaatccccattcggggaacctttacacttaacacgcgatctgatggagccatgagtgcaatccaatcaatccaaaacttctgcaaggccctcttacacagatatcctaacgaaaagtaaccacaaagatccgcttctcaactccaaaaccaatttgcgcaaatagagattttgcctattttgctatctctttcttcttaaaacaaagccttcttaaaacaaaagtccaacaacaaaagtcaaaccgagcccaatatagtaacccatcgaggaagggataagaaagccatacaacacagagacatgtgtcgcctcatgaggaaatcacagacacgtgacgagaagaacgtgtttgtcgagaatgccaaccactgccggcatgttttctgagatcgaagaacgcctacccaccgaaagttcgttcactccgcaaaaccagaagcttcaagtagagcactgaagaccctctaaagaaattgcacatctagtcttcctcttccaaacgaaattaaactcagatttaacaaacgaacgaaactttctttcatatgaaggaaagcgtccaccattccaaagtagcatgaagcatcacaatgacgtaagcaaccaaaaagattttccggtgagacttaacgtcgccatgcccatcaagtgaaactactacaaaatttgaacgacaaggcttatgaagccgaaactcttaaacttccactttttcttcgtaatgaagaaacttaataagtttattagaaataaagacaaataaaggcaaaataccaaagaacggcgacgataaaaccggatttaccggtaactataactagaactcaccgtacggtattgaaacaaaaagttggaccatgtccgaacacaacctcacaaacatacgggaaggcatacgaaacaaagaattttttctttttctcaaaattttagagaaagaagagaataaaaaaattctgatcgaaaatagcttacttaaaaatcataattgaatagtatcttttgtttttaaactaatttagtctatataataataatattattaaccatcgtaaaccacacatgatattcaatacttataataaattaatcgcataaaatacaatacttaaaacgagtgttatataattttacgtaacgtaaaacaatacaaaattttaattcctgaacgaataaaacgagtatattaattaatttattgatcgtattaaaacgaatatgatccaattaagattacaattactaaaatccccacactattattgtcattatttaactatggcagatagatagatacagaaccgtaaaggacgttaggaagaggaagaacgttgacgaagtcaacaacgaacagaaaccgtcgatttgaggcggctctaatctcaaccacacgatcttctctgcctttccctcttctctcttcttcttcttcttcatcttcttcctcgcaattaccgcgaaaactcatctctgctcaatcctcaatctcagtctctctgttgactccgactgttatataaaaccatacaaataccttcagattcactacttcaaacctcaaagcaaccactgaatctcgactttgatcaattgagagagaaatgaacaccggcggtggccaatacacggattttccggcggtggaaactcacggaggacagttcataagttacgatatcttcggtagtttattcgagatcacatctaagtatcgtcctccgattataccaattggtcgtggagcttatggaatcgtttggtatgtttccttctctgagctttttcttaagttttattctttgagatcggagtttttaatttctggattttgattttgtgaagctctgtgttggatacggagacgaacgagctagtagcgatgaagaagatagctaatgcttttgataatcatatggatgctaagcgtacgcttcgtgagatcaagcttcttcgtcatcttgatcatgaaaacgttagtgtttttgttcgattttgtgaaatatctgtagaaattagtaaataaatcatgattagggttttttgatttggtattgcaacagattatagctataagagatgttgttccaccaccactaagaagacagttcagtgatgtttatatctctactgaattaatggatactgatcttcatcaaatcatcagatctaaccagagtttatcagaagaacactgtcaggtaaactaaaaactgttcttggcttttttctgggatttatatttgatagaagagacatgaaactgatacttgatttggtgtttttgttgtcatggaaacagtacttcttgtaccagctacttcgaggactgaagtatatccactcagctaacattattcatagggatttaaagccgagcaatcttctgttgaacgcgaattgcgatttaaagatttgtgatttcggtcttgctagacctacttcagagaatgattttatgactgagtatgttgttacgagatggtatagagcacctgagcttctgttgaactcttcagattacacagctgctattgatgtttggtctgttggttgtatctttatggagcttatgaatagaaagcctttgttccctggtaaagaccatgttcatcaaatgcgcttattgacagaggtaaaatattttagagagttatgtaattttagcatggtttaaagattctgccttttcacggaatatgtgatgaatttgtttgaatcttgcagttgcttggcacaccgacagaatctgatctcggttttactcacaatgaggatgcgaaaagatacatccggcaacttcccaacttcccacgtcagcccttagctaaacttttctctcatgttaacccaatggccattgatcttgttgacagaatgttgacgtttgaccccaacagaagaatcactggtaagtttcatacatgttctctgttggtttttcttaccatcactatgttttgattaaaaactgaaaataccatcttgtgcagttgaacaagctctgaatcaccagtaccttgctaaattgcacgacccgaatgatgagccaatctgtcaaaagccattctcttttgagttcgaacaacagcctctggatgaggaacagataaaagagatgatctaccaagaagccatagcactcaatccaacatacggttagaagtgcagcagccccgtgaatgcctggtattacccaataaccatccgaatggctacttagtatctttgcctgttcttttattcatgtacttcttccacatatgtaatcttgtaacttttatttgtttgttcatgttatttactgctagtgattaagtgtagctccaatgtaaagtactccagttattaaagaatatctatagacttttttacttcacatactcttgagtcttccctagtaaacaaagagaagagagaatataattttgtaatgtacagagcctcaatatttgtgggagacattatagagctagagccagagtcaatgctgtcgccgtgagttgtctattctcattcaatgactttcaatagattttagtgggattggctttaggtagcttgcattattgaagtagaaatggtcaattccttagcaataattaggcacaaatgtgtctttctttagtaatattgtaatatcctttgtctgacaatttagagttgacttctaaaacgttgggttggaaataatgttgtcttcacacaggctgttacgaagcagacagtgatggctcaacttgcatcaacggaaacctttgagtttttgttttactttcttaatgtttctttatttgaagctgctgcgcatggagaataaaatatcgtggacccgagaaagtcatcattgctgtattattacttatactgtatatatgtttcagaatttcaggccattgttgacaaaaatagtgaaagatttctgcttgattttgagacatggctagttcagttactggcgatgcagaaacagcgatatcagcagattcaagcaccaaacgccgtggtggaggttggattacctttccgtttatgataggtgagagattctgtttctctgtttttatatttctcataacttcataaccattagagcttggaagaagaagttgaatttatcttatctttctatggtgcagctacgttgttaggcttgacaatagctgcgtggggttggttacttaacttgatcgtctacctgatcgaggaattcaacgtgaagagcattgcagcggctcagattgctaatattgttagtggttgtatctgtatggttccagctgttgcagccattgcatctgactctttctttggaaccattcctgttatctcagtttcagctttcatttctcttatggtaaagttaataaagagtccttgacatttgtttttatcagtttctctctgaaacagaaattcactaattctactcttgaccagggtgtagctctactgactctaactgcttcacttgacactttaagacctagaccctgcgaaacagcttcaatactatgccagtctccttcgaaaacccagctcggagtcctttacacggccataactctagcctctataggaacaggtgggacacggttcacattagcaactgctggtgcgaaccagtatgaaaaaactaaagaccaaggaagctttttcaactggtttttcttcacaacatatctagccggagctataagtgcaaccgccattgtctacaccgaagacaatatcagctggacccttgggtttggtctgtctgtagccgctaatttcttcagttttttggttttcgtctcggggaaaagattctacaagcatgacaagcctttgggaagtcccttcacaagtctactatgcgtcattttcgcagcattacgcaaaagaaaagctgtggtttccaccaacgaaaaagactaccacaatgaatcaatcacaatgcccacaaagagtttcaggtagaaaaaccggctcgaaaaccgcagtttcattcttgcactgagaggccgttctaatgagttttcaaatacgcaggttctttaaccgtgcagcattgaaacaggaagacgaggtaaaaccagatggcacaattcgcaatccatggagactatgcagcgttcaacaagtggaagatttcaaagcagtcataagaatcatccctctcgccttagccacaatattcttgagcactccaatcgcaatgcaactaagcttaacagttcttcaaggtctggtgatggaccggaggcttggtcctagcttcaaaatccctgcaggctctctccaagtcataacacttctctccacttgcctatttatcatagtcaacgatagggttctctatccattttaccaaaagttaacgggaaagcacctcacaccgctccaacgagttgggataggccatgcgttcaacattctaagcatggctgtgactgccatagttgaagcaaagcgattaaagatagtacagaagggtcattttctcggatcatcatctgttgctgacatgtcagtcttatggctcttccctcctctagtcatagtaggaatcggtaaggatttgattccggataataattcattctacgagttcagatcaatccgaccatgttcttgttttttggttgcaggagaggccttccatttcccagggaatgtagctctgtgctatcaagagtttccagagtctatgagaagcaccgcaacatcgataacctcggtggtgattgggatatgtttctacacaagcactgctttgatagatctgattcaaaggaccacggcgtggttaccagatgacataaaccatggaagagttgacaatgtttactggattttagtcataggaggagtcttgaatcttggctattttcttgtgtgttcttggctatacagatacagaaacctcaaggatgatgatcataagcaagctgcaaatgtctctcactgatctttaagctggagaaagaaagaacatgtcctttgttgttatcatttgcatttctttacagagagctttgtctgaaagtatctccaatttgtagccattgaaaaacagtttttcatatgtagaattgatttggaaatttgtggtaatataatcgttttgtttctgtgattcctgagtacaaaccagtaacacaattgatgttgagcttgtgatgcttctgtagtgcctaagataacaatcttgtgattctcgggctgctttttgatgttttctgtctttgacagagacactcatgacattagtgaatatttttgcaggagttatgattaaggaagatggtgaatctgaatatgcggaagacaaccattttaaaaaggaacaggtgacaaagaatgtgatggagaatctagaaaagttgattactacttataggatgacaaagcattattcttcttaagatgaatggggatatggtgaatcttggatgaacaataatgcatcggtagcatcaaagcttgtcccggtgagtagtctattatcattcaataacttgttgattgttttgtgggctacttgcattgttaatgtaattccttagtactaaaagacaaattggtctttctcaagctagttattcctctacatgacatgttaagttgacttattgaatgttattagcttgaccgaggttttgctttcacacatgctgttatattataataagctgacagtgatagtttaactcccagcaacgaccacagtgagttttttagtttttcttgtgagactagaggctgctgcacatggagaataaaaatattgtgatcatcagtttgaatcattctcgttgttgtttcattggcttatttatatatatgcttttttttctggcaattgttgaaaacttagtggaacatcacttgttgttctttagaaatatgtctggttcagtttcccgcgatgcagaagctctgaagtcagcagattctagcaccagacgctctggcggcaggatcaccttcccgtttatgataggtaatgtagtttttatgttttcattgttgcataactatataaagccacagaagaagaagagagttcatgtatattgaagctagtttctttgtcgcagtaacgttgttcggcctaacattagctacgttgggatggttacagaacttgattgtctacctgatcgaagagtacaacatgaagagcatcgcagctgcgaagattctcaacattttcagtggttttacctttatgttccctgccattggagccattgcagcggattctttcttcggaacaattcctgttatcttggtttcatcattcatttctctagtggtaaagttgatttgactcactctcatttgttttcatcaattcctctcttcgaaattctcaaacagaactcaccaattctactccttgctcagggcgtagttctgctggctctaaccactttgtttgactctttaagaccccaagcctgcgaaacagcatcaaagttatgtcaagcccctacgaacatccagctcggtgtcctttacacagcaataactctaggctgtgtgggagcaggtgggctacggtttaccttggccaccgctggtgcgaaccagtacgaaaaaactaaagaccaaggcagctttttcaactggtttttcttcacatggtatttagctgcctctataagtgcaacagccattgtctacgccgaagaaaacattagctggagtttcgggtttggtctgtgtgtagctgctaatctgttaggcttgatagttttcatctcggggaaaaaattctacaagcatgacaagcctttgggaagtcccttcacaagtttacttcgtgtcatcttcgctgccatacgtaaaagaaaagctgtggtttccaccaacgagaaagactaccacagtgaatcaaagaaaacgcccacaaagagtttcaggtaaaaccacctcaaaaaccgccatttcagtctgatttttacaagaaagggactcgttgaggccatctaacgaatcctcgtgtatgcaggttctttaaccgcgcagcattgaaacaggatgatgaggttaattcagacggcacaattcacaatcaatggagactatgcagcgttcaacaagtagaagatttcaaagcagtcataagaatcatccctcttgtgttagctatattattcttgagcactccaatcgcgatgcagctaggattaacagtacttcagggtctggtgatggaccggagacttggccctcacttcaagatccctgcaggctctctccaagtcataacacttctctccacttgcctatttatcatagtcaacgatcggtttctctacccattttaccaaaaactaaccgggaagttccccacaccgattcaaagggtgggaataggccacgttttcaacattctaagcatggctgtgactgccatagttgaagcaaagcgattgaagatagtacagaaaggtcattttctcggatcatcatctgttgctgacatgtcagtcttgtggttattccctcctctagtcatagtaggaatcggtaaggaattggatccagatcattttattcgactcagaagtgagttccatctatttatgttcttggttttgtcttttggttgcaggagaggccttccatttcccagggaatgtagctctgtgctatcaagagtttccagagtctatgcgaagtactgcgacatcaataacctcggtgttgattgggatatgtttctacacaagcactgctttgatcgacctgattcaaaagaccactgcatggttaccagatgatattaaccatggaagagttgacaatgtttactggattttagtcataggaggagtcttgaatcttggctatttccttgtgtgttcttggttttataaatacagaaacctcgagaatgctgatcatgaacaagatgcaaatgtctctcactaaggtggagatggaagatgtaatttgttgttagcatttgcagttctgtaaagcgggagctttgtctgaaagtatctcgaatttgtaggcattgaaaacctttttttaactgttgttgtagaatgaatttcgaaatctgtggtaatataatcgatgtgtttttgtgattccgaagagaaaccagtatggtcaagcaaagcgaaactcaaggtttcttggtattgaagttactgtagttagtttgtttcggttaagcatgacagccttgtccattgctttcatagcaaacaactgatccgttccaacgagttccatccactaataaaacacaaatacaacatttcttagtttgatgacttgagaagtgtagaattagatattgagctgacttgattttattgattcacaaattatgatatttatacacaatgatctctatcaaaaaataaacataaatccttaaaatataggttataaactctatcaccaaagatattttactaatcctaatcggattacacatatccccaataagaagttggaggaaacaaacacattactctcgctcgctcactcactctgcagacaagtctaattgtatgtctccgttgttgttcatagcttttcttgtttattttgatctttcgtgctaacgaaatctggctttctttcaagtacgatgactttgataacaatgtgattggtctatttatggattgccatgactatttatttatatttatctgtaaaagtttaagagaaaaatatctgccaattcataattcattaaagaaataagaaaaacaaataagtattgttcggaaactaaccattacatttttttaactcttaagtactacaagacgaacaaggaaaactgttacactgatccgttatttaacgactctatctataactattttaaagtaaattactaatgaaactgaatctaactaagattttctgatgaaaaaaaagaaggaaattttgaccaaagtcaaaccaagcttataaaaaggaaatttttgttctcatcgctatcagaaaacttttacagagaaaagcgagagaaagaagaagaatggagattgattctgagatttctgattcatcgtcaagcaacaactcgatgatccctcctcttcctcaaaaccctattttgactgtgaaactctctccgatcattctccatgtacgacgttgctcgaagaacattaaaaagaagaaacgtacacggacgcctttgaagaagaagaagaagagtattagtagcagtgtcgaatctataatcggagtctcattcaaatccgcctctcagaaacattccaccaccgtaactcgcgacggaggagttaaaaagatttcctcttgggtgaaatctaggttacttggagaaggggcttacggttgtgtttacctagcgacaagtaaagatgacatatacaaaacagagagagcgatcaaaagtgctgatgttttaaaggcttggagtcttatgcacgaaggaaggatcttaagaagtttgcaatctccgttcgtgattcgttgttacggccatgaaattgcacgagaagggactggtcatcaatataatttgattctcgagtactgctctggacagtgtcttgcggatatgatcgaagataatcaaggagggataccggagtttgatgtcaagcagttcgctatagatgttctgtctggtctcagttacattcaccgcagaaacattattcattgtgaaattaaaccggacaatctcttactcagccctgttgatcaccggtttaggtctaatgggtttttgacaaagattgcagatttcggtttatcaatggagaaaggttctaaagagtatggaaacggacgtgggcacatgagagggacaactaggtacatggctccggagttaataggcggtgggcttctggattttgctgttgacatttgcgcgtttggatgttctgttttggagatgctaaccgggaaaagggtttggggagaatatggtgatttggctcatgatgattgggttgatttgatcggtcacagtgatctcactcctcaaatctcgattcggttatctgcagaagctcaagactttctgatgaggtgtttggttaaggagcctggttcgaggtggaccatcggtgaactcgtggaccatccgtttctctgttcagatgaagagttttctcacaatggatttgtttatgattgagtttgtttatgattgagttctgtttcgtagtattggtaactgcaagtattttgtagtatttggtaaagtattataattgttgttaatggattcatgttgagttctctgtttcattattagtttgcagttgcaaagtagagtagtcactgtatcaattcaccgaaaaccgagtctccctattcaccaagatccttcctttaccaaaagatagattttttgcagtgatcttgcatattttgtgtctgtacatagctggaatcttggaatggagattgctagctccttctgacccggccatagtaggcgatactttattccctcgtcaagcaatatagctgaagaaacctataaaagaaaagactgaaaccatcacaaaagaaaaagagctcgagaaaccaatttagacatgaaaagctctcagatttggccagccatacatactgaaaacgtcaagaacaatcacagagcagatcgcttgacgcaatgtgaatgaatcaaatgagcatttcttacaaagtaacactataactactaaaaccacacacaaaagatgcagcagaaacagtgtttatgtgaataattagtccacaaagttctacttttctcaaacacaaacagaacaagaacacttaaaagattcaaagagacatggatctaatctactctatcataatcattctggtttgtacccaattcaagccttaagtctatcaaccagaatcaaaattttcactatataaaagacaaaactttatcaaatcaatgttcatatctaccttaaggaaagccaagattttgatgacagtttcaccaactaacttgttgttaagaatatctcaatacatcaacaccacagtctctacgtacacatcgcactcacttatctccaccatttttagaatgagagactccattctctcttcaagagcatttttagggtaaaaagtgcgagaaaaccaaaactcttggactaaaagaacatttccagaggttttgtcatgaatggtgttgttttccaaaataaaacctttattttatttttatttttatttcttaaaacttagattttatttccaaactaattgtatttattattattatagtcttcactgttgattataactaattaagatcataaaagtcttataaaactataaagcatatgttaaaacatattacagacaatattaatttatagaacgttatattagaatatgtcataaaatgtataaaataaaaacacaaaaaaatcattacttataaataaataaccaaattctattacaatgcttctatatatgatcaaccaatgcatttctaagtgatagatatgagtctctttatattaaaattttggattttcttcattttaaagtgtttagttaagtttatatatgaaaactatatttatatttatgagatatattattattcggactactatgacaggaaaaagaattagtaaagtgatttatgcaatatatatataactgttagaactaaagtgatttggagtaaagtgatttggagacttttggtcgacgtaatccaaagaaccaccgcgtggttaccaaatgacataaaccatggaagagttgacaatgtttactgggttttagtcataggaggagtcttgaaccttggctacttccttgtctgttcttggttttacaaacctcaaggatgatgaatgatgatcatgaacaagaagctgcggtatctcactcatcatcttaaaagtaaactgtcctttgttatcgtttgaagtcttgagctttctcatgatcctaacgagcatattctaacctcaaagtattattcactctctagtcattgaaagctagtatttttcagttttttgaaactgtttctttcttgttctttccttttatatatcttacacaaatgacacatatatattgtataaatgatcaaacttctattcaatagataaagtcttctgaaattcgtaacaatctcactcgtaaacaccaaatcaaatcgtattttaatttaccttgtccaagaattcaatccatctctgacaaatttggttttggccaaatcatcaaaatccgtaattaaatttagattatgacaatttaaatgaagattccttaaaactttgtagtattctatgtttttctgatgattagtgcgtgctgctgttgaagatccggccaaatcatttattacattcgccaacttaaagttgacaaacgacaacagaggataagttttctttattcggttatatattgtacataaattggataagttaacatatcattacaccaacagtcataaaagcaagggggttgcatgagttggtgttttcattacatgtagattatgactcatgcaatccacaaaacgttagtggagactagggtccatttgatctctccctctctcgttaatcatgagagctagtactgtaccatttgatgaagaaggtgcaacctccaatattagattttgtgtcaacggtcttcttcctgtttaaatcatgggattgttgaatctattcttttaaaggtatattatcattactctgaatatcttaatatagaaagaaaaaaaaagaatatcttaatatagaagaattttctataaacggaaattttcatgtacgtttgtcttgaaaatattgtcatgaatatgtagttaatgaacgactacataatgactaatatcaaatagaatttgtcgattattcgttttagtttaagacgaattaaccactaatttgaattgctatttgacatattatatttatatttttttattaaattaaaataagaaataattctttaaaaatatattaaactcaaaattaaaatactaaattaagaaaaaaatgtctacaaattaaaaacccacacaagtgacagtaactcctgatccgtcttgttctctgtcatggctagtttagaggtctggtgattttgcaaacgtggtggctagatcattttttgcggccaagatgattattgtttatatttttgaacacaaaacacagacactgagacaaatgttgattattttgggtgttatatatgtttggtgcaactaccttgttaggtctttcagaatcataactttttttctctccatattttatttgaaaaaagtgatgtactattttacaaaatttcttcaaactaaatccttcagaagctaaactcatatgtcatgaaacaaattacaaattttgtttgatagactttaaaatcaccgagataagtttgtatgaggtaccgtaagttcttttgtgagttgacttatcgagagtggtttatgagaccatctaaagcgctactgttctggctacagtaagtaatatatacaacattggcgttggtaaaattagcaaagatcattaacttctaaaggtcatcatatgatcagaggctacggaatctaaagtccatttgctaatcttttttttttttgttaaacaacaagaaatatggagattctcacatagaaagttgtggtgacttgactaacaagataaaagaaacaaggtttcatggggttgctgttttcattgattgatcatgcagtccactaaatcttagtggagactccattttatctctacctttctcgttaatcaaaccaaccactctaccatctggtgaagaaggtgacccaccattagagagcttgtgagttgtgaccgttaagcatagtagctcccattgaaccacctgtaaattcagaagaagaagtgtcgttgttagttgttacttattcgctggaagaagataaaataggtttgttgtatacacgtatggtgtttagacctcctcttcatagttcgtatcataattttggaagcttttttacgtatcttgttattcatccatatagaggaagatatgatgagcctcaaaaaaatccctaatagcaaaagtaaaaccaaaagtaaaaccaagtgtcgttagctcaattggtaaagatcctaggcgaagtttaaaggttgtcggttcgactgacgcttgggacgaaactaatattacatgctgtggtttcggttctggaggattacgggcttcagtccagaacttcatgatattcaaaaaaaaaaaaaaaaagtaaaaacaaaaataaaataaaatttcacagtaactaataagcttcttctctctgatcaatgaaatagaatgcgtaaagacaaattttgatcataagatatgaatgtatagtgggcaaagtatactctctggccactattgatgaattagtggatactaaggaaaagtggtaggtctggcaaaatccttttctacatgtttattattacattcaccacgtgatttgggaacacgacaatagttgatgagatatcagaattcggttaggtaatattatataattggactaaacaagatcattagcaaatcattgcacaacataactactctgtacttgcttatatatacctatttagtgttatttatttctaactgcatcataacacataaaacacagtggacgtaactcctctgtttcctctgttctctgtcatggctagtttagtctctggtgataaagaagctcaaatctctggcgatccaggcagcaagcgcggtggatggatcactttcccgttcatgctcggttagctagtgttttttattgttttggttttatgttttcgaaaccaaaacgttgacaaatgttgggttctatgtcgtgcagctactttgttaggcctttccgtgacttctttcggatgggtaatgaatttgatcgtcttcctaatcgaagagttcaacatcaagagcatcgctgctgctcagatttcaaatgttgccaatggatgtctcagcatgttgcctgttgttgcagccattctagctgattctttctttggaaacattccggtcatcgcggcctcttctttcatttctctgcttgtaagtccaagactctttctgttgcatcaattctcttttgtggtctgataagctcaccagtatatgaaaacgtttgtttagggaatcgttctcttgacgcttattgcatctttggactacttgagacctcggccgtgtgaagcagggtcagtcctatgcacaccgccgtcaaaactccacctcgggatcttgtacacagccttagctttagtgaccactggagcaggtgggacacggttcaccatggcatccgcgggtgcaaaccaatatgagaaacctaaagaacaaggaagcttcttcaactggtacttcctcacactatacgctggagctattactggtgcaacagcaattgtatatatacaagacaatgctagctggaaactagggtttggtctctgcgcggctgctaatttgatcagtttcatagtttttgtctctgggaagagatactacaagcatgacaaaccaatgggaagtcccttcacgagtctaatccgcgttgtagtctctgctacagtaaaaaggaaggctgtaatatcatgcaacgaagaagactatcatcactatggtctcgaaaaggaggtcaagacttctgctgcaatgccatccaagagcttcaggtgaaaaaatcaaaacaaaagcttacttgattcttgacacttgcacatagcgcttaaataccttttcatgtgcaggttcttgaaccgcgccgctttgatgaccaaagatgatttaaatcagaaagaaggatcagttaacaacatctggaggctatgctctgtacaagaagtagaagatttcaaagccattctccgagtttttcctctatggttatcaatcatcttcgtgagtactcctatggtgatgcaaacaagcttgattgtactccaagctctagtcacggaccgcggacttggtcctaatttcaaagtcccggccggttccctccaagtaataataatcatcactgcatgcattgttatcatcatgaacaactggcttgtctttccaatgtacaagaagctaactcataagttgctgacaccgcttcaaaaagtcggtataggccaggttctcaccattctaagcatggcactctccgcggtggtagaagcaaagaggctgaaaacagttgaaaatggtcatcccatgtcagtgttatggttgtttcctccccttgtgatagtaggtataggcgaagccttccagtttccggccaatattgaattattttatggcgaattccccgagtctctgaggaacaccgcgacttcattgacctcggtggtgattggaatctctttctatttgagcacagctctcattgatcttatccagaggaccacagcgtggttaccaaatgacattaaccacggaagagtggacaatgtttactggcttttagtcattggaggaatcttgaatttcggctacttccttgtgtgttcttgggtctacaaatatagaaacctcaaggataatgatcaagaacaagatccaaaagatggtacaatgtaaagacacaacatgtttctattctagttctctttacattaattctctcctgttagcttttgtgttttcgtatgttttaccacttcacatatggaactacatttagaaaataatactttcaaactgatgcaagagagacatcatctgattcttatcaaagttctaagtaagaattgaccttatcttaccctttccctcttatgcattttacggggtgtattgaaagtggaattttaagatatttgtgtacaatttataaatcttatgttatttaaacatggattttaaaaaatctcatgaaattcagtgttattgaactaatgatttcaaaatccatcttaaaatccacagttattgaaaacgatttgtagatttaagttttaatgattttggagaatttgagaggatttgagatgatttgaatagattttacaaaaatcatatgaacttctctaaaatcatcaaaattatttaaagtctttttaaaaaagtataaaatgtgtaaaatatggttatttttagtttttttttttgttttaccacaaaaaaacaatcatttatatatttggtggaagttaactcttgctttctcggtgaattgatatttctttcaatttagatggaactgaaactattttactctattagatctttatgaaagatatgtttttgatatcttaccgaattaaaaaaaaaaaagtctatcattttctgaaagcagtagtgtaaaattcagtggtgtcatgaatcccaaacttaaatcaccatatagacttttttttgtgtggttagtaataagtggtaaaagcttattaaatgttctagccggtaggtgtggatcatatctaagatttcattattttcatattcagattgagacctccaagatatcttaattaatattttgggtttaataatcataactattatgtttgaaatcggaatacagtatctaaatgttgtagtcaagatttgatcttaatttccttaatttactaaaaattttgatttttacacttctgtatctggacccgtctaacaagaaagaaaaacatcaccatcactatctattgatcgaagaaaaacacgatcgatgtctagatcggagagaaaagcatcatcatcaaactgtatttctaaaaaaaatgtgcaatcaacatcaaaatgtatatcttaacaaatgcgccattaataatacataatgatgaagtaagtatatttcttctaaacgatcaatatgacttacgttatcatcatatgttgttgatggtgcatttgtttcagataaacattttgctgttgatgactcatttgttcagaagtatagtttgatgatggtgcttctctttcagatcaagacattgatcttgtttttctttgattaataaatactgacgatgatgcttttctttcatatcgttttttttagactgaggttaaaaacaaaagtataaaaaaatcaaaacttgttagtaaattaagaaaattaagatcaaatcttgattgtaacatttagatattgcatgccgatttcaaacataatatttatgattaataagcccaaaattaagatattttggaggtctgaatctgaatattagtaataaaatcttagatatgatgcatctataccggctagcttctaccacttattactaaccaaataaagttttaacttttaagtattatggtgatatgaattttgaagaaaattttgacaaaacaattcgtagtacctaactgagttttaaattactgctatcaaaaaatgataaaactattttttataaattcagtaccatatgaaaaacatatatttagataagatataatagatcaaaatagtttcagttcaatcacacttgtaagtccaagactcactgattctctcatgtactacacaaagcttaccagttcttaaacgtttgcaatgcatccttcgctggactctggttgcatcattggactacttgagacctcaaccgtgtgaaacgggctcaatcgtatgccagccgctatcaaaattacagcccgggatcttatatgcagccttagctctaataacaattggatcaagtgggttgcaattcaccttggcatccgtgggtgattataaattatatgaatattagtcaatgattaaattatatttggaaattttgacccatttgtgtagactgtgtgagaattatgtcatatttgactaatctttaataataagaagttagtcaaatatgtaatcaaatatagtatagctacaaattattgttttatattttgactacatattattttaaaaaaatatatgagtcaaattttgcaatgaatacatagatcatttttcaggaaagaaatttatttattcttaatgttgaaatatgtttttgtgaaagctagtaatttcgatctttatatatatttaggataaaagtttgactcttatacctttattaccataccaatataataagtagcttaaattttcaattatgagctaaatctcagtcaaatatctgatataatttcttagtcaatttgtaatagtcaaatttctaaacataagtgttataaatattgaccaatttacatgcaatttaatatttactacatgaaatcttagtatagtagtcctctgggaagaagtcatttctgaagcactttgatgcgtttctactttctatcgagactaactgtagggtttataaaaaaaaaaatacatatatatttagaaaataatgcaaagaatgagtatctatctatgaggtaactgcatgctagcgtggtcgcttatgttacacccctaatgaacgatttcgaatcgttggatctttatatctgctagatgattttagttttattagtgtgtcgtttctaaattatgttaatgatctaaacactattaatgtgttgtttctaaattaaatttgagttttaattattattttatgcttatccttaaatgatttttaacataattaaattcaatttaaatgaattttatacacattaaatagttggacacatgttaataagttaatcttttatttgctctcacataataagatgtcaaatccttaaagaactcccttcatcttttatataatgggcagatttggacagatttctcagttatggaactttaattgtgtaattaagagagatccttgtttaataaatgagagtgccaagtagttcaaaaaggtaagagaaaaactaaacttttaaacatataattataacaacatttagtgtaaatcttaataacaagtttaccaaacaagatcattaacaaatcattgcacaacataattattccgtacttgcttatatttagtgttcctctgcttcatctgttctctgtcatggctcgttcagtcgacacagaagcaatgaccactcgcgatccaagcagcaagcgcggtggctggaaaacgtttccattcatgatcggttagtgtattttatgactgttttggtttatgtttttgagcacacaacatagacaactgatagtgattattgtaaggctctatatggtgcagctacattgttaggactttccatagcttcattcggatgggtgatgaacttggtcgtcttcctaattaaagaattcaacatcaagagcatcgctgctacgcagaattctaatattgttaatggatgtgtgagcatgttgcctgttgttgcagccattctagctgattcttttttcggaaacattcccgtcatctccgtctctgccttcatttctttgcttgtaagtctgagacttaaatattctattgtcttgtgtgactcacaaagcttactagttgttaaacgtttccagggcatcattctattgaccatgattacatctttggaccacttgagacctccaccgtgtgaaacagggtcaattctatgcgaatcgccatcaaaactccagctcgggatcttgtatatagccttagctctagtgatcattggatcagctggtacgcggtttaccttagcatccgcgggtgcaaaccaatatgagaaacctaaagaacaaggaagctttttcaactggtacttcctcacactctacactggagctattactggtgcaacagcaattgtatatacacaggaaaatgctagctggaaacttgggttcggtctttgcgccgtcgctaatttgatcagtttcatagttttcgtctctggcaagagatactacaagcatgacaaaccaatgggaagtcccttcacaaatctgatccgcgttgtagtcgctgctacaagaaaaaggaaagctgtgatttcatctagagaagaagactatcaccatgggcttggaagagaaggcaagacatcttctgcaatgccctccaagagctttaggtgaaaaaacaaaaaaaacttgcttcattcatcaaacttaaaacagaacttaaaagagcttttacatgtgcaggttctttaaccgtgcagcattgaaaaccgaagatgactcagttaataacaactggaggctatgttctgttcaagaagtagaagattttaaagccgttttccgagttctccctctgttactagccatcatcttcgttagtactcccatggtgacgcaaacaagcttgattatattacaagctctagtcacagaccgcggtctcgggcctcacttcaaaatcccggccgggtccctccaagtcatagtaatcatcactgcatgtattgttatcttaatgaacaattgccttgtctatcccatgtaccagaagctagcccataagccattgacaccgcttcaaaaagtcggtataggccacgttttcatcattttaagcatggcgatatccgccattgtggaagcaaagaggctgaaaacagttactaatggccattccatgtcagtgctatggctggttcctccccttgtgatagtaggaataggagaaacgttccaatttccggcgaatattgaattattctatagagaattccccgagtctctgagtagcaccgcgacttcattgcctcagtggtgattggaatatctttctacctgagcacagctctgatcactctgatccagaagaccaccaagtggttaccaaatgatattaaccatggaagagttgacaatgtttactggcttttagtcattgtaggagtcttgaactatttccttgtctgcgcttggttttacagatatagaaacctgaatgatgatgatgatcaggaacaagatccaaaagacgatacaacctaagacacaacgtgttctgttcttgtggtttttgttgttttgatcatcttgaaagacccttttttatgacaataatcagacaacaaaaactctttcaacaactacataaccactctcactatcttgcttaattctaacagagtttgaaatgtgagaaacgtggtttggtttttttttttgttggagaaaaaggaaatcatttctgtatttcctgattcataattaataattttaaggtcttatcatacaaaagtgactcaatgattggtcgagagtatattaaattttaataaaatttatttaaagttcttgaatctttgtctatttatacttttcttatgcttgtggagtggtttactgctactgaagataaggcaagatatgggcgattgctttttagttgtttattacattcaccaacctgatattggcaaacgacactaggagatgaactgtcagaatctgatatgaaatttttgccaccaaaaaagatcactaccaacatataataattgatatggatttgcttatatatataggttacggttgttatctaaactgcattataacactcaaacacaagtcaaagtacctcctgcttccacttgttctctgccatggctaattcagactctggtgacaaagaagcgcatcgctctagcaagcatggtggctggatcactttaccgttcatgctcggtttgtgtttttgactcttttgtttatgtgaactcaaaacataaacagatgttgatgattgtaaagtttttatgtggtgcagttacattgttaggcatgtcgataacttattttggatgggtaatgaacttgatcgtcttcttgatcgaggaattcaacatcaagagcatcgcagctgttcagatttcaaatattgtcaatggagttgtcaacatgttgcctgttgtcgcagccatcctagccgattccttttttgggaacattcctgtcatctcagcctccgctttcatttctctaactgtaagttttaacactcaccaattcttttatgtgttatgagtgttttaaaaacggtatcggcagttactaggcaaccgttttgaccgcctaaaattacacagacctagtttaaggcgctcagacaatgcctaaacaactgtttcgaccgcctaaaatgtatatacgcctagttttagtgcattttctaattttcaagtaggttttatctctatatacatagttacaatcgttcatatattgttttgatgtacattaaagaaatgttttgtctatactttgtttacgatattctatttttatttttctaatatgtattttatataatgttttaagtataagctcatatttctaatgttttatgtaataaatgtctaaactggctaaactgcctaaggttatccgactaagcgttttaggtgctagacactaggtcaccgcatgcctaatgctttcttaaacaacttctgatataaaagcttacctgttttgaaacatttttcagggaatatcgctcttgactcttattgcatctttggactatttgagacctagaccgtgtgaaacgggatcaattttatgccaatcaccatcaaaactacaacttgggatcttgtatgcagccttagctctagtgatcactggaacagctgggacgcggttcatcttggcatccgcaggtgcaaaccaatataagaaacctaaagaacaaggaaggttcttcaactggtactttttcacactatatggtggagcgattactggcacgacagcaattgtatatgcacaggacaatgctagctggaagcttggattcggtctctgcgtcgctgctaacttgatcagtttcatcattttcgtcgctgggaagagactctacgagcatgaccaacctttgggaagtccttatacaagtctagttcgcgttttagtcgctgctacaatgaaacgaaaggctgtgatttcatacaaagacgaagactatcatcaccgcgagctcgaaaaagagaccaagacttatgttgcaatgccctccaagagcttcaggtgaaaacaaaaagctttcctgattcatggaacttaaaaagagagctaataaagagggatttttattatgcaggttcttgaaccgtgcagcattgaagacagaaggagactcaaataataacatgtggaggctatgctctgttcaggaagtagaagatttcaaagccgttctccgacttgtccctctctggacatctgtcatgttcctcagcgctcccctagcggtgcaaatgagcatgactgtcctccaagctatggtcatggaccgtaaacttggcccacacttcaaagtctctgctgggtctatgcaagtcatagcactcgtctctggatgcgtctttatcatacttaacaactggactacctatcccatgtatcagaagctaatccgcaaaccgctgacaccgctacaaaaagtcgggatcggccacgttttgacaatcttaagcatggcgatatcagccgttgttgaagcaaagaggctgaaaacagttgaaaatagccatctcatgtcagtgctatggctggttcctgctctcgtgattaatggaataggtgaggcctttcattttccagcaaatattgcaatattctatggagaattccctgagtctctaaggaacacagcgacttcattgacctcggtggtgatgggaatctctttctatctgagcacagctcttatcgatgtgatccagaggaccaccaagtggttaccaaatgacataaaccacggaagggttgacaatgtttacttggtattagtcattataggagtctctaatttcggctacttccttgtctgctcttggttttacaaatacagaaacctcaagaatgatgatcatgaacaagatcttaaagatgttacaaactaggacactaacgtgttctgtcctcgttttctctatattgtagttgtgtcttcatgcaactaacttatgtgctacatgcaaactcactgtttgccgtttgtgtttacttttaccaataaatgttatttgtatcaaactcatacctcaaattattagtatcctagctccaatggaccgattagagctcatgagctgttagctagcttttttaaggattcttcacctcctttatattaaccaaaaaaaacatgcaatgtcaattcctacttaaattacataataaactaaagctataattataatccaaaccgatatataatctcgtttaattacaaaatctaaaccctaattcttctttgtaaacccaaaccgccatttaaactcatctaatcgtaaaaaaactaaatcctaatcgtaatttctaaacctaaaccgacatttaacctcgtttaattgtaaaatctaaatctgtttataaacctaaaccaatatttaacccgtttaatcataaaactaaaccctaatcgtactttctaaacccaaaccttttgaaataaactcaaaccgacatttaacctcgtttaaccctaggggtgaacccaagtatttttcatcattaatcaacataactaaaagggccaagagataattagtattgtacttaatcttaatcatctaacatagatattccacattggttgtgtgaacaaaatctaacaacatatatacaccaacatacggcaaatggtttgtcccgtcgaggacatctgataagattggaacgatacaaagaagatctgcaaggatcacactcacaaatcaagaaatggtccaaattgttttgctcttttttgtttctagaaaaagaaagtgtgtcatttacaatcttgaaagattcaagcaaaatcaattaatacaaacgatggtttggagaaaacttaacaccataaatcactttgaattttgtatgtcttataagaaagatgtaagatttggcttgagaatatataaacaatataattagagatatcttgggaagcaaggcgtttatcttgcgaaccaaatatagggtactatgaaatgaagcccgtgaaacccgagagaagaaaatcttaatatatgacagcgttggtagcatggtctcgtgatttgttgtttgacatgaatatttggcttcagaagatttgacttttgggaacgaaaacagagtttcaaacgtgagaatggtgcttagattttttttaaaacattttttgggcaataagaaaaatatttatgcatctgctgatacaaacgattttgacacaatattcgatcgtgcgttttttatttctttattaacattattcaaagtttctttttagaatatttttctgatgattatgaatactacgtactattgaagatttggtcaaataattttattgttttctataactgtcaccaacggtagatggactgtcagaatctgattaggtctttttgggaccaaacaagattagtaccaaatcactgcacctacataataattgttatggatttgcttatatatatagtttcaagtcttttatctaactccattataacacacaaacacaagtcaactttgcattataactccatttgccctcctggttcatcttgttctctaccatggctgattcaaaatctggtgacacggaagtagcgcatcgctctagcgatccaagcgaaaagcgtggtggctggatcactttaccgttcatgctaggtttgttttttgtttttttttgaaaccaaaacatatatagatgttgatactggtgaggttttatgttgtgcagttacattattaggcatgtccataacttctttcggatggggaatgaacttgatcgtcttcttgatcgaggaattccacatcaagaacatcgctgctgctcagatttcaaatgttgtcaatggagttgtcaacatgttacctgttgttgcagccatcctagctgattccttttttgggaacattcccgtcatctccacctccactttcatttctctggctgtaagttaaacactcactaattctattctatgttctgatatacaaagcttaccagctttaaaaccattttttcagggaacctctctcttgaccttaatcacatctttgaactacttgatgcctagaccgtgtgaaacggggtcaattctatgccagtcgccatcaaaactacagcttgggatcttgtatgtagccttagctctagtgatcattggatcagctgggacgcggttcaccttggcagccgcgggtgcgaaccaatataagaagcctaaagaacaaggaagattcttcaactggttcttccttgcactgtatattggagctattactggcacgacagcgattgtatatacacaagacaatgctagctggaaacttgggttcggtctatgtgccgttgctaacttgatcagtttcatcgttttcatcgccggggttagattctacaagcatgacaaacccttgggaagtccttatacaagcctgatccgtgttttagttgctgctacaatgaaaagaaaggcagtgatttcatcaaaagacgaagactatcatcaatatggtctcgggaaagaggccaagacttatactacaatgccctccaagagctttaggttaagaccaaaaccttgcttgattcatgaaagtttaaccagaactaaaaagagctttacattttcaggttcttgaaccgtgcagcattaaagaacaaagaagatttaaacacgagtggtgactcaagtaataacatgtggaggctatgctctgttcaggaagtagaagacttcaaagccattctccgacttgtacctctctgggcagccgtcatgttcctcagcactcccgtggcagtacaaatgagcatgacggttctccaagctttggtcatggaccgcaaacttagcccgcacttcgaagtctctgccgggtctctacaagtcatagtactcgtctttggttgtgtctttatcatgctcaacaactggatcatctatcccatgtaccaaaagctaatcggcaaaccactgacaccacttcaacaagttgggatcggtcacgttttcaccatcctaagcatggcgatatcagctgttgtggaagcaaagagactgaaaacagttgaaaatggaggccatcccatgtcagtgctatggctagttcctgctcttgtgatggttggaataggcgaggcgtttcattttcccgcgaatgttgcagtattctatggagaattccctgagtctctgaagaacaccgcaacttcattgacctcagtggtgattggaatctctttctatctgagcacagctgttatcgacgtgatccaaagaaccacctcgtggttaccaaatgacataaaccatggaagagttgacaatgtttactgggttgtagtcataggaggagtcttgaatctcggctatttccttgtctgctcttggttttacaaatacagaaacctcaaggatgatgatcatgaacaagatcctaaagatgttaaaacctaggacacaacatgttgttttcctagttttctttgcattgtagtagtcttgataatcaacctaagacacaacatgttcttgtaaaaattacaatgaaaataatgaaggaaccagtttcatgacttccacagatctttcggtttgtgaaacttcaccaaatacaaattcagtgtcaagattatattgtacattatgtgaaattgacaacatgattcttaaaacgtatttttatgtttaataataactagtggatgaaactgttgaagaataatgcatgtgatgacaatcgatgatctggtaaactctttttaatattcactagctgtcagaaactaattttcatggataaagaaagactaatgacacattattcctcattatttacattaaaatcatttctcagcttacacagagttactctgttctctatcatggctggtttagtattatctaatgacacagaagcaaagatctccggtgattgcaaacgcggtggctgcatcacttttccgttcatgataggttagttttgtgtttaggatttttatttctattttagatgcaacatagggtcatcacaaagtgtttttgggttctatttggtgcagctacattgttaggtatttcagtgacttcttatggatgggtactgaacttgattgtcttcttgatcgaggaatataacatcaagagcatagctgctgctcagatttcaaacattgtcaatggatgtctcagcatgttgcctgttgttacagccattctcgctgattctttctttggaaacattcctgtaatctcggcttctgctttcatttctctgcttgtaagttagtccaagaactcgttgattctctactatctttatctacaaagctcacaagttttaaaacgtttttttcagggcatctttctcttgactctgatctcatctttcgaaaacttgagacctagaccgtgtgaaacaggctcaatcctatgccaatcgccatcaaaactccacctcggggtcttgtatgcagcgttagctctagtgactgctggaacttctgggacacgggtggctttggcatctgctggtgcaaaccagtatgataaacctagagacaaaggaagcttcttcaactggtacttcctcacggtaaatacaggcgcgattattagcgcgacagcaattgtatatacacaggagaatgctagctggagactcgggtttggtctttgtgcagctgctaatttgatcagtttcatagttttcatttccgggaagagattctacaagcatgacaaaccaatgggaagtcccttcacaagccttatccgcgtcttagtcgctgctatactgaaaatcaaggtagtgacctcttccaaagaagaagattatcaccgggaagttgaaaaagaatccaagacttgtattggaatgccttccaagagcttcaggtgaatataaaaagcttgtgttgttgtgaattctaaaacatgaactaaacaagcttttatatgtgcaggtttttgaaccgtgcagcattaaagagcgaaaaggacttaaatcaagaagatggcttatgtcataacccttggaggttatgttctgttgaggaagtagaagattttaaatctgttctcagagttcttcctctatggttagcaatcttattcgttggaacttccattggtgtccaagcaagcatgacggttctccaagctctggtaacagaccgaggactcgactctaaatttaaagtcccggccgggtctctacaagtaatagtactcatctcttcatgcgtctttctcgtgctcaataactggactatttatcccatctatcagaagataactcataaacagctgacaccactgcaacaagtcggtataggccaagttttcaacatccttagcatggcaatctccgccatcgtggaagcaaaaaggctgaaaacagttgaaaatgagcatcctatgtcagtgttatggctgttaccacctcttgtgatagttggaattggcgatgcctttcattatatggcgaatgttgcagtgttctatggagagttccctgagtctatgaggaacacagcaacctctgtgacctcggtggcgtttggaatctccttctatttaagtacagctctaataaacttgatacagaggaccaccgcgtggttaccagacgacattaaccacgggagagtggacaatgtgtactgggttttggtcattggaggtgtcttgaaccttggctatttctttgtctgctcttggtatttcacgtacagaaaaatccaagatgataacagacaagatcctaaagatgttacaaactaagacacaacatgttttgtttcatttttctctacatttgtcttgagtcaatatctcatttgcacctgttaactgtagcgtttgaccatcaaggttatataatttcagataagagtttggagtcttgaattatgactgagaaacagatcaacaaaagttgccaccaccagagcaacgaaagattactctaaagccctaaaaggttaaagttaatcacttaacgagttactttgaagctaactgaaacaaagtttgaagaaatgagacaaacagaatttcatgttctatatgaagatataaggtagcatttgattatctgttaaccatatggtttggtatataaatttttggtttaatgagacacagaaaacttccccaagtctattactctaagaaacatgaattagccatgaagttataacagaattagttgttgtgactaatgaaacagagtaaacagaaaagaaaaaaaatcgaatggtaagattttaaacctgcaggcgttctcaatcggaagccgtaggagagctttcatggtcccatcccttgatttgttctctactctacttgaaagaacatatatatatcttggcctacaaggctacaatgcaagacattaaaccatcagatcaaataattatagctgtcaaatggacgggtccgtccagggaccattgggcgtgtccgtatggacagttttttttatgggccaagttggacggttcataatggacaatggtccgaaaaatgtccatgcctaataaagaccatgtccatatgggcaagcccatgtatagcccattttattattgataaatcaaaaatcatgattttaaagaattgtgtttttgcattttgcatttttccgacaaaacggtaaaattgtgtttttccctcaattcatgcccatgggcagcccattgtccatatggtcaaacccatattatccgcggacaaaactggtcatatgcccaattggaccatttgttttatggtctggaatatagcccgtccatatgcatttggactgggcaagcctatgggccgcctgtccagttgacagttctacaaataatgtacctactaacagaacattgtaagaagctacagatatagtaattagtacatgtccaatgtaaatccactcatacatttcttctctctttgttttactttaaaatatcgattgagcaatttcgatctctagggatttaaagaagtgaaaccaaaattgtttctgacgagcgattaagaacccctcttttaccgcaattgacaatagataaacattatacatctcagagaaaccttctccattttcataaacccttttctacagtgatcgtctcgaagcagaaacactgttcacgattttttcaacgcgggaaaatttatttatcttagggatcatctaaatacagtgaacctcatcagattgggtccaaaaccaggttttagactgagtcaacgacaacgactgtattagcgtgttgatgacacatgtctctccgttgtcacgtataatcaccgttcatttatgaatttaagtacgttatttctattcgaattacccaaattaacctacgtacgtagcttgctccgcaagtgaatagaattggtctatagacaataaatatatatacttttaataataaagggtttgtaattgttgaaacatatgttaactaattatcttcagataaatttactaattcgttcgtaacatgttacaaatttctatcgttgttgtctacaaaatttcttacaaatttctgacgagaataataccaaatataccctccagcttctcccacacgttcttcgtataaccatgccctgaccaaaataaatgttagcgtaggggaaaaaaacaaaacagaacagctctgctctgtctctataaaaagctttctcactttctcgttctcattcagacactttttcattcagacactcattcagacacttttgtcacctcacttactctctctgtctctcccccctctccctctctcatatttctcttttttctataaacatatttcagaaatggagttattgtctcccaacaattccaggagaaccaaacaatggcttcctccgagaagaggacaggtcaagatcatgatcgtccgcaaactcctcaaatcgacggcctcgatcgtttcactgtggaagaggcgagattgtaaataactgtgtacatactttttgttgttgttttaatgttaattatgtacatactttgtaagatgtaatctcatgtatcacgtatgaaaaaaaaagtttttgttagaagatattttttgcttattaatctctatattatgtagacaaattttcttttcttccttgtaaatatttacaagttgttccatatattacatgccataacttaaaaatgatactaacgggtcttggaccaaaactgatatctgttgggacatgcataaagcctaacataacaattaacaagtgtcataaattttggattcacttgtagcgatgatacaacgaaagtaaaactacttattacatttgtcaaatgatactatataggtagctcataactatgtatagatctctaaaattcatctaaacccgaattctgccgtgtggaattaacaaaaaaaaaaaaaagaagagtaaatcatttgaacaattacgtgtgttacattcctgttaatcatatttatatatgtataggttaaagcttgcttatctactatggaacaaagaggatctataataacccttcagcaagtcagcgacaaagactgtagtagcgcgttacgatagtgataacgttcacacgtgtctccattgccacatctactcagacaccaaccaaaaaaaccttgtagatcacacatgttactgaattaattacgttatctctaataagaattaccaaagtaaccttacgtagcttgctctgcaagtgaaagaattggtcttcaaaagacttggtctgtgactttgtgagtgttgtgtgtctcaaagccttatttaataacctctctctcaactttatgttactcgcatttaaatttgtttctctgcttcactcttttgatttctttctacttctttttttcacacagatcttaagatactacaactgcgaccatggagcttccatctccttacagctcaagaaaggaggaatcaactgttcctccgaagagaggccgagtcaagatcatgatctttcgtgatctagtcagatcggaaacctcgatggcaccgactccgaggagaggccgaatcaagaaaatgatcgcgggtgatctagtcggatcagggaaacagaacaactacgacggagacggtaagagaggaggctagttaagcagactctccgactacatacactttatctccatgccagcttccagacaatccctttctctgagaagatgatcggattttcatattcatttgaaaatcttgtatgaaatgtaatatagttgttggctttggcttcttctttcgaatatgttatacaaaaagtttattatttttgttggggtaaattaaagatttaaaggtaagttactctgtttcatacaaagtttgggcctctgggctaatattttggtatctatgtaaaaatgtaaatattatgtttctttagaagtttatttttgtatctttgtagtaaattgtatctttgtgaaaatgtaaatctacttaacattttgatgaagtcaacaaaaaaaatctgattttaactgagggatgaaattgtagttactccaaatttgaggataaatgtcgtaataaataaacatagatggctaaatctgtaattaacctttttagaaagagggtttattgtataattttttctcccaaatcttttttttttccgccgccgtgaaaaaatgaatcatcttctaatcttagcgagaaactcgctgcggcggcggaattttaatctccgaccaccgtctcgttccttcagtagcaccatctcaccggaatcgaatcggtgagctctcctctcccgcttctgctttccttccttttcctcatttatcgcctctcttcctgattctgaccccaaacaaaaaaacaaaacacagctcgtcttttggcatagcattcgatatcgatggagttattcttcttggttcctctcccgttggtggctctcctagcgctctccgacgtctctacgatgattccggtatgcaatcattgatttctagaacctgcttaattaggttgtcaacaatgtacattgttgtagattgactctaggccaagtactggtttaggtttaatttgtaatctttccagtgtatgatgagttttgaggttgcttttgcaggtgctttgaagatacctttcttattcttgactaatggtgagtctttgttatgagtcttaaaataggtcaaatgagtgaattatatagttaacatcactttttgtcattggttatggcaggaggtggcttgcctgaatctaaacgggcttctgagatgagtcatttattaggtgttcaagtttctccattgcaggttgaaaccttgtcacatcatttcctttgtattttgtttctgtagagtgtggatgttacagtagtcgccaaagttaagttttagtaactgtaactcttttgatgtaatctctttgacattttgttcatgtttcaggtgatacaagcacattcaccctttcggaagctagtaaataggtaagttataaaatcacatagtgcacaagaaagaccttgcaaacaattttataagatattctattccttggtttggtcagaaagatgtttagtgatttgcttggaccaggtttgaaaatgagcttgttgttgcagctggaaaaggggaacctgccgcggtgatgtctaattatggtttcaagtaagcttagggctcttttcttgaattttctgattttcgttagtttctgcttcaaacttctgttcaggtgatttatacatgtacatttatttttcagaaacgtcatttcaatggacgaatatgcctcttactttgacaacattgatcccttggcgccatataagaaattgatgttcaggcaggatggtcacaaggagcttagatcaagagaagatgttctatcccaaagagttcaggcagcatttatagttagtgatccagttgattggagccgagacatccaggtttctcctgcttcacatatctttattttcagatgtgatacttatctgataaaatcctttaagcacacatgacacatcgtaataaataaggcaaagtggacttttgtatttctatatcactggcttcacgattatgtggaaaaaaaaacaaaagaaaacacattttaaatggtctttggctgtagatcctcatagtttttgttgggggcagcagagcttggttaacattttttgctactaactcacggtgaatgaatactgattgatacttttggtcaggttctttgtgacattttacgaactggaggacttcctgggaaagaaattggacctcaacctcatttgtacattgccaatgacgatttagactaccaggttctggtgaatccgttgttatttctccattcttttgatttactttatggtatactgatgcattgtcaactaaattcagactgagtttcctactgaacgtcttggcatgggagcttttagaatcgcgttagaatcaatcttcaacaggtaataaccaaattcaaagcacacacattccatatgttcacattttttcctcatttgttcaattcagttttgcatgattgagtttgaatacatacttgcagaattcatgaaaaacctctagagtacacatcatttggcaaaccaaatccatttgtgttcaaaaacgcagaagatgttctgaaagaaatcgctacatccccttattcttcaaaccaaggaagtcaccacttcaagacactatatatgatcggggacaaccctaaaatcgacatcagaggcgcacgacaggtttcgtactctttctctcagactagagttggtcatctcgccataaaacattcctctaatcttaccttaaaccattagtagtctattaaaagtaaatctgtgtgacaggctgggactccttggttttcaatattaacgagaaccggagttttcaaaggaaaagataaccattccgagtttccagctgatctggtaagcatcaacatcatcacttagcctttaaaagaagattattattattcccgtgagtttatgttcatgtgaaactgtttaacttcttcaggtcgttgacaccgtcgaggaagcagttgatttcattttgacaagagagtccgccaagcaaagcttactgtcatgagttatatcactctcattttttctgaccagtccaagtatttcttgacgatttgagattttatttaacatattggttattttcacggcgaggccaaagaaatggtgtagtaacaagtaaacagaaattagtgaacattattgaatctagaagtcactattttctttatgatttgagattttattcaactttcaacatattgtgttctcttcactattgtgattacattactaaattgataagtcattattttggtattaaatcgtttaaatgctctttcaattaatgtttgtactaaggatctaaggcaaatagacattataaaaaacattagtttcacaacatttactttcaaatgatttcttacataaaagttggttacaaatcctccaatccaaatttaaaccgaatccagaataaacagtaaaatacaacattcatgacactttctcatcacccaaaactgtagttacatcaattcccttctaatattgattccggcttcatataatatgaagttataaacatcttaaaaaaatggttggtgattggtttttaactttgctgaccaaaaaccctaatggtaaaacgatctacctaaatgaggacgaaaatcttcataactaactctatcataaggtggtggggtttgttgtagtggtggcgaaccaactctacgagtgtagtcttgccattgtcccacatgcattggttcttcaccattatatctaccatcatgcctatggtgaaccaaatgaccatttgttccagcattcaaagggacttgtctataaggatcatctaaagggttactatgaattccaaaccgggggatttcacgaaactcttctaacccattaaagtttccgacatacctgtttcgttttcctctgggatcttcgtatctctcttcctctctccagttacccgtttcttctagagctctgtagcggtttcccaaacaaagtcttttggtgtgatgttcttcaggaggaccgctgaaaccgtttctgtagttattgtgaagttgttgtgagtaaacgttgcgcgactgcacagaaggacgagggtccagaactgcttcttggggaaacgacctatgtctgaaatgcgtttcagcgatactgccactgaatggcggcagaagaggacgaggctccacaagtacttgttggtcaaacaacctatctctgaaatgagttccaccaatacttccattgactggccgcagaggaggaagaggctgcaacacagcttgttggcgaaacgactcatgtctgaaatgtgtgccagcgatattgccattaagtggcagcacaggaggacgaggctccacaactgcttgttgcgcaaacaccttctgtttgcgatgtgttccagcaattttgccattgagtcgcggcacaggaggagaaggctgcaccacagcttgttggccagacaccttgtgtattccagcggtctttccattaagtggcgccacaggaggaatctgcacaacagatcctttgccaaacaacctatgtctgagatctgttccagcaaccttgtcattgaggaattcaaagatgtcttcaacggttctgtttatggagctgtatatctttttggctcctgcaccattaacccgtcttgcgacattttgagatatgttggtaaaatcctcaacctgtaagacaaacggaaaaaaaaatgatataagacaaaaaaagtaagaaagcaaatgtaatcttactgaatagagttttttatagcttacactaatggatccaacgccaacttttttccactttttagatatccaaagaccattcagcacactgacgcagagcccttgtctccaaaggaattctacagattgtaactgcaagacagaaatgctaattcgttatacaaaagcatgtactgcagcttgttttgtaatcggtgtttgggtttaaaggtaaaacgatatagcaccttaataaaaaaggttgcaaacagtctacccagagattcctgattacgctgtccccagtttaagaacttttgtgcccttttctccacgttaggaggatccattccatctggaaaagaaaagactcagttaatgtcattacggaaaacaggaatatgttgctagcacgttaaaagaagagtattaaaaatgtaatctgagatctgacaatcatcaagtgttctattagtatcacaagcttaaaaaagcctaaagagactttgtatatgttgaatctgccagaaaacaaatgaccgcctcaaaaagaacaaacccaccatagttctctttcacttagtttactgtatggatactaatattacctttcaatagcatagagaatggaggtaaaatgggaggattttgagtctgcgcatatgacaaaggagaagcaattagactcggaagtatttagtcattcaacattcaaagttcctcatacgcctggatctgatcagatactattcacatgcaacttaagatgaagcaataataaaccaaacactttatccaacagttgaaaaagaatcaaatttattcccattaaacagccagataaactacctacgtgggcataagtcaaaattctacctataagaatcaaccatcccttgtaaatgtaactggaataataagagtacagagtctagtgaacatctaacacaagtaactaagttgatacctgtaagtgaagagcgactagcaatgttatagatacagaattcagggttcggtgtagcgcactgttaacttcatgagctttggcccaatgcttaacctgacatatgagaatagtcacattagtaaatatactgaccacaactacacatactttaactttgaatacttctttcatacgaaaactatggttagccaacaagtccctagctttaaagttacttcactaaaatctgtgagactcgaagattccacttaaatagtaaagaaaaattattctgaaaaattagttagtactggggaaagcttttgttgaattgaaaatcagaaaaaaactgaagagacttgaaagaaactaaagcaacaaaccataggcagtagcataaaaatctataaccctaaaaagaaatttctgttgaaaaaactcacaagtcattagtactagaaggataacgaaagccattagaatagaacttaaattcttaccaacagacaaagtttttgaaacctgccatcaatttgagatatgatgcgaacgatctgtgaatttaaaatgccatctttattttcgactgacaaatcacactcaacaccagtcccttgatcagagaatttgacaattggcactttagcagagaagatagattcaacattcttaacctgcccttctcctacaaaagaagtatatatgaaactcatcattttaagaatgtcgtattcacgtgtccccgatatactaaaaagagactgttggggtttttggtatatatggaaaacaataatggaattggcatacagcttaacagcaagaagaatggaacaaatatcttaccctgcagagaacggagcttcttagcaaatcttttaagtatctcgagcttcttttcacgaggaatctcagatgttccattaccaaagttaatagacacatctaaatcactctgagatgaatacatatccatcacaaaagacccatacgcctcaaggaccgggctgctctcttcagacttacctaatgaacacataaactaaataaaccctctgctaactttcgatatcactaagctaaataagatagaaaaaaagactacattaccataaatatctaaagccatagtattaaggtttttgaccaattccttcctagtattgtaatcagcagaaaccggtcgaaaagagcagtagacatcatttaataccttatcaagatccagtaagatataactatcaatcttatatctcttgagtgctattgacacagtgttgttcaccttctttcgaatcactgacatcccataaaccaaaacaagaatgattcaaaaatctgtagtgaacacaaaacaatcaagaaatatatcatcaaaagagtaaagtattaacctttactcgaaacatttttatcctcagccacatttcctcgagagcccataattactctctacttaagcagagatactaaacctgcaaaataacatagaaaccattcacatcagacaaaagactcgatttttaagcatagtttcgatcaaaaaacctaattattatcaaactaagatctaaaggagctttttttatagtgttcgagtagttgtgaggattaagatgagacaaagacacaatttttaagcatagattcgatcaaaaacctaattattatcaaaactaagacctaaagaagcttttttgtagtgaattcgagtttaagatgagagaaagattcaatttttaagcacagtcgatgggttttgtaatccagagcccacgaaaaaatctgaaggaaagcaattgaattttgagagttaaggtaagggttacgcaccggagaatgttataggcagaggaaaaggcgatgaaactagtcggagaggatgcagttttacggtcccgttacgggagaaccgtggttattgacaagagagacaccaattctgaggagagacggggagagagacaatggtggctctctagcaaattttttttgtatttttgtgtaattaggttatttcggtatttctactagggtgaattgcaaaaatgacgtttttggaaaatgaaataaagaatatagcaccataaaatctataatgtgttgagtaatacttagatgtggtaaaaagacaacaaactctttccaacaaaaaagatggtaagtgcgtggagcacgagaagaattgaatatggctggatgatatggcgttgttttcatccaaacaattttcagtagcatcagcaaagcaaagtcttgaaaacaaagcagaacagtatagtacatatatttcgctttcgagcttcattttgtttggagaaatatcaaattgtttataagtacagaaaactaaaccctaaagatggtatggaacccaagcaacaacggaagtcgattctctgaactcaaattgcgttcctcgctctataattcgaaactcccatatcacagcttctttggttacagtctctatctggtttctgcgactatctggtttctgcaagagattattatattttatgaaatcattaaaaatataatgggagtaaaattgtagagttcacaaaaaataggaagagacaaaataaaattgcataaagagaaggaagagaaaagagagaaaaaaacacagaagaaaagatgatgatgtggcaggggtaaaattatatatattgtaatttatacagaaaatattgctctgctttttttctttggttagtttgttagttattaaatttttgttggttattttagcaaatttctcttctactaatgaatatcaatttgaggtttttataatgtaaaattaaggattttataattttattttatatgatatcaagagaacatatatattagtaatttagaactatacttttaccttttttattatttgtgtgttaaacatattctatagaagaagaagaaaatatatgtttttctttttgtaaataattaatcgtaatttgtttatttggaaggttggtatttttctttggagagactttcctcttctgtggagagattttcttctttaattgagagttcaattctatctttctcctttttaaaagagagaattttgattgttagctcgttttctaaagcaaaagatctactagcatcactcttggtccttactcgccaagcaagcatggcgccttcttacaaagcctgattccttattgactagagtttctaaagctaggtattttaaacaaaaggatttcatgaatgttgtggttggttcccgtccctcttatgcttggcgcagcattatacacggacgagatctgttggagaaaggcattatgaagaacattggcaatggacaatctacaagtgtctggaatgacaaatggatatttgataaggctccgcagcgcccttttaataaacaatctctgtttgatttggaactaatggtctcaaaccttattacccaccaaggctcttgggaccatgcattgttatcagagttgtttttttcaccggacgttgttagaatcatgtcttatcctcctaacattggcctagaggatagtgacatttgggcttataatcgtaatggttgctacattgtgaagagcgggaattggttgatctcacatcttaagcagcagcctccaccacccacacatgaacaagtaactcgctgtcttaaggagaagatttgggatctcaaaactctacccaagatcaaaatgttcctgtggcgagctctatcgggtgctttggctgtttcaacatgtttacaagctcatggtatgcatactaaccttatgtgctcgctgtgtcaaaccaatatagagtcaataagccatgtgcttttttgctgttggccggctagagaggtatgggagaatactaatatctatatgcctccacatggttttacggactcgatcacagataacattggttttatgctgaaactaatgagtaatgttggggttcctttacctctacgaatggcgattccttggattctctggggcatttggaagcaccgtaatgaaacgttatatggatcaaaaccggcagttgcaggacaacatcactaactcgcaacctattaggagggagaatagatggatcaaaccgagcttaggtgttttaaagtgtaatgtgcatgctgcttgggtcaatgaaggaggacgttgtgtggtgcttggttggtcagagatgctcaaggtgatgtcttatttcatgcgagggagatgtttttaccaacctcgaatcgcattgcggctgaattgagagggatactatgggttttacaaagtcttcgggatttacacttggacaacattgaggtttggtcagattgtggtgcggcaatagaagctattattgactcttctaattggcctcgttaatctacgtatctcgacaagattcacagaatcatttcaagtttctctcgggtcattttcatggtctcatcctcgaaggcgaacttgatcgcaagggacattgctctaagtgtcacaagggatggaagaacaagatcttacctatctcgtggaggtcctgtgtggttatcttccagaattgaagaagaaaagaggagatgatattgttggttttttacaccttatctttggtttatagttgagttatcatgctctgttttttcattatctggacttctatgtactcggtttggtttatttgatttaataaaatatcagacggcaaaaaaaaaaagcatcactcttggttttactgcaagaccgatagtcgacgattgacttcaatccgataaaattgaaaacattcttgaagaatgtgttattttatcgttttcaagttttattgttcaattatgtctttatttcgaaacgttcgacttgtgattttttttggcaaagagcttctgactttgggttgttgtatcctcaagttaattttaatgtaagtttggtgtgcacaaataaaaaaaaaaaaagtagtagtagaggattgcggagcctagagaactaatttgtattgcaattaactaattataaccattaaaagatggtgaatatatcgactaaattcgtgaaaaaaatgaaagtaaagaagttttttatatgatatctaaaattcatagttttgactcatatcaatttaccatgctcttaaaggatgagctatttaagttaggtaagttcttttatctttaactttcataatcttttttgtagaaaatataattgaaatcttttattgagccactatgataaagtatgcatttgaaactctcttatttttggtgggaaactcttttaattaggcagtcttttagtcaacaaaattattaatttactcttaacttatatatttaaaaaaacaagaaaatgaaattcttgattttcatattactatgttgagaattattaggaataattcaatactattttcgcgagttaatatttacataatcaaaattattctaacttcttcatcagagttgcaattgacaccatcgaggaagtagttgatttcattttgacaatataatccgtgaagcaaagcttataatcttcacaataatgtttaaaatactgaatctgaagtcattaattaggtcagaagaaaatctgaagtttgtactaatgatctgaagcgaattggcattacgaatatatgaatttactgatacttcttttctgattccacaacgaagaatgaaattttagaagttatcttaagacacaaattaaataaagttggctacaaattctccaatccaaatttaaaccgaatccaacataaaatgtaagatgcatacattgatgacaatattccacttaaacagaagtaaccaaatcctgaattccccctaaatccagttatatcatatgaagttattatatttatcttttaaaaatggttggtcattggtttaaacttatactaagcaaaaaccctatcagtaaaacgatctaccaaaataaagttggggaacgttttgagggtcaatgttaccataaggtggtagtggttgtggccgtggcggaccaattagtcttgccacattcccacatgcattaatggttcttcaccaccactaaacctgagaatgtagaccgcgagtcatcaaaggtggttctggtttctgactggttaaaccaatgtgaggatggtgccggtttgcaccactacaatgtccacacatgagttcaacagtcttgagaggaactctgccctctctccctacgaaaaatctccaaggtaaatttctcactcaagcatcttttctgttactttgatagtcaaaactcaaaatcaatcttttgtattaatcgaatcattaacatctgacctctaataccttaaagaataatgaaatttaagttatcttaagacacaagttacataaaccaagctaaaaccctattagtaaaaaccaaacttcttataaagaagtttatcataatgtggtggtggtgttggcatatcaagacttcgactgtactcattccacagacccacaggcattggttcttcaccaccactaaacctacagccccagtttccaccagacctttttcgttttcctctagaagtttcatgagtctcctctcttccgtgactgatccctcctacagctctgtatcccttttccaagcagactcttttcttatgaggttgttgtggcgacacaggaggaataggctccacaacagtttgttggctaaacaacttttgtgtgagatgttctccagcaaccttgccattgaggaactccaatatatcatctactgttctgtttatggagctgtatatcttttcggctccgtagtcactaaaaacccttgcaaaatttctagccacgtctgtaaaatcctcaacctatataacacacacggaaagaaaaaaactaaagtggtaagacaaaaaactaagaatgtgaatgaaatttaactaaatacaaaagaagtttacactaataacatctcttttagtctttttagatatccaaagaccattcaacacactggcgcaaagcccttatctccaaaggaattctacagattgcaactgtaagacagaaagtatatatttcgttataacaaataagcttctcttttaattgatgtttgtgtttaaagaggacaaaaaaaagatagcaccttaataaaaaaagttgcaaacagtctaccaagagattcttgattacgttgtccccagtttaagaacttttgtgttcttttctccacgataggaggatcgattccatctggaaaaaaggatgataaatcagtaatacgattctagaagagttgaatctgtcagaaaacaaatgacccgtccaaaaccatcatatagttatcttttactttgttttatgtgtggatacaaatattacctttaaatagtgtagagaatggaggtaaaattggaggactttgagtctgcacataagacaaaggagagaagcatttagtcatttaaagttccacataagactgaatagtatatggtcgcatgcaacttaatatgcgaagaaaagaaaacctaacactttaatcaaaggaagtaaaaataatcagaaagatgaaaaagaaacaaacttattctccattaaacaaataaactaaatatttgtcatcatgaaactcgaaattctcccaaaaatattaatccaacgagattaactgagtttatacctgtaaatgatgagcgactagcattgttatagatatcgaattcagggtattgtgtgacgcattgttaaccccatgtgctctggcccaatgcttaatctgacatatgacaatattcacattagtactaaacaattgacagtgcttgtctcacaagccattagtgctagaatgataaacgaaaagctttagtataataactgaaatcttaccaacaaacaaagtttctgaaacctatcatcaatttgagatataatccgaatgatctgtgaagttaaaatgccgtctttgctttcaactgtcaaatcacattcgataccagtcccttgatcacagaatctgacaattggaaccctagcacttaagataggtacaacattcctgacaaacccttgccctatacaaaagaagtgtaggtaagatatatgtatgaaactcatcattttaagaaagtttcacatgtaatgacatacacctttatagcttccaatgagttagaatacatataaaaaaagaatgtctcggtaaaattcagtttcattcagttaaacgtaccctccaaagagcggagcttcgttgcaaatcttgtaagaatttctagcttcttttcacgataaaattcagatgttccgctactaaagttaatagatacatccaaatccttttgtgaggaaaacgtattcatcgcaaaagagccatacgcctcaaggaccgggctgctctcttctgatttacctaataaacaaaaaataaataaaacctctactgaatatggatattggtcgagcttaataagataaaaaagactacaagacttatattaccaaaaatatctatagccatagcattgaggtttttgaccaattccttcctagtattgtaatcagcagaaaccggtcgaaaagagctgtaggcatcatctaataccttatcaaggtctagtaagatataactatcaatgttatatctcttagatgctatggacatagtgttcttcactttcttttgaatccctgacatccattaacagaagccacaaaaaacaaaaaagattgcaaaatttgtagtgaacacaaacaatatctaggaaatttcagccaaagagttgtataaacctttactcgaaacattcttttccccagcttgattttttcgaaagtccatagtacctctcaagcagagctattaaacctgcaataacatagaaaaaatcgaagattcagtggggaagaagaactgtgaacaactagagtcaaaatagaacttgccaaattcgtgagaacctattttttttttttatcaaactaagatctaagggagttatagagtacttaggatgagatcaaacaatattgggatatggagaaccgagatcgacggtcgagatgagaagatcaagatatggcaagaagatattattctagaaggtaaatgttaatattgaagtttaggaaatttaacattatctctaaatatattatttacatttatgtttatcttaatctctatataagagaatgtaaattattctattattcttatgagagtctattataattctttctaaacacttttgtgttctttactctcatcaaatttatcaaacaaaggctcgatttttaagcataaattcgatcatgtttctaccaaaacgaaaggtatggttttcttaaaacccacgcaacatatgaagcagaagggacgcagaaaattggctgttgagaatttagggtttagattcttacggaggaaaacgtgacgacttaatcggcaagagacacaattctggtggcagtcttggtaatatttttatttattttaaggttatttcgatacttatactaaacacaaacataatccaataaactaaagtaaaccgacaacacctctaaaccaagtcagcttctgattatttgatagttttctctttcgacagagtgtagcaataaattaacacacgaccatgaagttacaatctgaacatgagcataatgatttattttggtttttattcagtctacattctcatttttttcctgatacattggacaagaagaagcagatactatataataaagtacatcatgccttgtcatattaatagctaacactaaagatagtggcaacagttactaaatggctcacacaaaggaagcttcagaatgtgatgacttgtttaggttgccttcctagcttcccgagagctttatcgagagcaacagggaactcttcgaagggaaccaattccgttctgtcagaagaaaccaaccattgatttaaatgataagcgaagatagtttttcatgggagctcagaatgttaagacttactcgtattttagcttcccgtctcgtgcaagcccgaggagatagtctatcatctctctgcattcttttactttacccatactcaaccaactctgcagccaaaatcctcttaaggccaaatcctgtagggtaatcaaacattaacacagtgcacaaaagccatagatcttaaacacccaacgaagtcattagaaagctcggtttgtgcgctatgaataagatctaaatttaagacataccgataacagtttagtttttccgaatgatcttttaattaccttaaagatgaaagatgttgttgacacagtgattggcttcttagacatcccaccatatgttaccatggttcctccttccctgaaatatatatgtattcacaaccttcagaacagtgggaattcattcaactaaaagtgcgacaaacagatatgttcactgtacctgagatatttgaggacaagagaggcagcattgccaccaacacagttgaatcccagagctggttcaggtaagttaccctagaccacatatacgttaagctttggatactcagaaatttctgctatagaatagctagacttaaagcttaccaaaagacttttcacattctttacattcagttgactctctgaaaagacttcatctgcacctagagctttcagctgctctcttgcttcatccgacccagccctaaaatcagtagcataggaggacactttacttggctagaaccgcttcaattgttcgtaagcaatatcttaaacacaattcatattatattacacctgtcacgaataaggttgatggtactgatgccacggagtcttgccaactgaatgacacactgacccacaatacttgttgcaccattctgtacaacagaatcccctgttccagagaaatcctttgttaggcaaaaagaaagtaaagaccagttacattaaagacataatatacagtccaaaccagaattcaagttcacaaagtcctcaagcatcctcaaagccgtcaatggattaacagtaatcgtcgctgcatactccattggacactctttatcgattttgtgccacacactctcttccttcacaacataagtctgccaagtccctagttcagagagattcacatcagactatttcacaaatcaaaaagggatatcattaaactgttttgaagtcacactctcttttgttgcttcacttaacataacattagagagtacctgaagaaggtggagatggaatgacccaatcaccaggagaaaaaccattaacattggagccaactgcataaacttcaccaacaccttcataaccaccaaccgctggtaccggtggcctcaccggatacacacctaaacaatcatcattttccaaaacattgaactcattatctaactcttagctttgtgaccaataaacaaagatggagacgatgatgtttagggatactattattgattcccaatcaaaacttatcgaacataaaccttcaattcgattgatatcggaggggttgatcggagcggcgatcattttaacacaaacgtcgttttctttcacttccaccggcgggagattcaccaatctatcttcgtcaaaggagaacaaaaggtgtaaatggagattatgtgtgtttctgtaaacacagagtaaaagtagacgaacctggtgacggaatcgggagagccgtgttcttcgtagacgatggcttttgacggtggtgacataatggtggagaatgatttgatacagagtgttggtgtttcgccgcgtcggattgacctgaaattcgccgtcgatgagaattttagagctcggccgacgactgactccatcaacgccgccatatctctccgccgtcaaactctctctggcaacgatataagaaacgacgtcgttttggttttttctcgttcttaacaattttagcaatcgctgatagtatccgaacgacaacgtttcagcacgtttggttttcttcgcacaaatcaaattagggacggggggaaaaattgtaaccgagaaaacaaaccgaatctaaaccaaaaccaaaaccaaatctaaagtctatttttttttttccactcacattctcctaaagtctattttgtttagggaaattctatattcgaaacttttctttattggtttgcatctaaaccggtccatagattgtcaaaataattgaaatcggagtacatgatggtggtatagtgctcgaaagattcactatgatatttttgagagaaatttatcctatgtaatttagtttttggaaaaagaaaaaaaattggatatgtacaaaacgattgttttttttgctagtatttagctcaaaaatactagcaatatcaaaatcaccaaccccaataatctgaagtttgttaaaaatttatattgatgattggctattgaaaatgtcatgaataatcgatacatgaatacagtttaaattacacaaaatatagttgcacattaatggagtagcgagtagagggacaagtcatgaagaagatgagtcagaaattgccaacaatttgtaaagtgacctgtaacagtctcatcttgttaggtcgctttaacgttctactttgccaaattatctttccttaataatataattgcatctatgaatagatttatatatgtaactagggtatagtagtgaagcgcaattctatgaattcttgtcccttgattttggtttttcttctttgttgtaatgtttaggtagtgcaacagtgttatgtatatattggatactgtcccggaataaatattatctcaaaatttttgtcaatgtgaaattttatatcaacatcttatattgatataggcaaaaacttttattattgtaacttaagattgtcttatagattacatgctttgaacttaatcagataaatcagtctagtgctttcaaataacttttcttgtatgcattgaacatagatttatcgagtcagtcagattggtgcaaaacactctggtgctttcagatattttcatttgctttaggtaacaaatgaatatgtacatgttttaatgccttctatcatctgagtagctgcgaggtagctcattctaccttatcatctcatgtcatgtatgaagatgataacattaatttgaatatgggaattcacacatgagaaaaatcaaaatttatatatttatgaagtatgagaaatttgatttttaacactctttcgatttgcatttgaatgttttttttctttcttattttttttaatatgtttaaaggaatacagagttcgacaatgtatatgtgttattgatcatcaagagaagcatacaacatatatagatcgactatacaacagacgtcgtgaatctaggaaaattcctatagttgagaagatctaaaagctatccgtaactatacaattatcagcatctaatagagtatattctcagagagataaaccaagtgtgaaccaagccgaaccggcataaaccattcgccaataccctccctcaagctggagaatacagatttagtgttcccagcttggacttgaagtaacgaaaaccatctttcccaataggttttgttaagatgtctgcaagctgtgaaaaagaatccacatgacaaagctgaatctctcgttttagaacttcgtctctgacaaaatgtagatcaatctcgatatgtttcgtatgttcgtagaagaccggatttgtggcgatgtagattgcagatttactatcacattgcactaacattggttaagtatgaacaaccccaagagttttaagcatcatcttgatccaaataagctcttgaacaagtttagcaagtgcccgatattctgcttcagctgatgaaagactaaccgttttctgctttttcgttttccaactgatcggagagtctcctagctgcacaaatagcctgtgactgagcaacgtgttatcgggcagttgtcccagtctgcattacaccagccagtgacttgaaaattcccatcggctcgcaacaagataccttgtcctggatcagattttaaataccgtacgagtcgtaaagttgcgagccaatgatccaatcgtggattctgcataaattgagcaagaacatgaaccgagaacgcgagatcaggacgtgtaactcccaagtaaataagacgtcctaacaaacgacgatatggtttcggatcatgtaatagaacagactcggagagtgctagcttgtgatttgcttccaaaggaaagtgtgctggctttgctcctagttgatctgtttcagtaatgatgtctagtgcatattttctctgacaaagatatatgccagatgcatttctagccacctctattcccagaaaatatttaagttctcctagatctttcatatggaagcatgaagagagataggctttaaatgattctgtagctttcaggctacttccagcgataactaaatcgtcaacataaaccagaatatttagacgagtagtaccttgtgcataagtgaataatgagtagtcactgcgtaattgctgaaacccatactcaagaagagctgaagagagctttgcaaaccagcatcgaggtgcctgcttaaggccatacagagatttgcgcaatcggcaaactttattcttatcaacagactcaaaaccaggaggcaacttcatatatacctcttcttctaaatcaccatgtaagaaggcattgtggacgtccatttgatgtataatccacccttttttaacagcaatgtcaagaaacaatctcactgttcccatctttaccacaggagagaaagtctctccataatcttctccctcaatctgtttatttcccattggaaccaatctggctttatatctctctattgtaccatctgatttaaatttgaccttgaagatccattgactccctattgcctttttgttaggaggtaagtcttcaatggtccatgtgttgttttcttctaatgttccatattctgaaccaacagcatttcgccacttttcttcttgcatagcttgtttgaatgatcttggttccaagttggagagaactgcagcaacataagcaacatgtgtttcggagaaacggtgaacatccacgttgtgagtcagattttcagcacaaaccagattaatttcttcttgttgtttcggtttgggagcgtgtgggacaacaaaatcttttaaacgaaccgacggggtcctgttgcgtttccctttacctaatagctcttctgtcggaactggaggcataaccacagcagccggtgttaatcggctagttggagcaactggaattggattgggtgccgtagaaggcagaattttgtcaccggcggttggttcaggaagttgtcgggcaccaccgttgtcaccgtctgaattttcagaccggcgtgtatcatttgcagatgagatgggagtcgacagctggctggatgatacaggccctaatgcaacagacctaataggattgggcttacgaagcccacaatcatcattttccaaaaattcagatattggagcccacaaagctttagattcgtctgaagcctgcaagtgattaatcggagcaaaaggaaactgtgtctcagagaaaacaacatctcttgagacaaaaaattccaatttttctaagtcatataatctccagccttttttcccatacggataacccacaaaaacacaacatttacttcgggaagcaaatttatcaccacttttattctgatcatgggcatagcacagggagccgaaaactctgatatgatcataagttggagctttgttaaataagcgttcgaatggtgttgcgaagtcgagaactgaactaggagtccggtttatcaaatacgctgcggttaacacacattcaccccaaaattcaatgggtaaagacgcttgaaatctcaatgccctagcaatatttaagatatggcgatgtttcctttcagctcttgcattctgttgaggagtagctacacacgaggtttcatggatgataccattggtgagaaaatacttagttaagcatagaaactcagtcccgttgtcactccggatcctctttattttggtattgaattgtctctctgttaaagcacaaaactttttcaactgctctggagcttcacttttagtggttaacaaatacagccacactcctctggagtagtcatcaacaatagttaagaagtatcttgctccagaatgagatggagttctataaggaccccataaatcaacatgtattaattcaaaacaatttgaacttttattcatactcaatggaaaactatcccttgtctgttttgaacgaagacaaatatcacaaggcttattcaaactagaagaagaaacagaagcagaaacaaacggaagctttcccaccacttgcgtcgacggatgacccatccgattatgccacaactcaaatgacttgatttcctttgttgcggctgaagctgcgatctttgtactacgaaagtgaaaggtaccacccactcttttaccacacccaatcaccatcctcgaaatgcggtcctgaaccacgagaaaccgatcagccaactgaacaacacacttgttttcatccattaactgccccaaagacatcaaatcagttttcaactcttcaacatagtaaacagatttcattaccaaatgactaccaagactaatagaaccttctttgtaagaaacttgctctctaccgtctgccataatgatcaaaacagggggcatttctcgcacatttgttaaggtctcaaaccttccagttaaatgatgtgacgcccctgtatccataatccaaggagagagagaagacatactcgtttgttgttcagttgaaggttgttttcccgcattgagaattgattttatcattttccactgggtatcattcagtccatgagctccagatcggtcgtcgtctgtgagaacatgattagcttgttcagttgtcacgttttccacattcggcacataaacccgattagcaacctcttgggaggctccgcgtcccctgccaccacgagacgtactgccaccacgtcccttcccttgtagagtacgacccttgggtctatcaccccaccactctggatacccgatgacagcatagcaccgctctgcagtgtgaccagatcgattacacagtttgcagaagaaacttttctccttttcgtcagttggaagacgtggtttggattgcaccgcaaaagctgtcattgacggtgactcttctacgggaacacgcaagtcctcttcctgacgaatgatgttgtacacctcttcaagtggttgaatgggagtccgagccactagagttgatcggaccgcccgaaactgctcatcaaaaccattgagaaattcatgagtcttgtcttcctcccgatctgcctcttgagcagcaccaagattgcaggtacacttaccacaacgacaaacacgcaacggacgatgtgtggcgaggttatcccagatcctagtcaacttgccaaagtaagattcaatagccaaacctctctgtttgcagcaagctagctcagatttcagttgttgtagtcgtgacccattcatgacagagaacctctttttcagatgtttcccacagatcttgagccacatctctatgagaaatggtggatcgaagagttggttcaattgtcattttgatccatgacacaagaagagcttgaatcgtcgtccagtcttcaaaatcaggggaagtctcttctggtttggaaattgaaccatcgagaaatccatactttttccgtgatatcaacgtggttcgaaaaccacaagcccactcttcatagttgcttcccttcaagagaggatgagagattacggctccaggattatcagcagaagtcaggtcataaggagagattgttctccttacttcagtcgcagcggaggtgttgctttcagttgacattgtcgagaaaaaaaaaatcaagagttttgcttttcaggctctgataccataaaggaatacagagttcgacaatgtatatgtgttattgatcatcaagagaagcatacaacatatatagatcgactatacaacagacgtcgtgaatctaggaaaatccctacagttgagaagatctaaaagctatccgtaactatacaattatcagcatctaatagagtatattctcagaaaaataaaccaagtgtgaaccaagccgaaccggcataaaccattcgcaaataatgttaaattcataagaaatttctcccaacttgtgtcgaatccaacacctccacctaagagatttatcattgggtcaactctaagttggttctttattatttttaacaaacatacatatatctcttatcgattcagattaatcattggatattaaaagttcgtcgtggatttctttctctaatttcttcctatagagtcatgatacaagttactaaattactccattatatttgaacaatcaaaattgtgtcatgctttagatccattagaaaatcaagtgagtggactactcaacacctacacttatcttagatgtattagtctggtggtaaaaatatgggttaccccttagttataaaagataaataagtgatgcaagttatttttcgtattccgattcttattagttttcgaccagatcatgtggtccaaaataataccttgagcattagaaaagtctcgtaaaataccacatcagtatttcaaagcttcaacgtatctcctttttatttgtgtcctttagtaaatgaacttttttatggtagggttttttagtaaatgaacttacctcaacaatgcttttttttttagaatcaatgatatttaagggagagagaaaacaaaacaatttgtgttaatgtaaacattcctacttgtactatcagtagaccaacatcgtatattttaccaaaacaatatatatgacgatagaaaaacaatggtaattagaaaatattaaattttcctaatgtagatattcttgcatatagtaactactaaccagtgtcattatcccatcttgaatcttgatttgtctaggggttaatttagaaaatgggagaatttaagcggccaatatgtgaagattgatgtaaactaaccagtgtcattgtcccatcttgaatcttgatttgtctagggaagaaaaaggggtcaatttagaaaatgggagaagttaagcggccaatatgtgaagattgatgtaacattttcagcccccaccacacactcaaacccacaatggacacatgatggataagattataacccgttaagatctttttttctctttgatcaatcttcacatgggttctggtcctacttgtatatgaaatgttaccatactctcctctttgtattatacccttcacaaattttgtccatagggtttccgacaaaagggtttgaatctgaactgttctgatatttttaaccaagcctgatagtgatcgtgatcgcttgggatgaccagtctgtagtggcagatccatttttgttaccgggatcataatataacttttaagagaaaaaaatgttactgaatttgagtgtagtggggtcattatattaataccaaattttacaaatgatgatactgtttttttttttaacaatatttacatgcaattaaaaaatatttagttattcaatctgagacgtatcggcgctatgccattgctagtctatatttgttacaccgttaaactagttacacattgctttttagaatatgcaaatgatcaaatgcatggttgtttaaggttggatttttatttttttatccaaagtttaaggttgtatttgtgcccatgatttgatagcataccaaatcgattgggttaacaactgctatatattcttgcaatatattttgtttatgcatcgtaatgtatagggaagttatctgctaattaataattagagtgatttttggaaaacaaaatagagacagaattaataaaaccattttaaagagagaaagttttgacaaaaaaaaagcgagagaaagttttgataaatcaaccaaaaatgcatataacaatgacatgtgattgctttttaatttgtttgtgatttctgtaccgatctccatgttcgatttcatcactaaatcggataaaagtgtatgttcttctttaatgtttttgcatgaaatatcttgcaatgcataaagactgagatttctaccattacaaaagtggaaagagaacatctatgtaatattgggtctctgcatttgcatttgggaacggttttggcgttttcaaatgacaactcactcccacttatagtcactgacacacacagaaacttttaaaagaacaaccatcactccacacacttatgtgttcttcaaatgttttatttatcatttacttcaattatacgcacaagttacaacaagcaagtttttttgtgcaatattctcttttataatcctgtttgtcctataccaaaacctagattaatcactgtcaaaccaacatcataaaattgttggttaagtcatataaaccattcgtttccaataagtgccatagaaattgaatattgagcatagtcagaatatatatttatgtttggtctggttttgtttgacaaagagagtatattcaggtttataatctaattatcaagacagagttatacagaagatagataaacgatactagtgttacgtttctatacaatcttttgaaagtaaacaaaagaagccatgtggaatcaaaaacattcgaagcatgggaagatcaaataatccagtgatggagctagaacggaactaaatcaatcatgaaacctaaatagttttttaatctttctagaatctcttcttatcaaaaaatttccttatttgtataaaaagcctcgggaaagttaacttctcatcccaaactcattcctcagtttatctctcgactagagagtgaaggaaaaatcgaaggataatctgtttcttccagcacaagttaacttgcaaggtagttttctcccttcgatttatactgtcttgctcactttcttaggctatttttaggacgattcatttttttaatttgtatgttattcatctttttagggttcttgtcacattttcggccttaatttgtatgtgtaaaaatataaatagtgaagtagatatcattttatatcgtctagcactctagctactagcttgatctgaaactagtatatatataaattatttgaatgtcagcttttttttgtgaaagtcacacatcacatggtagttgcatatttcaagaactcaactgaattcgatttaaaatttctccaatcataattcataaagatatgtatttcaatttttttaaataaaaatagattttcctatttaccatgaaattttttactctttttatttgttctcatataaatagagtgataaactattttacaaagttcatttatgtggaaattgataaaatgacaagaacatgaaaaaaagacaaagatttttagttgaaatctgtgatcgatcgaacagaatcggttcagctactgtttttgtaatagaacaactgtccatttttataccaaaatgactaaaccacccttagaagatgcatgtgttgtgtggtactaaaaactcaaaaaagcattgaaactttacacctttgtgtcgttttctcaattttacccccgcttcatttggaattgtcactctcaaaattggcgtattttccagttcatatcttcattcatctatggccccataaaccataactctttgaaccatatttaataatgttacctgcatgcatatacattcatataaaacatgtattcattatcatgttagatatgtctagtctattatttcccaaaagaaagacacctaagagagcaagattcttgttattcatgataacatttttgaagattcaaaaaaaatgagtgattgatgaattatttatggtcagcatctagtaaaatcatatcgacatatccagtcagccttagtagaaatgcaccaaagtgatatagagtggatttctctcgatccgtgtagaaatggaccaccacattgtctgtttagaatattatatttttttgtataaaattgtagacataatctcttattaataaatatttaatgcaagttagttatttttaattttatgaaaagaggttaactccaatatgtaccatactacttgaagaagttaaatgacaaaaaaaaatataagtaatactaccatttccatatattgtactgatatttcaaactttaatcaactttcctttctatttctccttctttttttatggtcaaacccattctgtttatgactaaacatatgacatatctaaccgttattaattagttcacatatcacatatttgtatagtgttttcattttcagtaatcaaaccatccatctaccacaaaagaacttggtcatgtgtccatttttagaaatcaataaaatattataccatatatttatagtatctaactttaagagaataaatatttttatttgccgattcatatacacacacatgcgtgtggtatctatgtctatccattaaactaattatatataaacttattttctggccacaatttttgtttcgtgtatagagagagctcaaagatggaaccaacagaaaaaccatcgaccaaaccatcttctcggactctacctagagacactcgtggctctctcgaagtattcaacccgtcaactcagctgacccgacccgataacccggtgttccgtcctgaaccaccagcgtggcaaaacttgagtgatccacgtggcaccagtcctcaaccccgaccacaacaagaaccagctccatccaaccctgttcggtctgatcaagaaatcgctgtcacgacctcatggatggctctgaaagacccatcaccggagacaatctccaagaagacgatcaccgccgagaaaccacagaagtcggcggtggcggctgagcagagagcggcagagtggggattggttttgaagaccgatacaaagacgggaaagccacaaggagtaggcgtgaggaactctggtggaactgagaatgatcctaacgggaaaaagactacatcgcagagaaactcgcaaaactcttgccggagctccggtgagatgtcggacggagatgttcccggcgggaggagtgggattccaagagtatcggaagatctaaaagatgcgttgtcgacgtttcaacaaacgtttgtggtctcagatgctacaaaacctgattatccgattatgtatgcaagtgctggtttcttcaatatgactggttacacttccaaagaagtcgtcggcagaaactggtaaaaagttattcaaaaaattttagagcatttttttaatatataaaatacgtttcgttttctgtaataattaccaaaattgcaaagttttttctaattaaatatcatagttttgtttttaggtttatggttactataaatgtataaagatatcttaaatgacttagtaattctttctaaattttcaaaaattaaacctaactttattttatttttttagaacttttcgaaactgtgtaccaaaattacaaagattaagttttaggtatggttatcctaaatgatttagtaactcttactaaatttctaaaaactttttataaacctaatttttatgttgtttttccaaactaatagccttttataaactaagtttattttttaatgataacttaaaatatttcttttaaatcgaacatttctttgcaaattcgaaaaatttcttacaaaagtttccaccattttttgttcaatgaatgaattttatttacaaaaagaaagaagaaaagaacataatttgggtttttgttttattgtagccgatttttacaaggatcaggtacagatgcagatgagttagcaaagataagagagacattagctgctggtaacaattattgtgggcgtatattgaattacaagaaagatgggacctctttttggaatcttctcacgattgctcccattaaagacgagagtggcaaagtcctcaaatttatcgggttagtcccttattcctttttatttactcgtttctctcctttatttctttcattcaaaatgtcaccctttttaatgggtctaagtgtggacctgtgatttgtgttgctttctccgcaataattcaaagatttgtatcaccgacggatcctattgtagaataacaaaagagaataatcaatcaggaaaaagaaaagaattatagaatctgataaaaaaatatgattttgaggaaaaatcagaagataccaatatgttttgtttatttggaccagaatgcaagtggaggtgagcaagcacactgaaggggccaaagaaaaggctttgaggcccaatgggcttccggaatctctgattcgatacgatggtatttacatactttctttttctatttgtttttccaaatttttttccatttattatgttttcttaaaaatattttcaaattttgttttgtaaaagcccgccaaaaagatatggcgacaaactcagtgacagagctagtagaggcggtgaagagacctcgggcactaagcgaatcgacgaatctccatcccttcatgacaaaatcggagagcgatgaacttccgaaaaaaccagctcggcgaatgtccgaaaatgttgttccgtcaggccgaagaaactctggcggcggaagaagaaactcgatgcagcgaatcaacgaaattcccgagaaaaaatctagaaaatcttccctttccttcatggggtaataatccttactagatcatttgtttacctgacaattactttataaaaatcgatttagtctttgatatgattgttgtgatactctggtgataggatcaagaagaagagcgaatctttggatgaatctatagacgatggatttatagagtatggagaagaagacgatgagattagtgatagggacgagagacctgagagtgtggatgataaagtgagacaaaaggaaatgagaaagggtattgatctagctactacactcgaacgtatcgagaagaatttcgtcatcactgatcctaggcttcccgataatcccattgtaagaacaaatgttttagaaaaatggaaactttttttgttatgtttcatttcgattggtctgaaaacgtattgtttgctttgtcctatgtttctagatttttgcatctgatagtttcttggagctcacggaatatagccgtgaagaaattcttggaagaaattgcaggtattacatgaatgtgatctcaaaatgtcttttgaaaatatttttgagcatagagcatgtgtttataaattttgtttcatggttttaggtttctacaaggtccagagactgatctaaccacagtgaagaagattcgaaatgctattgataaccaaaccgaagtgacagttcagctcatcaactacaccaagagcggtactcgattttttcgatattcttagattaatctgtcgatcattgtataaagttttaaatttacattatattctctgtggcaggaaagaagttctggaacattttccacttgcaacctatgcgtgatcagaaggtataatggtttacatagatatcttgcattatacggcaccttcaaactaatcctcaatttcttttggtttatgaatttaaaactgaagatgtctatattctttctttgatatgttgttgacagggagaagtacaatactttattggagttcaactagacgggagcaagcacgtagaaccagttcgcaatgtcattgaagaaaccgcagtgaaagagggagaagacctggtctggaatcctaaactattgatcttgatttagtattcgtttgatagaaaatcaagtattaaaccttaatctatattctttaggtgaaaaaaacagctgtgaatatcgatgaagcggttcgagaacttcctgatgccaacatggtaagtgattgtctaaggatctgaatatgatcattttagattaaggtttattagaatatatctgacagaatgttttattgtgtcttgtttctgaagacaccagaggatttatgggcaaaccactcaaaggttgttcattgtaagcctcacaggaaagattcaccaccatggatagctatccaaaaggtgttggaaagtggtgaaccgattggtttgaagcatttcaaaccggtgaaacctttgggttctggtgacacaggaaggtctgaaactctatctaatctaatgaaatagcttacaaaaaaaaagaacatttccttcattaatcttataatatcccatttgtgttttatcagtgtgcatctagtggaactcgttggaacagatcagttgtttgcaatgaaagcaatggacaaggctgttatgcttaaccgaaacaaagtaattacagtaacttgcacttcaaggaatcttgagtttcgctttttatttgtaagttttgtagccactgatataattttttgcaggtacatagagctagagctgagagagagatcctagatttgcttgaccatccttttcttcctgcactctacgcttcttttcaggtcaaaacctctgtttacacatatatatatatatatatatatatatatatatatgcgtgtctctttggtctttggttactaatggatcatgttttattctgcagacaaaaacacatatatgtcttataacagattactatccaggaggagaactcttcatgctcctagatcgacaacctaggaaggttctcaaagaagatgctgtaaggtacaagtgttcctcgctcgaaaaagtctcaagatttcttcacttaaatattgaactaacaaaaaccctgcatgaactttcagattctatgctgctcaagttgtcgttgcactcgagtatcttcactgtcaaggcaatccattcaacctcttctttaattacaaagaaaattttggatgcaaggaatcttgacatgatactaagttgatctttgtaatttttcttaaattcaggaataatttaccgagacttgaaaccggaaaacgttttaatccaaggcaatggcgatatctctttgtcggattttgatctgtcttgcttgacatcttgcaaacctcaggtttgatttctctcaacctttcccttcagattgtttccacttctactagagagtttgctcatgtatactaattaagggtgattaatgaatcttgtagctgttgattccgagtatagacgagaagaagaagaaaaagcaacaaaagagtcaacaaactccaatcttcatggctgaaccaatgcgtgcatcaaactcatttgttggcactgaagagtacattgctccggttagtatattatatataccaatttaagtacagtgattaaggtatttaccattgtcttaaccagtagttgatgtctcatatggataggaaattatatccggagcaggacatacgagtgcagtagactggtgggctcttggtatacttatgtatgaaatgttatacggatacactccttttagaggaaaaacaagacagaagactttcaccaatgttcttcaaaaagatctcaagtttccagctagcattcctgtaatggatcaatcactatatttctataaactaatctcatgcataaaaatcgaggatcatatttaattgttctgttattggtttgcaggcaagtcttcaagtgaaacagctgatttttaggctgttacaacgagatccgaagaaaagactaggttgttttgaaggagcaaatgaagtcaagcaacattctttcttcaaaggcataaattgggctctgattcgatgcacggtataacttcacacattctctttacttggtatataagaaacatttcggttttacttgtgaaagaagaaaactaatcatcttatgagattattttgatatgcagaaccctccagagctcgagactccgatattttctggtgaagctgaaaacggagagaaagttgttgatcctgagctagaagatctgcaaacaaatgttttttgagatttggactaaacgtttatcgttttcttttcaagaattgtttgaaactctttgttctccaaaaatctcgtttttaattattttcattttaccattatctttatttatttataatgccaagtgtttctaataatttgtgtgagtttcttaagaatatgttttttatatatgtcaataaaattaatcaagttttgcatatgtttttgtttgtttcattaatcaagttattataatgcgaattcatgtgattaaattggtaaagttaaacaaagaattgatatttttcataatttagttgaaggctacaaaagacaatggaaaccataaaaaaaaaagttcaaatcagaattaaggcttgaattgggtacaaaccagaatgattatgatagagtagattagatccatgtttctttgaatcttttaagtgttcttgttctgtttgtgtttcagaaaactataactttgtggaggactaattactcacagcaacaccgtttctgctgcatcctatgtgtgtgttttagtagttattgtgttacttagtaagaaatgctcatttgattcattcacattgcgtcaagtgatctgctctgtgattgttcttgacattttcagtatgtatggctggccaaatctgagagcttttcatgtctaaattagtttctcgagctctttttcttttgtgatggtttcagtcttttcttttataggtttcttcagctataatgcttgaggagggaataaagtatcatctactatgggcgggtcagaaggagctagcaatctctattccaagattccagcgatgtacagatacaaaacatgcaagctgtcagagggaagggtgtgaaaactggtcagttaataggtgaattttgatgtagaattgaaacagtgactacttataggagctgtatatgctaatcttgtgataaatattcagtgacaacttatgacccaaaaagtgggttagtttgtgaattgaaacaatgacaacttgaaactgcaattgcaaactaataatgaaagttataaagtctcttatcatttaccaaaacttccagaaacacataccaaatagagagttggatacttcatcttacaacttaaaactaataaacaaaaccgttactaaacaattatagatccacattgcaaaaaggggtggttcaagagtgcaccaatcccccaccttgaagcagggtccctttttaaacatctgctgagaaaatgctgtgcttcttcagataaccaatccggtatataaggaatgtaacagctttgaccgatgagaatgtcccaatctacagaaccgagatcactatgttctccccatacttgttgtcccgttaacatttccaaaactgtgcatccgaaagcccacgtgtcaacagcgtaatcaacaatcccatgtcgtataagctccggagacatgtatcgcgttgtgcctctcctatgacctgatgctttttcatactcgcttgaacccttctccaatgctaaaccgaaatccccaatctttgccacgtacccattaggtcttatccggttctcgacaggggctagtaagatattttccggtttgatgtcacaatgaataatgtttgccctgtggatgtagtcgagaccgtaaaggatatctctagcaagaagtttcacatctttctctgacaatcctccaaggttactgttgaccaagtcgaagaggcttttgccagagcaatactcgagaatcaaattgtaattcgttctctcgccaccgaacagagtctcctcgcgtgcaatctcgtggccatagcaacgaacgatgaaaggagatgagagacgggttaatattctttcctcgtccattagactcgaagctcgtgaaatctctgcagatttgatcgccatggtcgttttagttttggccttcttacttgtcgccagataaaccgaaccgtaagagcctcttccaaggaactcagacttgatccaagatgaagactttctgactactccgtcgaatacttgtttggttatctcttcaacactgagactactactactcttcggtgtaaatctcttccttttattgttcttcagaaggatcggagatagtttaagagtgaaaatagggttttgatcaggaagaggagggatcaccgagggtgaatatctaggtctttttgtgagaggagggtctgataactcgatgaatttgagatgaccatatcttttgtggtaaccagacaacgaaatctctgtctctatcatctccattcttcttctttctctcgcttttctctgtaaaatatttctgaaagtgatgaaaacaaaaacagagaagaagaaaccgaaaatttcctttttataagcttgctttgactttggtcaaagtttccttttttctagcggttaatgagaagatcgtagttagattcagtttcattaagaaatcttcgttagattcagtttcataagaaaatctaatgcttacatacaaacacgcgtagtttcgaatatatttgtttttcttaatttctttaatgaattatgaatctgcagacatttttctctcacacttttacagataaataaaaatatacatggcaatccattagtagaccaatcacatttgtttcagtaattaaagcaagaaatgtaatctaaatagcattctcaaatattattattacaattttattatttgatacgatttttttttttaattctagtgtttagactagtttttttattttatttcaaatcaccagttatattttcgataaacgttaatttcctaaacactaactaatatttagtttttttaagaaatttcaattttttaaaaccactagtttttaatttagaaaatattagtaatataaacaaatttatgaatttagttatttatattatattataattataaatttaacatgtactcaaatctccttgtttttaatcggtatcatgaagtgatactttaacattaacaaatattttctcaaattttaaatgtgtattaataaatcttagttagattcattttcataagaaaatctaatgcttacatacaaacacgcgtagtttccgaatatatttgtttttcttaatttccttaatgaataatgaattagcagacatttttctctcacacttttacagataaataaaaatatacatggcaatccattagtagaccaatcacatttgtttcagtaattaaggcaagaaatgtaatctaaatagcattttcaaatattattattacaattttattatttgatacgatttttttttaattctaatgtttagactagttttttgttttatttcaaatcaccagcttatattttcgataaacgttaatttcctaaacactaactaatatttagtttttttaagaaatttcaatttttttaaaccactagtttttaatttagaaaatattagtaatatagacaaatttatgaatttagttatttatattatattataattataaattttagcatgtactcaaatctccttgtttttaatcggtatcatgaagtgatactttaacattaacaaatattttctcaaattttaaatgtgtattaataaatcttagttagatttattttcataagaaaatctaatgcttacatacaaacacgcgtagtttccgaatatatttgtttttcttaattttcttaatgaattatgaattggcagacatttttctctcacacttttacagataaataaaaatatacatggcaatccattagtagaccaatcacatttgtttcagtaattaaggcaagaaatgtaatctaaatagcattctcaaatattattattacaattttattatttgatacgatttttttttaattctaatgtttagactagttttttgttttatttcaaatcaccagcttatattttcgataaacgttaatttcctaaacactaactaatatttagttttttttaagaaatttcaatttttttaaaccactagttataatttagaaaatattagtaatatagacaaatttatgaatttagttatttatattatattataattataaatttttgcatgtactcaaatctccttgtttttaatcggtatcatgaagtgatactttaacattaacaaatattttctcaaattttaaatgtgtattaataaatcttagttagattcattttcataagaaaatctaatgcttacatacaaacacgcgtagtttccgaatatatttgtttttcttaatttctttaatgaattctgaattgacagacatttttctttcacacttttattgataaataaataaatattcatggtaatccattagtagaccaatcacatttgtttcagtaataaaagcaactaaaatttctaaattacgaactaaaactaaggtaaaaataatttgatttttgatcaaattattttaggtattttgtgattttagatttatttgttcagttggacattttcaaaaataaccttcaaaatggtaattatttcggtttagttcctatcgattatgtgttggtttggaaatctgaatggagaaccgataaagaaccaaatgcattggttgatcattattttattataatgtaatgttttattaattaattttggtttcagttttttttgtatatatattttttatatagtgataaagaacccttataccccatagcctctcctccttgtccgaacgattccactagcttgagaaaagaagctgcgtttggtgggcagagattggtacagagtgaccattgatgtgcacaagagggtctgatcagaaaagagcaagttctcagggagaagatgaggtctcgaagagagaatggagtgtgagatgtgtatgtagagactgtggtgttgatgtattgcgatgatctcaagtactatcatcaaagtcttggtctttcttaaggtattatgtttatgaacattgatttgattaagtgctgtctcttatatagtgaattcgctggttgatagacttaaggcttgaattgggctcaaaccagaatgattaggatatagtagattagatgcatgtctctttgtatctcgcaagtgtacttgctctgtttgtttatgaaaaaaagtggaactttctgctgcatctttggtgtgtgtttgtgttttagtagttattatgttacttagtaagaaatgttcatttgattcattcacattgcgtcaagggatatgctatgattgttcttgacattttcactggccaaatctgagagctttcatgtccaaacatctagccaaatatagaatactttctcatatccgcttgggtcctaggtagtacacagaaccgatatgatatccacgggtatgattgtgcaagaaccgtcatgcatattggccatagcccaaaaccaaatcgaaccggttttcaggccatttctgattccagtttatttttttactaaagtatgaaaccacatttgtagtgttgctacttaccactatctgaatggtttgaagctt

SEQ ID NO: 1357 - DNA, 107285 bp, Arabidopsis thaliana
gaattcagggtattgtgtgacgcattgttaaccccatgtgctctggcccaatgcttaatctgacatatgacaatattcacattagtactaaacaattgacagtgcttgtctcacaagccattagtgctagaatgataaacgaaaagctttagtataataactgaaatcttaccaacaaacaaagtttctgaaacctatcatcaatttgagatataatccgaatgatctgtgaagttaaaatgccgtctttgctttcaactgtcaaatcacattcgataccagtcccttgatcacagaatctgacaattggaaccctagcacttaagataggtacaacattcctgacaaacccttgccctatacaaaagaagtgtaggtaagatatatgtatgaaactcatcattttaagaaagtttcacatgtaatgacatacacctttatagcttccaatgagttagaatacatataaaaaaagaatgtctcggtaaaattcagtttcattcagttaaacgtaccctccaaagagcggagcttcgttgcaaatcttgtaagaatttctagcttcttttcacgataaaattcagatgttccgctactaaagttaatagatacatccaaatccttttgtgaggaaaacgtattcatcgcaaaagagccatacgcctcaaggaccgggctgctctcttctgatttacctaataaacaaaaaataaataaaacctctactgaatatggatattggtcgagcttaataagataaaaaagactacaagacttatattaccaaaaatatctatagccatagcattgaggtttttgaccaattccttcctagtattgtaatcagcagaaaccggtcgaaaagagctgtaggcatcatctaataccttatcaaggtctagtaagatataactatcaatgttatatctcttagatgctatggacatagtgttcttcactttcttttgaatccctgacatccattaacagaagccacaaaaaacaaaaaagattgcaaaatttgtagtgaacacaaacaatatctaggaaatttcagccaaagagttgtataaacctttactcgaaacattcttttccccagcttgattttttcgaaagtccatagtacctctcaagcagagctattaaacctgcaataacatagaaaaaatcgaagattcagtggggaagaagaactgtgaacaactagagtcaaaatagaacttgccaaattcgtgagaacctattttttttttttatcaaactaagatctaagggagttatagagtacttaggatgagatcaaacaatattgggatatggagaaccgagatcgacggtcgagatgagaagatcaagatatggcaagaagatattattctagaaggtaaatgttaatattgaagtttaggaaatttaacattatctctaaatatattatttacatttatgtttatcttaatctctatataagagaatgtaaattattctattattcttatgagagtctattataattctttctaaacacttttgtgttctttactctcatcaaatttatcaaacaaaggctcgatttttaagcataaattcgatcatgtttctaccaaaacgaaaggtatggttttcttaaaacccacgcaacatatgaagcagaagggacgcagaaaattggctgttgagaatttagggtttagattcttacggaggaaaacgtgacgacttaatcggcaagagacacaattctggtggcagtcttggtaatatttttatttattttaaggttatttcgatacttatactaaacacaaacataatccaataaactaaagtaaaccgacaacacctctaaaccaagtcagcttctgattatttgatagttttctctttcgacagagtgtagcaataaattaacacacgaccatgaagttacaatctgaacatgagcataatgatttattttggtttttattcagtctacattctcatttttttcctgatacattggacaagaagaagcagatactatataataaagtacatcatgccttgtcatattaatagctaacactaaagatagtggcaacagttactaaatggctcacacaaaggaagcttcagaatgtgatgacttgtttaggttgccttcctagcttcccgagagctttatcgagagcaacagggaactcttcgaagggaaccaattccgttctgtcagaagaaaccaaccattgatttaaatgataagcgaagatagtttttcatgggagctcagaatgttaagacttactcgtattttagcttcccgtctcgtgcaagcccgaggagatagtctatcatctctctgcattcttttactttacccatactcaaccaactctgcagccaaaatcctcttaaggccaaatcctgtagggtaatcaaacattaacacagtgcacaaaagccatagatcttaaacacccaacgaagtcattagaaagctcggtttgtgcgctatgaataagatctaaatttaagacataccgataacagtttagtttttccgaatgatcttttaattaccttaaagatgaaagatgttgttgacacagtgattggcttcttagacatcccaccatatgttaccatggttcctccttccctgaaatatatatgtattcacaaccttcagaacagtgggaattcattcaactaaaagtgcgacaaacagatatgttcactgtacctgagatatttgaggacaagagaggcagcattgccaccaacacagttgaatcccagagctggttcaggtaagttaccctagaccacatatacgttaagctttggatactcagaaatttctgctatagaatagctagacttaaagcttaccaaaagacttttcacattctttacattcagttgactctctgaaaagacttcatctgcacctagagctttcagctgctctcttgcttcatccgacccagccctaaaatcagtagcataggaggacactttacttggctagaaccgcttcaattgttcgtaagcaatatcttaaacacaattcatattatattacacctgtcacgaataaggttgatggtactgatgccacggagtcttgccaactgaatgacacactgacccacaatacttgttgcaccattctgtacaacagaatcccctgttccagagaaatcctttgttaggcaaaaagaaagtaaagaccagttacattaaagacataatatacagtccaaaccagaattcaagttcacaaagtcctcaagcatcctcaaagccgtcaatggattaacagtaatcgtcgctgcatactccattggacactctttatcgattttgtgccacacactctcttccttcacaacataagtctgccaagtccctagttcagagagattcacatcagactatttcacaaatcaaaaagggatatcattaaactgttttgaagtcacactctcttttgttgcttcacttaacataacattagagagtacctgaagaaggtggagatggaatgacccaatcaccaggagaaaaaccattaacattggagccaactgcataaacttcaccaacaccttcataaccaccaaccgctggtaccggtggcctcaccggatacacacctaaacaatcatcattttccaaaacattgaactcattatctaactcttagctttgtgaccaataaacaaagatggagacgatgatgtttagggatactattattgattcccaatcaaaacttatcgaacataaaccttcaattcgattgatatcggaggggttgatcggagcggcgatcattttaacacaaacgtcgttttctttcacttccaccggcgggagattcaccaatctatcttcgtcaaaggagaacaaaaggtgtaaatggagattatgtgtgtttctgtaaacacagagtaaaagtagacgaacctggtgacggaatcgggagagccgtgttcttcgtagacgatggcttttgacggtggtgacataatggtggagaatgatttgatacagagtgttggtgtttcgccgcgtcggattgacctgaaattcgccgtcgatgagaattttagagctcggccgacgactgactccatcaacgccgccatatctctccgccgtcaaactctctctggcaacgatataagaaacgacgtcgttttggttttttctcgttcttaacaattttagcaatcgctgatagtatccgaacgacaacgtttcagcacgtttggttttcttcgcacaaatcaaattagggacggggggaaaaattgtaaccgagaaaacaaaccgaatctaaaccaaaaccaaaaccaaatctaaagtctatttttttttttccactcacattctcctaaagtctattttgtttagggaaattctatattcgaaacttttctttattggtttgcatctaaaccggtccatagattgtcaaaataattgaaatcggagtacatgatggtggtatagtgctcgaaagattcactatgatatttttgagagaaatttatcctatgtaatttagtttttggaaaaagaaaaaaaattggatatgtacaaaacgattgttttttttgctagtatttagctcaaaaatactagcaatatcaaaatcaccaaccccaataatctgaagtttgttaaaaatttatattgatgattggctattgaaaatgtcatgaataatcgatacatgaatacagtttaaattacacaaaatatagttgcacattaatggagtagcgagtagagggacaagtcatgaagaagatgagtcagaaattgccaacaatttgtaaagtgacctgtaacagtctcatcttgttaggtcgctttaacgttctactttgccaaattatctttccttaataatataattgcatctatgaatagatttatatatgtaactagggtatagtagtgaagcgcaattctatgaattcttgtcccttgattttggtttttcttctttgttgtaatgtttaggtagtgcaacagtgttatgtatatattggatactgtcccggaataaatattatctcaaaatttttgtcaatgtgaaattttatatcaacatcttatattgatataggcaaaaacttttattattgtaacttaagattgtcttatagattacatgctttgaacttaatcagataaatcagtctagtgctttcaaataacttttcttgtatgcattgaacatagatttatcgagtcagtcagattggtgcaaaacactctggtgctttcagatattttcatttgctttaggtaacaaatgaatatgtacatgttttaatgccttctatcatctgagtagctgcgaggtagctcattctaccttatcatctcatgtcatgtatgaagatgataacattaatttgaatatgggaattcacacatgagaaaaatcaaaatttatatatttatgaagtatgagaaatttgatttttaacactctttcgatttgcatttgaatgttttttttctttcttattttttttaatatgtttaaaggaatacagagttcgacaatgtatatgtgttattgatcatcaagagaagcatacaacatatatagatcgactatacaacagacgtcgtgaatctaggaaaattcctatagttgagaagatctaaaagctatccgtaactatacaattatcagcatctaatagagtatattctcagagagataaaccaagtgtgaaccaagccgaaccggcataaaccattcgccaataccctccctcaagctggagaatacagatttagtgttcccagcttggacttgaagtaacgaaaaccatctttcccaataggttttgttaagatgtctgcaagctgtgaaaaagaatccacatgacaaagctgaatctctcgttttagaacttcgtctctgacaaaatgtagatcaatctcgatatgtttcgtatgttcgtagaagaccggatttgtggcgatgtagattgcagatttactatcacattgcactaacattggttaagtatgaacaaccccaagagttttaagcatcatcttgatccaaataagctcttgaacaagtttagcaagtgcccgatattctgcttcagctgatgaaagactaaccgttttctgctttttcgttttccaactgatcggagagtctcctagctgcacaaatagcctgtgactgagcaacgtgttatcgggcagttgtcccagtctgcattacaccagccagtgacttgaaaattcccatcggctcgcaacaagataccttgtcctggatcagattttaaataccgtacgagtcgtaaagttgcgagccaatgatccaatcgtggattctgcataaattgagcaagaacatgaaccgagaacgcgagatcaggacgtgtaactcccaagtaaataagacgtcctaacaaacgacgatatggtttcggatcatgtaatagaacagactcggagagtgctagcttgtgatttgcttccaaaggaaagtgtgctggctttgctcctagttgatctgtttcagtaatgatgtctagtgcatattttctctgacaaagatatatgccagatgcatttctagccacctctattcccagaaaatatttaagttctcctagatctttcatatggaagcatgaagagagataggctttaaatgattctgtagctttcaggctacttccagcgataactaaatcgtcaacataaaccagaatatttagacgagtagtaccttgtgcataagtgaataatgagtagtcactgcgtaattgctgaaacccatactcaagaagagctgaagagagctttgcaaaccagcatcgaggtgcctgcttaaggccatacagagatttgcgcaatcggcaaactttattcttatcaacagactcaaaaccaggaggcaacttcatatatacctcttcttctaaatcaccatgtaagaaggcattgtggacgtccatttgatgtataatccacccttttttaacagcaatgtcaagaaacaatctcactgttcccatctttaccacaggagagaaagtctctccataatcttctccctcaatctgtttatttcccattggaaccaatctggctttatatctctctattgtaccatctgatttaaatttgaccttgaagatccattgactccctattgcctttttgttaggaggtaagtcttcaatggtccatgtgttgttttcttctaatgttccatattctgaaccaacagcatttcgccacttttcttcttgcatagcttgtttgaatgatcttggttccaagttggagagaactgcagcaacataagcaacatgtgtttcggagaaacggtgaacatccacgttgtgagtcagattttcagcacaaaccagattaatttcttcttgttgtttcggtttgggagcgtgtgggacaacaaaatcttttaaacgaaccgacggggtcctgttgcgtttccctttacctaatagctcttctgtcggaactggaggcataaccacagcagccggtgttaatcggctagttggagcaactggaattggattgggtgccgtagaaggcagaattttgtcaccggcggttggttcaggaagttgtcgggcaccaccgttgtcaccgtctgaattttcagaccggcgtgtatcatttgcagatgagatgggagtcgacagctggctggatgatacaggccctaatgcaacagacctaataggattgggcttacgaagcccacaatcatcattttccaaaaattcagatattggagcccacaaagctttagattcgtctgaagcctgcaagtgattaatcggagcaaaaggaaactgtgtctcagagaaaacaacatctcttgagacaaaaaattccaatttttctaagtcatataatctccagccttttttcccatacggataacccacaaaaacacaacatttacttcgggaagcaaatttatcaccacttttattctgatcatgggcatagcacagggagccgaaaactctgatatgatcataagttggagctttgttaaataagcgttcgaatggtgttgcgaagtcgagaactgaactaggagtccggtttatcaaatacgctgcggttaacacacattcaccccaaaattcaatgggtaaagacgcttgaaatctcaatgccctagcaatatttaagatatggcgatgtttcctttcagctcttgcattctgttgaggagtagctacacacgaggtttcatggatgataccattggtgagaaaatacttagttaagcatagaaactcagtcccgttgtcactccggatcctctttattttggtattgaattgtctctctgttaaagcacaaaactttttcaactgctctggagcttcacttttagtggttaacaaatacagccacactcctctggagtagtcatcaacaatagttaagaagtatcttgctccagaatgagatggagttctataaggaccccataaatcaacatgtattaattcaaaacaatttgaacttttattcatactcaatggaaaactatcccttgtctgttttgaacgaagacaaatatcacaaggcttattcaaactagaagaagaaacagaagcagaaacaaacggaagctttcccaccacttgcgtcgacggatgacccatccgattatgccacaactcaaatgacttgatttcctttgttgcggctgaagctgcgatctttgtactacgaaagtgaaaggtaccacccactcttttaccacacccaatcaccatcctcgaaatgcggtcctgaaccacgagaaaccgatcagccaactgaacaacacacttgttttcatccattaactgccccaaagacatcaaatcagttttcaactcttcaacatagtaaacagatttcattaccaaatgactaccaagactaatagaaccttctttgtaagaaacttgctctctaccgtctgccataatgatcaaaacagggggcatttctcgcacatttgttaaggtctcaaaccttccagttaaatgatgtgacgcccctgtatccataatccaaggagagagagaagacatactcgtttgttgttcagttgaaggttgttttcccgcattgagaattgattttatcattttccactgggtatcattcagtccatgagctccagatcggtcgtcgtctgtgagaacatgattagcttgttcagttgtcacgttttccacattcggcacataaacccgattagcaacctcttgggaggctccgcgtcccctgccaccacgagacgtactgccaccacgtcccttcccttgtagagtacgacccttgggtctatcaccccaccactctggatacccgatgacagcatagcaccgctctgcagtgtgaccagatcgattacacagtttgcagaagaaacttttctccttttcgtcagttggaagacgtggtttggattgcaccgcaaaagctgtcattgacggtgactcttctacgggaacacgcaagtcctcttcctgacgaatgatgttgtacacctcttcaagtggttgaatgggagtccgagccactagagttgatcggaccgcccgaaactgctcatcaaaaccattgagaaattcatgagtcttgtcttcctcccgatctgcctcttgagcagcaccaagattgcaggtacacttaccacaacgacaaacacgcaacggacgatgtgtggcgaggttatcccagatcctagtcaacttgccaaagtaagattcaatagccaaacctctctgtttgcagcaagctagctcagatttcagttgttgtagtcgtgacccattcatgacagagaacctctttttcagatgtttcccacagatcttgagccacatctctatgagaaatggtggatcgaagagttggttcaattgtcattttgatccatgacacaagaagagcttgaatcgtcgtccagtcttcaaaatcaggggaagtctcttctggtttggaaattgaaccatcgagaaatccatactttttccgtgatatcaacgtggttcgaaaaccacaagcccactcttcatagttgcttcccttcaagagaggatgagagattacggctccaggattatcagcagaagtcaggtcataaggagagattgttctccttacttcagtcgcagcggaggtgttgctttcagttgacattgtcgagaaaaaaaaaatcaagagttttgcttttcaggctctgataccataaaggaatacagagttcgacaatgtatatgtgttattgatcatcaagagaagcatacaacatatatagatcgactatacaacagacgtcgtgaatctaggaaaatccctacagttgagaagatctaaaagctatccgtaactatacaattatcagcatctaatagagtatattctcagaaaaataaaccaagtgtgaaccaagccgaaccggcataaaccattcgcaaataatgttaaattcataagaaatttctcccaacttgtgtcgaatccaacacctccacctaagagatttatcattgggtcaactctaagttggttctttattatttttaacaaacatacatatatctcttatcgattcagattaatcattggatattaaaagttcgtcgtggatttctttctctaatttcttcctatagagtcatgatacaagttactaaattactccattatatttgaacaatcaaaattgtgtcatgctttagatccattagaaaatcaagtgagtggactactcaacacctacacttatcttagatgtattagtctggtggtaaaaatatgggttaccccttagttataaaagataaataagtgatgcaagttatttttcgtattccgattcttattagttttcgaccagatcatgtggtccaaaataataccttgagcattagaaaagtctcgtaaaataccacatcagtatttcaaagcttcaacgtatctcctttttatttgtgtcctttagtaaatgaacttttttatggtagggttttttagtaaatgaacttacctcaacaatgcttttttttttagaatcaatgatatttaagggagagagaaaacaaaacaatttgtgttaatgtaaacattcctacttgtactatcagtagaccaacatcgtatattttaccaaaacaatatatatgacgatagaaaaacaatggtaattagaaaatattaaattttcctaatgtagatattcttgcatatagtaactactaaccagtgtcattatcccatcttgaatcttgatttgtctaggggttaatttagaaaatgggagaatttaagcggccaatatgtgaagattgatgtaaactaaccagtgtcattgtcccatcttgaatcttgatttgtctagggaagaaaaaggggtcaatttagaaaatgggagaagttaagcggccaatatgtgaagattgatgtaacattttcagcccccaccacacactcaaacccacaatggacacatgatggataagattataacccgttaagatctttttttctctttgatcaatcttcacatgggttctggtcctacttgtatatgaaatgttaccatactctcctctttgtattatacccttcacaaattttgtccatagggtttccgacaaaagggtttgaatctgaactgttctgatatttttaaccaagcctgatagtgatcgtgatcgcttgggatgaccagtctgtagtggcagatccatttttgttaccgggatcataatataacttttaagagaaaaaaatgttactgaatttgagtgtagtggggtcattatattaataccaaattttacaaatgatgatactgtttttttttttaacaatatttacatgcaattaaaaaatatttagttattcaatctgagacgtatcggcgctatgccattgctagtctatatttgttacaccgttaaactagttacacattgctttttagaatatgcaaatgatcaaatgcatggttgtttaaggttggatttttatttttttatccaaagtttaaggttgtatttgtgcccatgatttgatagcataccaaatcgattgggttaacaactgctatatattcttgcaatatattttgtttatgcatcgtaatgtatagggaagttatctgctaattaataattagagtgatttttggaaaacaaaatagagacagaattaataaaaccattttaaagagagaaagttttgacaaaaaaaaagcgagagaaagttttgataaatcaaccaaaaatgcatataacaatgacatgtgattgctttttaatttgtttgtgatttctgtaccgatctccatgttcgatttcatcactaaatcggataaaagtgtatgttcttctttaatgtttttgcatgaaatatcttgcaatgcataaagactgagatttctaccattacaaaagtggaaagagaacatctatgtaatattgggtctctgcatttgcatttgggaacggttttggcgttttcaaatgacaactcactcccacttatagtcactgacacacacagaaacttttaaaagaacaaccatcactccacacacttatgtgttcttcaaatgttttatttatcatttacttcaattatacgcacaagttacaacaagcaagtttttttgtgcaatattctcttttataatcctgtttgtcctataccaaaacctagattaatcactgtcaaaccaacatcataaaattgttggttaagtcatataaaccattcgtttccaataagtgccatagaaattgaatattgagcatagtcagaatatatatttatgtttggtctggttttgtttgacaaagagagtatattcaggtttataatctaattatcaagacagagttatacagaagatagataaacgatactagtgttacgtttctatacaatcttttgaaagtaaacaaaagaagccatgtggaatcaaaaacattcgaagcatgggaagatcaaataatccagtgatggagctagaacggaactaaatcaatcatgaaacctaaatagttttttaatctttctagaatctcttcttatcaaaaaatttccttatttgtataaaaagcctcgggaaagttaacttctcatcccaaactcattcctcagtttatctctcgactagagagtgaaggaaaaatcgaaggataatctgtttcttccagcacaagttaacttgcaaggtagttttctcccttcgatttatactgtcttgctcactttcttaggctatttttaggacgattcatttttttaatttgtatgttattcatctttttagggttcttgtcacattttcggccttaatttgtatgtgtaaaaatataaatagtgaagtagatatcattttatatcgtctagcactctagctactagcttgatctgaaactagtatatatataaattatttgaatgtcagcttttttttgtgaaagtcacacatcacatggtagttgcatatttcaagaactcaactgaattcgatttaaaatttctccaatcataattcataaagatatgtatttcaatttttttaaataaaaatagattttcctatttaccatgaaattttttactctttttatttgttctcatataaatagagtgataaactattttacaaagttcatttatgtggaaattgataaaatgacaagaacatgaaaaaaagacaaagatttttagttgaaatctgtgatcgatcgaacagaatcggttcagctactgtttttgtaatagaacaactgtccatttttataccaaaatgactaaaccacccttagaagatgcatgtgttgtgtggtactaaaaactcaaaaaagcattgaaactttacacctttgtgtcgttttctcaattttacccccgcttcatttggaattgtcactctcaaaattggcgtattttccagttcatatcttcattcatctatggccccataaaccataactctttgaaccatatttaataatgttacctgcatgcatatacattcatataaaacatgtattcattatcatgttagatatgtctagtctattatttcccaaaagaaagacacctaagagagcaagattcttgttattcatgataacatttttgaagattcaaaaaaaatgagtgattgatgaattatttatggtcagcatctagtaaaatcatatcgacatatccagtcagccttagtagaaatgcaccaaagtgatatagagtggatttctctcgatccgtgtagaaatggaccaccacattgtctgtttagaatattatatttttttgtataaaattgtagacataatctcttattaataaatatttaatgcaagttagttatttttaattttatgaaaagaggttaactccaatatgtaccatactacttgaagaagttaaatgacaaaaaaaaatataagtaatactaccatttccatatattgtactgatatttcaaactttaatcaactttcctttctatttctccttctttttttatggtcaaacccattctgtttatgactaaacatatgacatatctaaccgttattaattagttcacatatcacatatttgtatagtgttttcattttcagtaatcaaaccatccatctaccacaaaagaacttggtcatgtgtccatttttagaaatcaataaaatattataccatatatttatagtatctaactttaagagaataaatatttttatttgccgattcatatacacacacatgcgtgtggtatctatgtctatccattaaactaattatatataaacttattttctggccacaatttttgtttcgtgtatagagagagctcaaagatggaaccaacagaaaaaccatcgaccaaaccatcttctcggactctacctagagacactcgtggctctctcgaagtattcaacccgtcaactcagctgacccgacccgataacccggtgttccgtcctgaaccaccagcgtggcaaaacttgagtgatccacgtggcaccagtcctcaaccccgaccacaacaagaaccagctccatccaaccctgttcggtctgatcaagaaatcgctgtcacgacctcatggatggctctgaaagacccatcaccggagacaatctccaagaagacgatcaccgccgagaaaccacagaagtcggcggtggcggctgagcagagagcggcagagtggggattggttttgaagaccgatacaaagacgggaaagccacaaggagtaggcgtgaggaactctggtggaactgagaatgatcctaacgggaaaaagactacatcgcagagaaactcgcaaaactcttgccggagctccggtgagatgtcggacggagatgttcccggcgggaggagtgggattccaagagtatcggaagatctaaaagatgcgttgtcgacgtttcaacaaacgtttgtggtctcagatgctacaaaacctgattatccgattatgtatgcaagtgctggtttcttcaatatgactggttacacttccaaagaagtcgtcggcagaaactggtaaaaagttattcaaaaaattttagagcatttttttaatatataaaatacgtttcgttttctgtaataattaccaaaattgcaaagttttttctaattaaatatcatagttttgtttttaggtttatggttactataaatgtataaagatatcttaaatgacttagtaattctttctaaattttcaaaaattaaacctaactttattttatttttttagaacttttcgaaactgtgtaccaaaattacaaagattaagttttaggtatggttatcctaaatgatttagtaactcttactaaatttctaaaaactttttataaacctaatttttatgttgtttttccaaactaatagccttttataaactaagtttattttttaatgataacttaaaatatttcttttaaatcgaacatttctttgcaaattcgaaaaatttcttacaaaagtttccaccattttttgttcaatgaatgaattttatttacaaaaagaaagaagaaaagaacataatttgggtttttgttttattgtagccgatttttacaaggatcaggtacagatgcagatgagttagcaaagataagagagacattagctgctggtaacaattattgtgggcgtatattgaattacaagaaagatgggacctctttttggaatcttctcacgattgctcccattaaagacgagagtggcaaagtcctcaaatttatcgggttagtcccttattcctttttatttactcgtttctctcctttatttctttcattcaaaatgtcaccctttttaatgggtctaagtgtggacctgtgatttgtgttgctttctccgcaataattcaaagatttgtatcaccgacggatcctattgtagaataacaaaagagaataatcaatcaggaaaaagaaaagaattatagaatctgataaaaaaatatgattttgaggaaaaatcagaagataccaatatgttttgtttatttggaccagaatgcaagtggaggtgagcaagcacactgaaggggccaaagaaaaggctttgaggcccaatgggcttccggaatctctgattcgatacgatggtatttacatactttctttttctatttgtttttccaaatttttttccatttattatgttttcttaaaaatattttcaaattttgttttgtaaaagcccgccaaaaagatatggcgacaaactcagtgacagagctagtagaggcggtgaagagacctcgggcactaagcgaatcgacgaatctccatcccttcatgacaaaatcggagagcgatgaacttccgaaaaaaccagctcggcgaatgtccgaaaatgttgttccgtcaggccgaagaaactctggcggcggaagaagaaactcgatgcagcgaatcaacgaaattcccgagaaaaaatctagaaaatcttccctttccttcatggggtaataatccttactagatcatttgtttacctgacaattactttataaaaatcgatttagtctttgatatgattgttgtgatactctggtgataggatcaagaagaagagcgaatctttggatgaatctatagacgatggatttatagagtatggagaagaagacgatgagattagtgatagggacgagagacctgagagtgtggatgataaagtgagacaaaaggaaatgagaaagggtattgatctagctactacactcgaacgtatcgagaagaatttcgtcatcactgatcctaggcttcccgataatcccattgtaagaacaaatgttttagaaaaatggaaactttttttgttatgtttcatttcgattggtctgaaaacgtattgtttgctttgtcctatgtttctagatttttgcatctgatagtttcttggagctcacggaatatagccgtgaagaaattcttggaagaaattgcaggtattacatgaatgtgatctcaaaatgtcttttgaaaatatttttgagcatagagcatgtgtttataaattttgtttcatggttttaggtttctacaaggtccagagactgatctaaccacagtgaagaagattcgaaatgctattgataaccaaaccgaagtgacagttcagctcatcaactacaccaagagcggtactcgattttttcgatattcttagattaatctgtcgatcattgtataaagttttaaatttacattatattctctgtggcaggaaagaagttctggaacattttccacttgcaacctatgcgtgatcagaaggtataatggtttacatagatatcttgcattatacggcaccttcaaactaatcctcaatttcttttggtttatgaatttaaaactgaagatgtctatattctttctttgatatgttgttgacagggagaagtacaatactttattggagttcaactagacgggagcaagcacgtagaaccagttcgcaatgtcattgaagaaaccgcagtgaaagagggagaagacctggtctggaatcctaaactattgatcttgatttagtattcgtttgatagaaaatcaagtattaaaccttaatctatattctttaggtgaaaaaaacagctgtgaatatcgatgaagcggttcgagaacttcctgatgccaacatggtaagtgattgtctaaggatctgaatatgatcattttagattaaggtttattagaatatatctgacagaatgttttattgtgtcttgtttctgaagacaccagaggatttatgggcaaaccactcaaaggttgttcattgtaagcctcacaggaaagattcaccaccatggatagctatccaaaaggtgttggaaagtggtgaaccgattggtttgaagcatttcaaaccggtgaaacctttgggttctggtgacacaggaaggtctgaaactctatctaatctaatgaaatagcttacaaaaaaaaagaacatttccttcattaatcttataatatcccatttgtgttttatcagtgtgcatctagtggaactcgttggaacagatcagttgtttgcaatgaaagcaatggacaaggctgttatgcttaaccgaaacaaagtaattacagtaacttgcacttcaaggaatcttgagtttcgctttttatttgtaagttttgtagccactgatataattttttgcaggtacatagagctagagctgagagagagatcctagatttgcttgaccatccttttcttcctgcactctacgcttcttttcaggtcaaaacctctgtttacacatatatatatatatatatatatatatatatatatgcgtgtctctttggtctttggttactaatggatcatgttttattctgcagacaaaaacacatatatgtcttataacagattactatccaggaggagaactcttcatgctcctagatcgacaacctaggaaggttctcaaagaagatgctgtaaggtacaagtgttcctcgctcgaaaaagtctcaagatttcttcacttaaatattgaactaacaaaaaccctgcatgaactttcagattctatgctgctcaagttgtcgttgcactcgagtatcttcactgtcaaggcaatccattcaacctcttctttaattacaaagaaaattttggatgcaaggaatcttgacatgatactaagttgatctttgtaatttttcttaaattcaggaataatttaccgagacttgaaaccggaaaacgttttaatccaaggcaatggcgatatctctttgtcggattttgatctgtcttgcttgacatcttgcaaacctcaggtttgatttctctcaacctttcccttcagattgtttccacttctactagagagtttgctcatgtatactaattaagggtgattaatgaatcttgtagctgttgattccgagtatagacgagaagaagaagaaaaagcaacaaaagagtcaacaaactccaatcttcatggctgaaccaatgcgtgcatcaaactcatttgttggcactgaagagtacattgctccggttagtatattatatataccaatttaagtacagtgattaaggtatttaccattgtcttaaccagtagttgatgtctcatatggataggaaattatatccggagcaggacatacgagtgcagtagactggtgggctcttggtatacttatgtatgaaatgttatacggatacactccttttagaggaaaaacaagacagaagactttcaccaatgttcttcaaaaagatctcaagtttccagctagcattcctgtaatggatcaatcactatatttctataaactaatctcatgcataaaaatcgaggatcatatttaattgttctgttattggtttgcaggcaagtcttcaagtgaaacagctgatttttaggctgttacaacgagatccgaagaaaagactaggttgttttgaaggagcaaatgaagtcaagcaacattctttcttcaaaggcataaattgggctctgattcgatgcacggtataacttcacacattctctttacttggtatataagaaacatttcggttttacttgtgaaagaagaaaactaatcatcttatgagattattttgatatgcagaaccctccagagctcgagactccgatattttctggtgaagctgaaaacggagagaaagttgttgatcctgagctagaagatctgcaaacaaatgttttttgagatttggactaaacgtttatcgttttcttttcaagaattgtttgaaactctttgttctccaaaaatctcgtttttaattattttcattttaccattatctttatttatttataatgccaagtgtttctaataatttgtgtgagtttcttaagaatatgttttttatatatgtcaataaaattaatcaagttttgcatatgtttttgtttgtttcattaatcaagttattataatgcgaattcatgtgattaaattggtaaagttaaacaaagaattgatatttttcataatttagttgaaggctacaaaagacaatggaaaccataaaaaaaaaagttcaaatcagaattaaggcttgaattgggtacaaaccagaatgattatgatagagtagattagatccatgtttctttgaatcttttaagtgttcttgttctgtttgtgtttcagaaaactataactttgtggaggactaattactcacagcaacaccgtttctgctgcatcctatgtgtgtgttttagtagttattgtgttacttagtaagaaatgctcatttgattcattcacattgcgtcaagtgatctgctctgtgattgttcttgacattttcagtatgtatggctggccaaatctgagagcttttcatgtctaaattagtttctcgagctctttttcttttgtgatggtttcagtcttttcttttataggtttcttcagctataatgcttgaggagggaataaagtatcatctactatgggcgggtcagaaggagctagcaatctctattccaagattccagcgatgtacagatacaaaacatgcaagctgtcagagggaagggtgtgaaaactggtcagttaataggtgaattttgatgtagaattgaaacagtgactacttataggagctgtatatgctaatcttgtgataaatattcagtgacaacttatgacccaaaaagtgggttagtttgtgaattgaaacaatgacaacttgaaactgcaattgcaaactaataatgaaagttataaagtctcttatcatttaccaaaacttccagaaacacataccaaatagagagttggatacttcatcttacaacttaaaactaataaacaaaaccgttactaaacaattatagatccacattgcaaaaaggggtggttcaagagtgcaccaatcccccaccttgaagcagggtccctttttaaacatctgctgagaaaatgctgtgcttcttcagataaccaatccggtatataaggaatgtaacagctttgaccgatgagaatgtcccaatctacagaaccgagatcactatgttctccccatacttgttgtcccgttaacatttccaaaactgtgcatccgaaagcccacgtgtcaacagcgtaatcaacaatcccatgtcgtataagctccggagacatgtatcgcgttgtgcctctcctatgacctgatgctttttcatactcgcttgaacccttctccaatgctaaaccgaaatccccaatctttgccacgtacccattaggtcttatccggttctcgacaggggctagtaagatattttccggtttgatgtcacaatgaataatgtttgccctgtggatgtagtcgagaccgtaaaggatatctctagcaagaagtttcacatctttctctgacaatcctccaaggttactgttgaccaagtcgaagaggcttttgccagagcaatactcgagaatcaaattgtaattcgttctctcgccaccgaacagagtctcctcgcgtgcaatctcgtggccatagcaacgaacgatgaaaggagatgagagacgggttaatattctttcctcgtccattagactcgaagctcgtgaaatctctgcagatttgatcgccatggtcgttttagttttggccttcttacttgtcgccagataaaccgaaccgtaagagcctcttccaaggaactcagacttgatccaagatgaagactttctgactactccgtcgaatacttgtttggttatctcttcaacactgagactactactactcttcggtgtaaatctcttccttttattgttcttcagaaggatcggagatagtttaagagtgaaaatagggttttgatcaggaagaggagggatcaccgagggtgaatatctaggtctttttgtgagaggagggtctgataactcgatgaatttgagatgaccatatcttttgtggtaaccagacaacgaaatctctgtctctatcatctccattcttcttctttctctcgcttttctctgttaaagtttttctgaaagtgatgaaaacaaaaacagagaagaagacgaaattttcctttttataagcttggtttgactttggtcaaagttcccttctttttttcatcagaagatcttagttagattcagtttcattaagaaatattagttagattcagtttcataagaaaatctaatgcttacatacaaacacgcgtagtttcgaatatatttgtttttcttaatttctttaatgaattatgaatctgcagacatttttctctcacacttttacagataaataaaaatatacatggcaatccattagtagaccaatcacatttgtttcagtaattaaagcaagaaatgtaatctaaatagcattctcaaatattattattacaattttattatttgatacgatttttttttttaattctagtgtttagactagtttttttattttatttcaaatcaccagttatattttcgataaacgttaatttcctaaacactaactaatatttagtttttttaagaaatttcaattttttaaaaccactagtttttaatttagaaaatattagtaatataaacaaatttatgaatttagttatttatattatattataattataaatttaacatgtactcaaatctccttgtttttaatcggtatcatgaagtgatactttaacattaacaaatattttctcaaattttaaatgtgtattaataaatcttagttagattcattttcataagaaaatctaatgcttacatacaaacacgcgtagtttccgaatatatttgtttttcttaatttccttaatgaataatgaattagcagacatttttctctcacacttttacagataaataaaaatatacatggcaatccattagtagaccaatcacatttgtttcagtaattaaggcaagaaatgtaatctaaatagcattttcaaatattattattacaattttattatttgatacgatttttttttaattctaatgtttagactagttttttgttttatttcaaatcaccagcttatattttcgataaacgttaatttcctaaacactaactaatatttagtttttttaagaaatttcaatttttttaaaccactagtttttaatttagaaaatattagtaatatagacaaatttatgaatttagttatttatattatattataattataaattttagcatgtactcaaatctccttgtttttaatcggtatcatgaagtgatactttaacattaacaaatattttctcaaattttaaatgtgtattaataaatcttagttagatttattttcataagaaaatctaatgcttacatacaaacacgcgtagtttccgaatatatttgtttttcttaattttcttaatgaattatgaattggcagacatttttctctcacacttttacagataaataaaaatatacatggcaatccattagtagaccaatcacatttgtttcagtaattaaggcaagaaatgtaatctaaatagcattctcaaatattattattacaattttattatttgatacgatttttttttaattctaatgtttagactagttttttgttttatttcaaatcaccagcttatattttcgataaacgttaatttcctaaacactaactaatatttagttttttttaagaaatttcaatttttttaaaccactagttataatttagaaaatattagtaatatagacaaatttatgaatttagttatttatattatattataattataaatttttgcatgtactcaaatctccttgtttttaatcggtatcatgaagtgatactttaacattaacaaatattttctcaaattttaaatgtgtattaataaatcttagttagattcattttcataagaaaatctaatgcttacatacaaacacgcgtagtttccgaatatatttgtttttcttaatttctttaatgaattctgaattgacagacatttttctttcacacttttattgataaataaataaatattcatggtaatccattagtagaccaatcacatttgtttcagtaataaaagcaactaaaatttctaaattacgaactaaaactaaggtaaaaataatttgatttttgatcaaattattttaggtattttgtgattttagatttatttgttcagttggacattttcaaaaataaccttcaaaatggtaattatttcggtttagttcctatcgattatgtgttggtttggaaatctgaatggagaaccgataaagaaccaaatgcattggttgatcattattttattataatgtaatgttttattaattaattttggtttcagttttttttgtatatatattttttatatagtgataaagaacccttataccccatagcctctcctccttgtccgaacgattccactagcttgagaaaagaagctgcgtttggtgggcagagattggtacagagtgaccattgatgtgcacaagagggtctgatcagaaaagagcaagttctcagggagaagatgaggtctcgaagagagaatggagtgtgagatgtgtatgtagagactgtggtgttgatgtattgcgatgatctcaagtactatcatcaaagtcttggtctttcttaaggtattatgtttatgaacattgatttgattaagtgctgtctcttatatagtgaattcgctggttgatagacttaaggcttgaattgggctcaaaccagaatgattaggatatagtagattagatgcatgtctctttgtatctcgcaagtgtacttgctctgtttgtttatgaaaaaaagtggaactttctgctgcatctttggtgtgtgtttgtgttttagtagttattatgttacttagtaagaaatgttcatttgattcattcacattgcgtcaagggatatgctatgattgttcttgacattttcactggccaaatctgagagctttcatgtccaaacatctagccaaatatagaatactttctcatatccgcttgggtcctaggtagtacacagaaccgatatgatatccacgggtatgattgtgcaagaaccgtcatgcatattggccatagcccaaaaccaaatcgaaccggttttcaggccatttctgattccagtttatttttttactaaagtatgaaaccacatttgtagtgttgctacttaccactatctgaatggtttgaagcttctgattgaataggtattcaattcagtggatctccttgtgtctgcattgtctctttttcctgatgataacgatgttgctgcggtattactcctagcagttcgttgttgtttgcttcatatacaagagttagcagatcttctactgagagattctgttggcattctccatataggtcttgtagtggcttctcgggttgcgttagtactccttgcagccagttgttgtgttcatcatattgcaacccgttgttgtttgcttcatattgaaggttttgttggatctgcggttgcggttggcattgtccatataggtcttgtggcggcttttcgggtttcattagttctccttgcagcccgttgttgtttccatcatatcgcagcacgttgtctacttcatatggaagttttcgcagctcttctagtgagggtttttttagaacctgcagtggcagttggtattgtccatatgggtcttgttgcaggtggtcgagttgtgttagtagttttgctgttgaaggatccatcggctggaaatttgggctgctattgttaatatcttctccaaaaccatttgcaaaatggtcaaatgccgcagtaggtacttttgcaaaagttggagctccagtatctatgggaaggaaatcattagatgttggccattgagcagtggctgctggtgcaccggttgaatatacaacaggatagttatctatggagaaaaaagaacgaacgagtgattcatacaaatgattcaatgtaaaagggtttaaaatatgagagataaaggttgagtgtttctttacacgcatgatcagtatatggcaaccattgactattagcttctggtggaacggcaggagctccaagattggtacctatggagaaagaaagtagtgtaattcataaaaatgctcaagtagaagtgttaaacaaatgatagattaagagagaaagactgagtcttctttacacgcaggatcactataaggaaaccagtgatcattagctcctggtggaacggtaggagctcccagattggtacctatggagaaaaaggtttgatcattagctgctggttgaacggtaggagctccaagagtacctatggagaatgaaagttgagccattcttaaaaaatgctcaagtaaaagtgttaaacaaatgatagagaaagattgaatctcttctttacaagcttgatgatttggtgtagaccattggttttgatgaagatgattttgttgaccatttggaatcggcaattggtttactacaagacagagaaacaaaaggaagctttagaagtcaaaagtgaaagaaaccaagttttgccagctgcaatcatgacctgctgtacaatgcaatagatatcaaacaaaaccaactcaatattcagaagagagaaaggtttgagtttgttctttacaaggtatatgattagttgtagtagaccattgataagaatgaaattgattttgatgatcattaggaatctgcaacttgtttactacaaaggagagaaacacaaggaaattcttagatgtcaaaagtgcaagaaatcgagcatgaatctagtaccatatgtgtatttatgactttacctgttagaccaggtgtatcatccaatgccaacgttgccaagcttgaaggactcatctctgacctatcagctacataatgcaaagagttatcaaacaaaacaaacccaattttcaaaaacattattgaactttagagatatcagtagagagatttacaaggtgtattcgctagtttcaccaagagatgagctccttcaggatcttgaccgagaaaattcttgactgtagatacacaaagacacaaaaaaataattgaagcagttcataaaatcgggcagtaaataatccataagaagattttagtccttgtgttatacgtacatggtgcagtaccaatatcaagatctccattctcgaccatcagactaacttgctttccaagaaaaaatgttaaacatttctatctgacgcgctaattcacagtggaagtagtacttcttgaaaaactctggactctctttctgaagctgctcccatactaataaaaaaatcaaaaatcaaattctttataaacaagcacagaatcacatcaaagcagagattataaaatacaaacttgttatggtgagatggtgactaatattgtgattgtcctccagatatgtcactgtttcttccaaactcatgtacttgtaaatacatgtctcgattaagttcttaacctgaaacagaacaaacaacaatcacatgatatgagacagagttggtaacacaataagcttcagagaatcatgaacgttttagagatttggtgtagaaaatatcaatactttgtctatggtctcagaaacattatgactgatgctgcagagataattgtgacgagatggttcgtccatagctttcgagggaacctgacaaaaacaggaagatgatacgagtctctttgacgaatgaaagattaaagagtcagttatgagattgaagggatatttataactagcgagaatttcgttgatataacagttttccttgttcgtcttgtagtacttaagagttaagaaaatgtaacggttacatagaaacacacggcgtagtttccgaatatacttatttgtttttcttaatttctttaatgaattatgaattggcagacttttttctcttaaactttttagagaaaaatataaataaattgtcatggcaatccataaataaatcaatcacattgttatctaagtcatcctacttgaaagaaagccagatttcgttagcacgatatttaatttgaataaatattttccttttaaacatgcatgtctccaaataaaatttaattttgagttttatctatcggacagtgactatacatcacaaaataattacaacttgtccttaaaattatggggatgccggtttctatttgtgaaaagaattttgatgattttaataaaattattaaataaataaataaaaaatctaaattattgctagagagtttttataatattgttgattaagttttcataattttgtcaagtatcaaaacaatttctattttgacggataattataaaaagttataatataataatgtaattaattaacaatcagagattttttttcaactgaataacacaaaatttttattgactttctaataatatgaattcaataacactatttatgaaaattgaacaaatcttaaactaataacaccaaactattataaactgtttaaaaatcatgattgaataacaagattttctacaaaacattttcagtcactaaaactctatttaaatcccaaaccaataatacttcctaagtgaataactgaactcaaaatttaccgaaaacatttttaagaaaaaaggtcagaaattctctttgtgaaaagtaaagcgggtggacgactcgagactgaactcctgacaaagtgattttagcggtcgaacaagcgttggacttccacagtagaacacacctgaaacaatacaaattaaaaaattttatcccaaagaaagattaactgattctttgaaatttttctttaccatttgaactactaaaatttagatatctttatcattcaaagtacaaaaattccaaaaaagtaagaacctaaattaccaagtcaaatatagttaacctaatttattacctagctagctagtttcaaaattttcttaagaagtatgcaagaaaaaaatgcttgatatgcaactagttgaatattaaaaaaatccctaattttcatcgatggtgtgagaattagacttagatatttttttttgtcaaacagacttagatatttaactcgtaaaaatacactcaaaacattttgctagcaacattactaaagaatgttttaaggaaattaggataaatatatttacatacctatgcgagaagtctcgtgcttgtttgacaattcagaaaaaaccttcctccaattaggtcttgcgaaatgggttcgtatctgaatcaggtggaatattagaaatatatgtatttgtaaataggacgatgaaaaaatataactacttccaaataaaataataagtggataataatgtacaaaaaaatgaacatactcggctctcggaaacaatgtcaacaccatttttggcatgttgaagtttctggaccatagcaattagagcagatctcgcatctcctgcttcgtacatacttgttaagtagttatgcatctctatcacattctgtcaatacaaaaatcaaatgaaaaaaataaatatagatcaagatttatatgtcaaatttgcatttcatcattaaactttctcaaattattatgttatttcaggatgtttcaatttaatacttagaattgctatgaaaaaaaaaaccaatttaagtttttttctttgaacattataagaataatttttatttttattagactatcagaaaatatgatataaaaatcttatataacatttaaaactgatatatgataaaactgatataagaacttacggttttgtcatacactgcaatatcatccataactcctttgaaccattcgaaagaagcttgttctcttgtcacccaataaaaatatgctctttgtggaaactttctacctcctccacttacactacctcctccatttacactacctcctccatttacactcgatcctccatatacacttgatcctcctaagctctcacctcctacacttccttcatacttttgcccctacattttccaaatctcaaattagacactccataacttttttttttttttttttttcatatagtctttgtttcttcatgactcactatggttatagattacttacggtttttggaataccaggtttgagattattcaacatatcttttaggatacttataaatggggttgccccgatccctagcccaatcaacaaaaggatatcaaacttctgatagctttgtgccggagccccatatggtcctttgataaatattcttggaaatctggttgggaagatgccgatcatatgagatcaaattcgatcaccttataggttaaaataaccattgatttggtagtaaggatattcacttacaaggcttgggattcttcaacatgaggatttgcacctctcgctcttgtttccatcctaataagatcatttggactaggtttcgatttttgatgaggctcacatgtctacaagaacaaaaaatttactataagaaaatcatatttggagtttaagatgagtatggatgattgaaaataattgaaaacaaaaagacaaattaataagaaaattacctctgcaaatctgttcctaagttcagaagtccaatctcctaatgctcttatgtgaacgctcaaatattcatctccgggtgcagaagtgatggagaatggatgcctaaaccacacacatacaaaaatgacaatgataaaaatatagtatatattttatgaattagttagatgcttttttgaaaaagaaatgttattaccattcgaatttggagatatcagggcacttgacaaacatgtacatgccacttttgtacttgaacccttgaggtttggtcatatagagtgcaagaacattgcctgaatatacaatagcctgggcaaaaaaaaattacgaggaaagaaaacacaatcaaattgttattatcacatttgaaaatcatcattatttaacaatgttgtaagaaggcaagtattggaaaatattagggcaaaaagggaaatataagaatcttaattattactttgataatgtggacacgatggttgtgttcttgaactcgtgagaaaagcctctcgctcgcgtacaacaccattggtatggccacgtacatccacgtctacatttttcaataccaacaaaataattgtaaaaagactaaagattaattcataattacttcgctctatctcctaacatatgttcattttagtatgtatatgtatacacttaccgtcttttggtaccaaggtttctcgatgataagaatgtaaccatggatgataagaagagcgtaggcaataaccagcaaatgatgagcataccaaaacgaattaaatccagcaagacggttaaatggtataggcaatttcactatgtttcttctgaagtaatgcatagcaagggtgaatgagatacccatgaagatgatcattagaactcctgtgaccgaaaccggggtcagcattaggcctaaataggtcggttgcttggctcccaagagattccccgcatagtcggagtagaaattgtaggggcaagaacttagcctagggtagttgcatagcatgtgtaatgccgtgtgaagcaaggaaataactgctatcgccacggctatcaacttatggaagttgatgttatcgtcgaatgggatcaagtggttcaagaaagtcgatctgaggaacgttagggttcttcttaaaacagggaccaaaatcaaagccatgttgagttttagtatttctgccgttcctttagcggcgcaaaggcagcgtccagtgatgttgtaaagagggcttgtggtgaactcttcgtatttccacatgaagaggacgacgtttactgcgagccacaatgtgacgacccaaatcttcttccagtgctcgtacattagctctgcggtcactacaacgtatttactagtcggtgttctgtaacgttttgggatcatggctcgcgttagctgttgcgatttcctcacgaccttatgtgagtcggcgtttgatacaattcctgttagtagcacctcgagttgccacatctggttgatgtaaactaaaaaaatgtcagagtgggcgaggcatggaacacaaatgtatttttaacaaaacaaaatgcaacatataaaatatgaaaaaaacttcgagttaattgatcataccctatcttcaaaacaatgaaccattaattacactaaccagttgattttttttttttagacctacaagtttataaattatgaatggtcactctaatatttcgttgataattatggaaatgtaatcaagatgaaacctcaatgtaaccctgctcattggggtcgagctcttccatgatcaaagaagcataagacgcagcattcttcttcagattcacgagcctgttcgcggatgcacttaagactatgacttctttaacctcctcttctgttaacttcccgtctccgtccttatcacacctaaaccaaaattgttaatctctattttgatggatcatataaaactaaaaacaaacaggacaaaaaaatatggttacatgtcgaagaagatttggaggcgacagtcgagatccttcttgatcatgtcttcccaaaaaagcttgagttgttccttgtcaatcccattttctgtttttatttgtcttctcctacccaatgcttcgtatacttttgccgcaaactccaatgtatctcccattcctaatacacacataattataatatgaaaacatctttttgtttcagtttgatcaagaacaaccttttaaagttgacaaaaaaacatatgtataaccgtagttttttaaattaggtttacgtaaaaaaatggatgaattatagttttaccaatgcaaacgccgaatttatccttgggaagcctcccgtcaacagcaaattgattgaaccggttttcgattgatctccacgaatctcgttctcttcccgtgacggtccgatcaaggaaccggagactttgtagtcctctagccgcgctagatgtagtcctctcgactctttgtggccccggtctttttacttgggacacagggagtggaggccccaggtttccactcttcctcgtgctcggggacccgagattaccgctctttctccatttgtttacgctcatggacctgattattgatcccacggcgagattcttagacacattcttcaagatcccaccaccagcaccactactctcaggattattgctattgattgtgctttcgggttgtttcacagaactatcgccttttggatctatctcgacgctctctagcatccatttcgttgaatcttcggtcccaacctttttgttgtttttcattatggcttttaactttgtatcttttcctcttcgtcgatgatttagttttcgatgcgcatgaggatataattcacttttgctttgtcttcgtgtcgttgttctgccatttatcaaacaattgatagtcagaaatctttgtttttggttgaaaaagaatcatgagagatcctgattttctctcgttctcttttagttcttgtgacttcttgctctttcttgctctttcttgctctttcttctgcgaagttttcgagatcgataattctatgagaagagactaagaataggctcctcattgtgtgtcgtttgtaacaggacgcatagtctatttacttgggaagagagacacatgaagagttactaaaaatagaaagttctaaggaaagttaaactttgaggtgatttacacctgataaagaaaaagaaaaacctttataacaaaggaagatcaaacgaaaaaattaaagtagaaaatcatgtggaacattccaggtcacttatattttgtacgtagtgagttctaaccttttgtgataactcccatggttgtgttgatttgttttaaagataaaactgaaaagaaaaaaatcagttatttttttccgtttgaatgataaaacatagaatttaagatgaaacaaatcaaatgcttaaacatcatatattaacatattatgaaaatgaagtatgagtgtaacattgcgagagatatggaagtcatgagtcatgacaacaattgctatgacatattgtatatctcagtatatgagtgaagctaaccaaaaattattcaacaaatctatcattatatatatatatatatatatattctaaattagttccacgacaaaaaaaaaaaaaaaaaaaacggaagcaaatacaatcacaccattatatataacttggtaatttttctattgttcttaatttttataagatgaaaagaaaacactttaaaaacaaaatacgaactaaaagatgaaactctttataccttaattttttttgggtggttaaactgaggatctctcgttcggttgatcatatttttagaaatggaaaatattttataaattagtacaaccactgagaccgactaaagccacctaacagaaataatcaagaatgcttcttataagtcgatcgaagagaaggcaaaaaaagaagcaaagaacaaatttcttgttgaaaggaatcgatggctcttgataccataaagatgtttattcaagtgatgattttttatacaacagagaggaatttatacagaggaagagagctagggtattacaagaatagttaatgagaatactcagtttgtacataattaaacccataaagtcagcaatcaaggatattgtaatggaatcaatcatggacatgattgtatccttaaacgtttttacgcagacactttaacgtttttttttttttgggaaatggaaaatattacaaaattaagtttaatcaatggaggccgattaaacctgcttagacagacaaagagaataaaaaaatatctgagaacaatttagtgtttaattttttgggaattttttgcatgtactcgaaagcttaattcaaaacaaaatatcacatgacttgaagcaatattacagattaaaggtaaggttaactacaatctaatatgctttgtaatgaacatttttaagagcagtgttttaaagtgtgacatatgaagggatattcaaaagtgaagagacacaaaattttcacttttgggcctgacccggtccaaggaagactataaagacaagtccaaatccttttgggcttctctgacctacaatggaaattttaaacattcaacgatcaaaatgttattttgttacaaagtccaagttaattcaaatgtaataaaaagtaaaataaacaacacacatcttaaaaaaaggaaaaagctctcgaaataagtaacaacattacaaagataaaatatagaatactccgaataaatactggagtcaatatggaaatgttttatttcaatttgtttataaaatatgggagtttgttttacaatattttatctgatatttatatactgtccaccaatatctgtatataaatgaaattttatcaaatttggacattatataattaccattgaattattattatttttatatttttttggcaaagtgtcatcgaatatccataaataaactttttaatgaaaattataagtaaatgtaaatgctattaatggttgcttcagtatgagtttttttttttttttgtcggctaagtattgtattcataagtccagagggcaatttacagaagggataaagcccaataaagatacaagcgaatataacggcccaaagtaaaacctaatttagcagccaacacgtgtagagacgtgtactcctccaatccacgcgtcggatgtcaaaacgcaccgtcatcaactcgccggacatcgccgaactccggtcagccaccaccagctacctgtaaggcgatggataaactctcctcccttccgccgatctcctgtccaaacgaaaagcatcgaaatctatcagattgaattgttgaaactgcttcaaaaatctcttgatatcaccgatttcggggaagcttcatcaccgattacacccaaattgatgtaatctgagtccaactttgctcgtgcatcttgagcaaacggaagtgataaagattttactcctcgagtaaagggagaaaacagagatcttggaagaaaaaccgcgaaatcaatggatgagcaaagatgacatggagatcgatcccgctagatgcgaaagaaaagaccggtgataaccggtagacaaaatatccgattagaaatcggaatttctttgtctcgtacaaagacgagaaaatatacaagatccggactacatcggaaccggaaatacaaaaaaacgattaccagaagccttcctctcgaaagattgtagaaagagaagagagccaatatgagtttaaatatggttatagtttaatttttgtttttttagttgaccaaaataaatgtttttataaaaaggcaaaagtaagtttgaaaacgacgtcgtagtagagtgtgccacgaggactcgtctctcttctcgtatcaactcgctccgagtcgactcaaaacataaactcggaccgtctcttccactctctttcccaaaaacttttttttttccttgttgtaatttcaccgtcttcttcgtcctactatgccctaagtctctgtggctttaccctttttcgtcttttcacataaccttcactaatctgacggctatgcttccttccacgtcaccttcgtcttcttcatcaaccctctctctctccgtcaccgtcttctcctcctcctttaagtttatcgcgttatttatacggttccttctctagggtttcctccagattcatctctcttttccttttttcttcctcctcgaacaacttcttctattttgctgaagcagagtcctaaaagcttcaattttgttcaattttggtgacaattaaggtacttccgatcataattcatcgaaaatctttgattttgattcaattggtactgtaaagtttttgttttttcttattcgattttctaaagttttgatttttattttgtgttctgggctttgcgtttgtgtttagggttaaagaatcataggactgtttctgttgagtggaattgggggttttgttatgtggtgatggcgatcgagaagagtaacgtcaaggtttcgaggtttgatctagagtactctcatggtagtggtgattctatgtcaagttacgaagaaagacgtaaaaactcagtggtgaataatgttgattcggaggatgaagatgatgattttgatgaagatgattctggagcaggttctgatgattttgatttgcttgaattggcggaaactggtgctgagttttgtcaagttgggaatgttacttgtagtattccttttgagttgtatgatctccctagtcttgaagatatactctctgttgatgtttggaatgagtgtctcactgagaaagagaggtttagtctctcgagttatctacctgatgttgatcagcttacgtttatgcgtactttgaaagagcttttcgagggttgcaatttccactttggtagtcctgttaagaaactgtttgatatgttgaagggtgggcagtgtgaacccaggaatacgctttatcttgaaggacgtagtttgtttctacgaaccaaacattatcatagtttgaggaagtatcataatgacatggtggtgaatctttgtcagacgagggatgcttggacaagttgtaaagggtatagtatcgatgagaagctccgtgtcctgaatattgtgaaaagccaaaagactctgatgcgtgagaaaaaggatgattttgaggatgattcatcagagaaggacgaaccttttgataagccttggggaagaaagggaaaggataggaagtctacgcaaaagaaattggcccgtcatgctggttatggtgttgattcaggtttggaatttcctaggcggcagctggcggctgtagaacaggatttatatggtaaaccgaagtcaaaaccgaagtttccttttgctaaaacgtctgttgggccatatgctacaggttataatgggtatggtatgaattctgcatacaacccctcttctctcgttaggcagaggtatggttcagaagataatattgacgatgatgatcaggatccactctttggaatgggttctcgacgagaccgtgagaaacctggatattcaaggcctggaaagaaacacaaatcttcaagagatggagaaccaatttctgaacattttatgggtccaccatattcatcaaggcagtaccacagcaattactcaaaatcgagtagatatgctaataatattcagcctcacgcatttgccgaccagatgaagcctgtaaaaggtagtctagcagaccttcgtggtgacttatatcggcatgggaagaatcatggagatggcttttctgttgatcccagatatatatctgatgacttgaatagtaaaagcaaaaagttgaagtctgagagggactcacctgatactagtttgagatcttatagagcttctatgcaacaaatgaacgagaggttcttaaattctgattttggcgagaaccatgtgcaggaaaagattagggtgaatgtggtacccaatgcaaggtctggtgttgcggctttcagagatagcaggatgttcatgggaaatgatgatacagagtcggattcatcccatggctatgatgatgaggaggagagaaatcgcttaatgcggaacaaatcttctgtctcagttggtgggatgaataattctcattttccaatactcaaatccagacaagatattaaaaagagcaaatccagaaagaaagatatgcaggagaatgaattgcttgatggacggagtgcgtacttgaaatatttaggcgtatctggagaacacatctatgcgccagggacagagaagcactccttcaagtcaaaacagaagggtaagatgcgtgacaggagtcccttagagaacttttcctctcgagattttgaagatggcccgatcacaagcttgagtgagtttcaggacagaaacaacaggaaggagtttttcaggtcaaacaggaatagccagacaagagagcaaatgattgatagaacactatttcagagaccatctgcaaaaccaaatttgtctgggagaaaaagagtctttgatgaagatgacgaatcacatgagatgagaacattggttaatgcccgtgatagacttagtaggaaatatcaggtttctgaggatgatggtaatagtggtgatgaaaatttagaggccaggttgtttgtttcttgcaatgctctgtcgaaaaagaggaagactagagagtctttgatggacatggagaggagggaggataatggtgatctgcagctatatcccgacattcaactaccggttggtgatgtaactgtctcgaagagaaagggaaagaagaaaatggaggttgatgttggttttcttgatctggaaacctctgacataccgaaagcaagtgaagcagaggtggaaaccaaaccgcagaagaagccatttgtgttgatcacaccaacagttcacactggcttctctttctctattgtacatcttctatcagcagtgcgtatggcaatgacaagtttgcgtcctgaagattcattagatgttagcaaatctgtggcagtagagaatgcagaacatgaaactggagaaaatggtgcctccgtgcccgaggaggcagaggataacaagtcgccacagcagggaaatgggaacttgccatcccttactatccaggaaattgttagctgcgtgaagtcaaacccgggagatccctgtatccttgagacacaagagccgctccaggatttgattagaggggttctgaaaatcttctcttcaaaaacctcgcctttaggggcaaagggttggaagccacttgtaacatttgagaggtccacgaaatgctggtcttggattggccctgttctcggtccttctgatcaggagactgtcgaagaggtaacatcgcctgaagcctggagtctcccgcacaagatgcttgtcaagttggttgattcatttgcaaattggctgaaaactggccaggaaactcttcagcaaataggaagtcttcctgaaccaccgttgtcactcatgcagtgtaaccttgatgagaaagaaaggtttaaagatctgagagcacaaaagagccttagtacgattacccagagttctgaagaagcaagagcctatttccgcaaagaggaatttctgaggtactcaattccggacagagcctttgtttacacagctgctgatggtaagaagtcaattgttgctcctctgagaagaggcggaggaaagccaacctcgaaagctcgtgaccatttcatgttgaaacgcgagagaccaccacatgtcacaatcctgtgtctagtgagagatgctgccgccagattgcctggtagtattgggacaagagctgatgtttgtaccttaataagagactcgcagtatatcgtggaggatgtgtctgattcacaagtgaatcaagtcgtgagtggggccttggatcgtttgcactatgagcgggacccttgtgtccaattcgattcagagaggaaactgtgggtgtatctacacagagacagagaacaagaagatttcgaggatgatggtacttcatccacaaagaagtggaagagaccaaagaaggaagctgcggagcaaacagaggaacaagaagctgtcactgtagctttccttgggaatgaagaacaaaccgaaactgagatgggttcagaaccaaagactggtgagcccactggtttggacggagatcaaggtgcaacagaccaactgtgtaatgagactgaacaagctgcagaggagcaagatggtgagaacaccgctcagggtaatgagccaacgatatgggagcctgatcctgctgttgtttccaatccggttgaggataacacgtttatctgccaagagaactcagtgaatgatgatttcgatgatgaaacatgattggtgataccaggtagatctcaaacacactctttcatattcagatttcatgatcaataagttcattagtccactgagtctaagtccattcctgttgttttcaggtgaaaatgccaagagggtatttgattaacagaaagagaagcttatggtgatttgttgtataattgtttggtctctcaatagatgtcaaaaagagtgagatcacagtctctctcccaaacagaggttattccaattgttctcatgccatgcatgttttttattcttaaagaaaaaaagaatagaagttagttagtgatcagtcttattttgattaaacatcaatatttgatatattataggtatagtaataaaaaacgtttcataaggtgacaatattcacgacgaaatattagaattcattatgaatttatgatgattgacattcgtcacaaatacagtaaaactgaataaccttcgtactgtatcttaaagatcaattttcagttacttcttctagtaataattcaatttcttttaacatcatcttacaattgatgtccaaattatcaataggttaaacctctatattttctcccaaataaaagtataaaatttgacgtcttaataatatttcaaaattaaatattttaagattttcatccttaacacaactacttaaaacataaattctgtcgatgacaaaaaaaacacacataaattctgtctttttttataatggtaaatagcatcatcaaacttatattgtttagaacttatgcaaaaccttctagtaaaagaatatagtccaatatgtattgtatttatcataagtttaatctatataataatggagaattgttaaaaacgtctattttctaatactacttatcaaaaatggccatcctaaaaccttataaaaatatacccctaaaaacttatttataacgttttacacaagtataattggccggatgtttttctattgtttctgttgttcttgaaaagtttttaaaaactttgatgggcatcaattaaaggtaaataaatagaaaacaattactgaacaaaactatttttgtagaaaaccaaaagtatcaaaaactaaaaaacaaatgttattttttgctcttgatacacaccaagagtcaagagactccatgaaatatagagatgatagttactaatactaaacatataatattttaagatataatttttgtttagaattattcatttaacaaaacaaaattatggaattttctttaaaatactccctccttgttttaatagttgatgttttagagaaaaacgtttgttccaaattatataatgtttcagttgtcaatacaatattcattaatttttattgtttttgactatttatcttccgcagagtgttatatcattggttgaattgtgtgtagataattaattattgttattttagtttgattcaataatatgtgtgagaaatcttaaaacatcaattattaaaaacgtagggagtataattttaaattttatcacttttctagaaatgtttgtggattgtctcatctctttattataacttttgttatgttttttttataacttacaaatgttcttcccttcatagaaatatatttcaaagatcatgtacttataaacgtgttaaaaatctttggaaattaattacgacataacgcaaaattttggtagaatgttcataatattctaacatttgaattcattatcacaataattaaatacataaacatagtaaaaaaaatacaatactatcttgagaatatgcagtagatgattatgaaaatgaaaagaatcaacaaactaactatgagctacagtgttttgtcagagagtagatgaaatgaccatttaacctttcctttcaatttttatgtttcatcgtcatcaacacaacatcttatttctcaccatcatcaacacaacatccaccaccaccctcaacaacactaccaacagtcaagatttaatcgtccaccaccctcactccaaccaaatcaatattccctctaccatcatcaatataacctccaccaccatcctcgacaccacagccacaagtcaaatttaatctcacaacacaaccaccactacccccactccaatcaaatctaatcccccaccatcaacatcaacacaacttccacaaccatcctcttaaccattgccacaagtcagatttaatctcccaccaccattctcgacaccatcgccaccatgctttaataactaataaagagatatttatcaatatttcatggtatacaataaaatcgcataaattcttgcaattatgttctatatatttcatgctattcaacaaaatcacatgaaatcttgtaattatgttttatataatttcatgagattcaacaaaattgcgtgaatttttataataatgtccagatttctcaatataccatgttattcgataaaattgagtgaaatttttcacaacaatgttcatatttggcaatatatcatgctattcaccataatcacattcatttttgcaataatgcctcctcaaccgccgtacaacttctctgctgcctattgttctctaattctgataaaacgtaaaaagggttatttggtcaatgtccctcttctaaaaagtgggtccatggttagtttctaatagaaaagaagtccaacgttattttcttaattattttatagtcaaaggttattcattaatattaccctactatcttttgtgaaaaagagttctctcacgagattcataacttagaaaaatatgaactaagacacttgaaagaacaaatacaataatcttcagtttggctaagagcctttagaatgaaaggtgttttgcatcgagagtgacactgggagcatagctgtcgtgtagtatctttggtaggaaccacttcaaatgtgtatattatagtctcgaatatggatcctgcgatgaagcgtgagaaatccccaaaaacacagtcaatatggaatgtgaccacacaatcatcgcatgtgtagaaccacttacttggatccatttccgtctcgcaaatatcacaacaatatttaccacttgccttttcaccataacatagggagagaggatgtctatcgtatttgtgcttaagtgtctttggcaaatttgcacaacaaaaatccaaactaaagtcacaaacatcacaaccaagcatgttataagacagcttatgacatgaatcacacttggtactggcttcttctttgtaatataagggatgtacatggccatcatggacgaacggttcggaaacggaactgcaatgtacatcaagcattaaatcatcagagatgtacctgaaaccagtcgattgttttccacaagcgtcacatgagaaccaatctatttggagatcttttcctctagcatgtagggtaaatggtctgttgtatattaagtggcgtctcttcataggcagatgtgcacatttttcatgaaggaaaaaagtacattgatcgcaacaatatatcgaaccagagttgcgaggaaagatgcatgcttcacatcggctactttcatcataaataatgtcttcattggtaagccttagattatgtttctcgtggctgaaatgatttatcaggttatcaccaaccaccttaaacggaagatcttcagcttcttctggtatcccttcaagttctatcccatcccaaacgttgtaacttgttgcacattgcgaatgaacaacatatttggggcaaatgaagccccatgaaactgattcactggtcgacgacaaactccgcaatccgaataccctgggccaatatggttagtgagagttatgcgatgaacatgccgattaatgattatgacatgcggtaagccaatacaacttcgatggaccataacatcacattgaagacataaataagagacttggccgtcttcatgcatcccacaaacattacaagtaaatgagattcgtctcgataagagggtaagatgatgctcatgggtattggaatgctcaataacaagaggtggagggcttctcacacagtttaggcacatgctgaagtcacatattaagcagtaatacatcacaatttccgatctcactccacacaaaacacatgctttttcggcatcatcagggagggatttagatatggtgagctcaagagggtgattagggtgaaaaggaaggtttacttttttctcatgatatatacactccaaatgagcatactgatcccgagaaggtagtgaataataatatttaccagcaacaactgagtgcccacatactccacaacaattgtatattccacttatctttggaaagacaaatggtaggtcttgaaaatcatgagtaggtggcggtggtggtttccgcgcacatgatgtgtcgacgttgaagtcacatatggaacaatgataaaaatacggcacatcagctaagtgatgaatgccgcatatatcacattcatatcttggaggcctctctgtaagccggagaggatgttccgggtgagaagggtggttgatttcaagtggtgactcggcgcattccttgtgaaacagaacacgattgcagtcagaatcattacatcgatagcctccatagtattcaccttggtttcgaaaactgcagccttcacaccgatcatgaaatcgaaaggaaagggacaaaggatgtatgtgaataggtagttttatcgataatatagccatggctccttaggcgaagcttttgatgtcttgtttttgtgttgtttttcttgtctttttttttggtttatgaattgttgtgatctctatcgaagtgcgtatatgaagttcttgaaaatatattttacaaccagttgttgaagtggcttcatcatctactcagcacaccatacaactaaaatttctttaagatatcaatagttaaatcttatcgcgtgatgattattgctagttgttatttttaatgcctaaattattattgcttattagtcacaaagtggcattatgtggtttatatatatatagtaatcaaatagataccattccattcaattagcaacaaaaagagaactacttcacctattaaaatggtagttgaattattggtttaacgattttcggacaacaaagtattgattgtttaagaccaactaggaattatttgagtcattatatattaagtttggtcaaaatattaggccagtcttataataatatcattaattaaagcgtttgagaattttaaagtcaagtctcaacccattgatagtagccggagacgagacgaggccattgaatattcacacttcatttgagtacaataattaatgtgaatgtgtcggaggttttgagatgtaacagtgcaagttcattaaattttttttaagatttgacatgtaattaatcatgtaatgtatttgtgtttaaaagcatacttaagctaatagcttcactactaccacaaaacaacttatatcatcactgagtacaaggaacaaaacttttcgaggttgttgctgatatgtcctaaaacattgcatttactaatggccaatcgtaggaaacagtaaggaaagagctgtgcttacaattttcttacgaaatttgtttgaagaaaagcaaaaatggttaaaactttcgtgagacttttcctacaaaacaaattggtaaagaatttcgtaggaaactgtggtataagtgaaaaaaaaaatttgatcgatttcctaccaactattttaataacaatatttaataattaatgtgctaacataattgtgagaccttaaatattaatgtgattcgttttagctttaccaaaaaaacatatttcatatgataatgatactcatatttaaatttgacacaccaaacactaatctcataggagaataacaatgactattccgatcaaaatctgtctccaaagagtgcgagaatccaaatagcgtaaaacgtgttcaagatctctcgagccagccctgcaacgaactcaatcaaggcactcattcttcgactcactttctttgatttactatggttaaaactccatcccatatagcgagtcacattttacaaactcactgagtcatcatcttactactccttctcctatatcctcccaaagctcaagcaatctctttctctcgtcctcacacactttctcctactctccggtcaccttaaaagttaaaaggaagccacaagatcctaaaccatagtgacaattttaatactaataaactaggttttaacccgcggtttaccgcgggcaatcggtttatttggttcttatactaaatatatgaataaatttgatatcttaaacttataaatataaatttctaatgattagtgaagaattgtaatatatgatttggatattattgattattgacttcatgattgaatatagtgtttttagggatggattgtgatcatattttgatttcaaaaacgatatagatttcttatttttgttgaacggtttagattgaagggaattaattttattgaacggtttaaattgaatcggatcatataaagtttaggagattgttaagaccaaattacccttaatgattttgaatagcaaagaacaaaatccaaaattgaaatcaaaattgaggccaaattagacaaaatttcaatttgtacttcccttttaataataaagggattattaattttaagtacacactttgttggtaatttatttaaattttctaggcacaaatttttgttaaacaaataactaaaaaataatattatgtttatcatcattggtcttacttctaaacctcatattattatagttttctgatcaaaaatatatgtagttctagaaatatttaaagctttttaccaattcattgtgttccttagtggttcgaatcggtacatgttgtcggctcttcttgaggtaatataaattacctttctttttaaaaatttatatattatactggtgaaaaatatgatataacatattttcttgtcacccaaaatattgatttatttaaatgtgtagattagtgttcacattagttaattgttcgtatctatcttaattcataactagattctgacccgcacatacgtgcggggtttcatattttaagaaatgtattggaatacatttttaataaaaaatattggaatgtataaattataatgtgtttaatgttatttatgatacaatagctaatttgttttattaatttatattatttatatttcaattgtattttgcatagtaaatcgaatgttagttttgtttcagtttgcggaataatatatagatatttggaaaatctgtgtatttttgttagtttgatatatatacaaattaattgtttttgtttagactttgatcaactagatgatatattgtgaaatttactttgcggtacaccgttggtcgatttttttgtaactaaaaattcgaattttcagttatagttgttttgtaaatattgtttcttttgtttagtgtttaagattgtataattgtgttataattattaattctaagatttcactcgtagattatcgtcccgtatgaatatcaacccaaactcgttctaccagataacttcatttatattaaatattctttttgttatttttaaatattcttattgtattatattaaaaaaaatcgagggaattacctgtggtagatcttggattaatatatttaaacataatttgtgatttgtaaatttatgatattgtagtatataaaaccgatatttagtgtataccttcaaataattgtagaaaagtatattttaaaagtcaaaatttgtataaattgatattgcaacctcatgaaatcgtagtgatttattcgtagggtatcacatgctaattgttttttatatataaattgataaatttgttgattttagttaaaaataaaaaataaaataagttatatttgttttgtttattgttttaaattgtataactatattttgattgttaattccatgattttatctgtggtatagtattgaccaacacccggctagtttcttgtaatctagtgtgaccctaaaagaaaaatccataggaatacgcataaatggataataaaattaggagataaacatcattagaacatgaagtaatttacttatgaatctctatctattttttaaaagaatcaatattctagattgattgtgaggcaatgtgaatgtatgcataacatttacaagagatagattgtacacaaaattagattttaatttggattcaatcttagctttactgggaaaaactaatcagaattacatattttaaatttagtatgacaaaaatattttttttaaaagctaaaatttactatgatctcaacgattttggtattctttttaattaaacttatccttatgcattatcgcaaatatggtagtcattattgttcgaatacaattactgatctgttaaaaaaatcatattattgtttgttccaaaggtaagtcattcaaatttcaaagaaaaaaaaaagaatattggtgttaatcaatattttctcattttgaatatttgcattaaaaaaatttaaaacattggtatttaaattttgttttactgttttaagaaaagaaataatagaatctagaagaatgaatattccaaaagcttgtaactattataatacgtttaaaaatatattttcttttatataattcaaatttagcttagtgatatattatttaaataacaaaaagtacctgttttaaaaaaatactttcaaagattatatcatttaaattttaattaaaatgttaaatattttaatctatattgaaactattttttagataattacaaatttaaaatccaaaaattctcttttgaatatggtaaaacataaattaaaatcattttcaatatggtaattaatttattgatttaatttgattttttttaaaaacaaaatccaagatatttatttagttgtagtagttgttaatttactaaattatccatgcaaaaattcatttagttagttttaaactacctttacaatgttgtagttcacacaatacttcccaatagtatagatttagataaaaatatatattaaaaaatgatagagagaataataaaaacagttgccataacttaatatattaggaaataatttgacatgggttagggagtaaaaggagaatacaaattgatatatattactaacacttaacagggaaagaaatagaactatgcattaattggaagaaaaaaattaaccgaggtgcaaaaataggattgaaatgtggatcaagggggtcaaattctattttcttaaaactacattatgaaccaaatgctaatcaagctttgtaatgaaaattgataaaagttatgggggtcaagtgattgatgtttaagaaaattaaacctactttcaatacttgcacgtgaagctcacgtgggatttacacttatggttaggtacaaacaggggcggatctatgttgagactaggtagggcacgcgccctatactaattgttaaagtagttttaattgatcacttcttattgatatctcttggctcatttggcatagagtgccccaggttaatattgtaaattttaatatgtgccccatacaaattttgtttctagatccgccactgggtacaaagatacagtagaaactctataaattaatactcgataaattaataaacacgataaattaataaattatgtcagtcccaagtcgggtcaatgtaaaaattaaccaaaatcgataagataataagataataattttttttaaatctctatgtaaaaatatggtcccaataatatcatatattaagaatcataaatcttaagcatatttttttaagataatctaatataatatgattctagtgttctttgtcttttcttaaagttcaaatctcgttgaagttcatctctaattttctttattgcatcaaaactcgtggtgttgtcttctcgatatgtatccaaaagttgtgaagagttctagacgcgataattgtttccttatggtcattattcccaaaagtttcacattatcgtcttcaacttcttcactaacattacagacataaatcacgatttcttctaaaaactctaaatttttgagtatgcttcattttcatccagatagtcgagtagtctattgacatttatcctatttcaaaagaatagtgttgtattttgctaaaatatttctataaattgataaatattaatttattaatttataaagtttctactgtattcacgtttatgggtaggtacagttaaagttttcacgtttatatacattgttgaattgaatataggaaacatcctgtttgttcaaaaaaaaaaaatgaaacatcctactacatatagttgagccgttgcatgcatagtacacatttgtattcgttttttttttatcaacaaacgatttgtattcatttccatattttctctagtacaaataaataaacaataaagaatattaaataaaaactgatgttttaaactcctgaaaaccaaaactccatgaataaaaaaggtttttacgtgtaatgcaacaacactctctctgtacagtgtaacacttaaccttcccttgggttttgtaataccaaacctcttgatgtttcagttaacagcagagaggggatatcttgaatccgacacagctgcctcgtaaagagacgaagcgcgtataaggtgttgttgttgctgctgctgctgctgctttgcatccccattggcttgcttcgacaacttctcatcacgaaacgctctcagtaactcctcagatgctggagttctaagctcttcgatggactcaatgcttggtatgtcgattggtcttttctttggcgttgaacatgatggttcatccacctgttccatccaaaaacacatctctattgttaactagactctaaaaacaatagtaatgtctgaaatctgcgggtttctcggtttgttttgtgcaagttgaaatagtaaaaacttactacatattcatcaagaagacatttccctgcattctctgtgatctctatgatcttgtgattgtgatcactctttagctctatcaagtcttcacagcatggaatgatcatggagttgacctttgtacatgcatcattatcgagttgcaatgaatctgcaaatgtagaaaactttcagcaaataaatgaagaaccttttgaatctgtaaatttaagggagttaggtagctctactcacgatcgatggaagtaaggaggctactatttgcagcatcaaaaacatcaagagaggatgaaacagcggtcgagaattgagagcgtaggttctcattggcatccatgccacctctgttgagagattgaagtgataagtgacttgagacatatgacagacgatgaaaaaaagagaaatggtttgcggagatcaaacctaacgatggagtcaacagaagccacattgtttcgttctagactgacaagtgattcttgagctttcctccattgatgtgcactcatctcggtcttctccaaactacaattatccatttcgaaaggtcaagcaaatgcatgaaaaaagctcggcgcgtgggattatatatgttatgaagttttgtagactgtgagatttttatttataccagtttaagagaacttcttgcatagctttcttcccgctctcaactgctgaagtgtcctcgtggtggcttgattctgttttctccatgtgaatgctccactctgctttaatggaagaagttgaatcttgcattgttgacatctcatgctgtagggtagtagttctggtggatgcgctctcgcgtagatcgtgtacagccatttggacctacgaaaagattgaagagtttgcttaaagacttaaatcaaattcagttcctaagaactaacatgcagaattgcatacgtacaaggtttttcttcctagcattagaatttgcaagaagctctgctactttctctagcaattgtctctcttcatttgcagcacattcctacaagacagatgaaacagcattagagtctacacaaggcacttgcagctgcgcatgtgtcaagaagccaagaaccagaatcacctcaaacttgttttcaaattcgctcaatttcttgtggttaactgtctgtgcctcttctactatcccggttaatttggtagcatgtgtgtctagagtcttgaagaattctactgttacttttgaaactgaccttgctgtatccacagctcgcgagtgtgcctgcagataataatgtttcaacagaaatgtccgatatttatgttgtaacatttaggatcatcaaagattattgaaccttccgttgctgctgtgcaaatgtaataagcttctcttcctgtttgttaaggctactttggagatcttgcagtaacatgtcagcctcggaagcaaaacccttgaaaacctacaagagacaacaaaggaagaaaattgactcagaacagagataacattctcaagtactagacttacattcacaacaaaggtatagtgtgataattaaagtactagacttacattcacaacaaaggtatagtgggataattaaagtcctagacttacattctcaagttcatgcgaatgtttcgaaacttctgagttaaggctactaaatgttgactgagaatttccatctagcttcacagctatgttatcaagagcttcaatgccagaaccataaactctcttcagttttgaaagtctatcacggagttcttcagtagcctttacaagaaaacagcagaatgaggccaaaaatgatcagtgagaataaaaaaagaccatatagaaagaaacaaaaatctagttcagattatgatgtgtcacctcagattttgtcgacacaaaggactccatgtcttcctccatgtgttttagttgaacctcttgttgagtcaccgaagaagccacagtcttatgcaatagctcaagctgttgtgtgagctgtgactggaacttttggatgagaaatctgtttccatcctcgattttgtcctttctttctgcataacaacaacatttatgaagcagggaacatttatcaacagaaacaaaaatatttggtccatgaatcttttacctattttggaaaacaagttggaaacatctgatgatgcactttctagttctgtgcgtagctgaaaggctcgctcgacaagtgatttttctgcaagtcacaagaatgttattgtaagaatttctaactgctaagacaggattcccctcatgagaacgggtactaaaaagaaaatcaagtacctgacttgaggagattagatatcacaaattccttctctttaatggttgcattcgcctgtctgtatttctcttcaagatcaaacaatgagtgctcagtttcctcaagctttttctgatatttgtagaaagatatgcagttagctttttgtgcatttcgataaatatatataagaaatggtttcatgaggagttagaagagaaatcaggcccaggcgtatacctcagttttttcaagtttctcactcaactctgcagttaaaatctgctgagaattgtatagctcctgaaggtcaacgactcgctgcagggccaacataatcgttacaaaaatgttatatgaggcattaatgggatatggattcaatgtgtgttttcataccttgtccttggattctgattgaagttctaatctttctatcttttcagccattgcctgtgattagaacacaaatgaatagagttactttttacattcaggattggaaaggacaaaggaatagataagaaccattcattcagagaaaagttaaacctttttctcagcctcttcttgaatgtagcggtcttttggaatataaatcccattcttctctcttgcagcatatacctctaagaaaatagaggaaagttattaaggaatgccttgaaactaatggataaaatgatcatactgttaccttgcttcagtctgtcaatctcagagtacagatctttcatgacagcagatttcatcatcttctggttgatctggaatcaaagaggaagctgttagagctgttgttttattcaagagataatattgcagaagaatgtcgctaagactcacctctggtttgttcttgatattcttggcgcgatgtgcataatccaaagtgcttagagtctcttctaaacagtggatggaaggtgaaattgtggcgattacacaagttttcgtctttcctcccaatgattctctcaagagcctcgtcaatttgctatctctgaaaattcaaaagcaatagctgagtatactctaatgtcaaaccaatactgaagacaccaagaacaaggagattacttattatcgttttctatcaagtgatcacttgtacctgtaaggaatatgaccagagtgctccacaagcgcgttaatgacacggccaagagtaagtaaactcttgttgatctctccagcttctctggctcgtccctgcaataacagttgtcaaaatgcttagcactagcttccatgactgcctggaagacactgacctcagagacgatgataataagataaagtatacctctcgtgcaccagaacgtgagatattctcggaaccagcaaggtcaacaagatttagtttcccacatttgatcatctcttctccctctggagtattttccttaatgtgaatggttatggaaaatattgaatgagagcgactactttgcttattcaaaagagtttcagctgtacgccttttcgcggaacctttttctaagatcttgtatatctcattcgctgtacttactatctcttcttctaacccacggacaaagacacttcctttcccgtcttccatgagggcaatcgattttttagacttctcatcaacaaattttatagtctcctctggtgctaaaagatctgagatttcctcattatatagttctaggaaggtgaccttcatgctatattcagccccctgagcttctaatatgtcgaaaatttgcttaacagctcttggaataacacctgcgtcactcgggaactcaccattctacaaatagcaaccgtagctatttattaaaaaccatgacaaatacatctgaatcatacagaatcatgttaggttcgttttagaggagccaacctttttccttgcacctccttccatcgtatacgtctttccagttccggtctgaccatacgcaaatatggtacagttgtaaccctcaagtacttcaaacacaattggacaaatggcttggtcatataagtccttctgttgagatgctggaccgaagacctgagaaggtcaaagagaaaatgagaaaattgagggacaagcatagtcaagaaacaagcttcaaggcaactttatcaactttataaccttatcgaaagcaaaatgtctatcaatatgctttccagcaatactctgagtggcagcaacttctctacggttctcgttacaagaaatcaccaccggtgtatgaattctagcttcatcctcactcaatggcctataaagaaccaaaaaccagcaagaaagatcaaaacccaaaagagaccaaaatacaaaaaactcagagcacactaaaagcgcacctgcaacgcaatatgacctgcacattcacacccttttctttatcatttctattggttgaatttgattcagaagatctcgattctcttgctgatttgtcacttgatcgtggtgtctgagctggagagagagatacaatcccacctcttcgttgctgaatcgaatccattctgctaaaattatctaccatttagattctctgcacaaacaaatcattcacattgagcaaatggatccaaggtaaccaaaaccaacattctcaaaccaatcaagcatttaaaggtcacatctttgagaagcccaaaaacttaaactacaagttctaatctagaatccaagactttcgcagtttgacccaaatttagcaactttcttactcaaattgactccatttcatgaatcagcaaaaacaaaacaaaatcagtgaacaaaatgtaaatacattgctgaagctacttcaatatctagctactttagtaccaagctatatctagatccttctcttaataccgatgacaggaaatcggatcaaacgatcgagtaacaaaatgaagaatcttggaagatgattcagcgagtagtacttttcccggaagcaaaacccactctggagatttgaagacttacagagaaggatcaagtttcagcaatggtggattcgaaagagagcgacttggagagagagagagagagtgtgacttcaactgcatttattgttccttcttctcaaagcagaagaagagatgagagatgaagtaaaaggcacaaaacttaaagtaaagatcaaatttttgtaaacgacgttacggtttaagaagaccggagcaaaccgagatttcggttccggtttgacgatttattatcctaattatctttatttttccacttcttaatgaataaattcctgataatggaaaaatagttacattcattcacattactaatttggttaattatttgtaaaagcgtataagttaaataaaattgtgaatattggtctggtttgatttatattggttagcggtttagtttgggttattattttgatgaactttggattagaagacaaaaatttgtcttcccgttttgaggggaaaagttagagccttttcagattttcttccataatcaattttaaattgtagctcagtcccattaactaaaaagtttaaaatttaaatttgaatttgagatattagttagtaactttttttcaactctaatgcaaaaactgtctaatttctcacctaaatatatctactaaaaaaaagacaaccacccataatgcggaaatttgatatatcatgaaaaatttatgaataaaattttagaagtaattttctaaattttacaaaagtcaaatgtgttcatcatccaatgaatttgataccatagacatgtcccaagtttcatatcaaacaaatgtggggttttcaactattctatcacatctccaaaaggcaaaaacattagatttaagttttaactcactacttcttaattaggattagagttacataaaccaattgtcaatgttagaccacatttaatgttcttggaattagtaacaaaaaatatagattattagtgaacaaaccatacatatatattggaaaatatgtgtatatatatgtttggcaacatgtggtttctatataagagattatgtgtgtattaaggagtgaataaagaagcttgaagaaaaagagggaaggcaaaagtgtggggttaaggagccatgtgatatgatccttcaaacatgtggttttctttttcaaacccttttgctttctttctctcctctctcattatcaacacacacatacacatatttatataatgagtgtgtgtgtgtgtttgtttttcataaaatttgtgtgtcaagctcagtctcgcactcatatctacgcagcatcttttggtaccaaacacatgtggggttactttttatggtatcgatagtttagttcatatttgttggaaaaagttatgtatgaatttttttttacagaaatataattgaactaggattacatcaattatgttatcgtttgctaagttatgtaatatcctagattttagcaaaaacgactactatagagctccatctaatcttgaaaagaaaaaagttattagataacatcatttatcatatctatgactttaaaaggtaacacaattaatttctctacaaaaattattatatatagactaatatgtatctgcatacatcacatgtatgtatattaacatctatattttatatatattgcttgcaagacactctatcaaaagtatttcatatgcttgtgtcttacttcaactctctttatttggtaaatataatctagttactcaataaaaacactaaaacgaagaaatttttcacatgcattgttcagaggttttgattccctccctcaaccattacacattttcatttacaatatatgttacaccatttatttgctttaccttaatcataaaaacgcgataattaatgctaacaaataaagagactataaaacctaagaaagagctaattaacaactaaacctttgtttgttgtcgatcgatgcttaattcaatagactaaatcatatatcgcgacttttgttttcaacgaggagttacattagtaatggaagcatcatcgactgaacaaagagcggacgtattgatagatagacgatccactaatcctacttgttcatgtttactactccggaagaaaaaaccaggtcgttgaggaactgcgagagcaattgagctagtagtgagcatctggacaatagctgacatggttggacgatcttcagcttcttcttgaacacatagtaaagcgatatggatgcatctcgaaacttcatttattcgatagttatcacgaaaggatggatccactagctctaacggtgacccattgctccatagtctccaagtctagtgaacattttagtatttagaactttggtcactattaaataaagtaaaataataattaaggctcgatatataaaaaatggctctatatatactcacatatgtaaccaaattgccagcactagtaccatccatttgatagacattgctgttctttttcccacttataatttcgagaaccaagaccccgaagctatacacatctgatttcatggagaattggccatacatcgcatactcgggagacatatagccactgtgacaaaactcaaagcttaagttgatagaagcatgcatgttatgtgccttaaggaaatatacggaaaacttactatgttccaactattctcctagtattggcttccgtttggtccattccgaaaattctcgccattccaaagtcggcgatttttgcattcatatcatcaccaaggaggatattacctgctttgagatcacgatgtatgattgtgagtcgtgaatcttgatgaagataaagaatccctctagcaattcctccaatgattttgtaccgtctagtccagtccagcaggctttgcatggtagagtctgcgcatatgaatttacaatgttagaaacaatgaatggtatacaatttgtaaaaaatttatcttaggctaaatattgaacataactgaccaaaaatgaagtagtcgagacttttgttgggaacaaactcatagacaagtatcctctcatctctttccaaacaaaaccctagcaatcttaccaaatttctatgttgaagctttgccacaacaataacttcgtttgcgaactctctttcaccttgtcctgatgtcttggataacctcttcactgcaacttgtactccactaggaaatataccctacaaaaataatcatgaaaatgaaactttgtttttgtttaacacatattcgtttttatttattaagtgttgtttttttttttatcaaatatatattttgaaagcaaactcaattatttctcctttgtggccttctaaaagttaggaccagttttggacaatggtaataataccttgtaaacttcgccgaaaccaccttgaccaagtttgttagtctcacaaaacttatttgttgctgcctcaattgctttaaaatcaaactgaagtgagcccgcagtggtaatatcatcactttctgtaaaacatagagaacattcttcgtgaagaaagaaaataaaaaggagatagtttatcatttggtgtcttaatatgtataccttcggtaagtggttccctctcataattcgtccttgttttcttagcccggagactaaagaaagctacgaacagaagcaggagagcaatgattggaacaacaacaacgatgattacagaggagttccggccttttcctgtattccatcagattacatgtatgaaccacttttttaaaacaaatcttgagtgtctcaaaagaaacgttgcagttatgtccatcataccacgttctgaaatcagcggtgggggagctaacttcagctgctgttgaggagtagagcgaggcggaagagacggtggtgatgatgatctagtggcggtttcattgtagaacgagtaattctcgtaccttgaattacaactagggtaaaaaaatcttcctccaattctgtaaagagacattcccttgatggatttttgtaggcaacgtaaacagtcttgtcttgtaagatcaggtgtgcactgaactaacaagtacaaaggctggggtgtgatgacctttctcgtataaaattttttagaactattcgctgcttcaacggcagctaggttcaacgtggacgacaccaaatccctaaactcatctacttgattttgattacttgatgaaatattagcgccgttcaacaagatagcacttccatcgtatgtaacggtcgagagaatatttcggtgagagtatctaagcatacactcatcgtaataaagcacgacttctttgttatacggacaccaatataaagtctccttgacggaaaaggcgacgcagttacggcaaacttcttgtgagacgtctccgcgacaaaggaaaagtccggtgacacggtcgggagcttgtcccgccgtggcagtttggaatccggtagagtatgaagcgttccgggaagagagagaggacaaaagtgttttgagattggtgaagtaagtgctgtttcttgaatacgttaatatactacttggacaagaatggtttaggtgaataaaattttgaactggagctgaaagaggagataaggaatcggcaaatgaaagatgaaggagaaaaggaaaaagccagaagaaagacatgcttgagtttcttcgatttgcatgtgtctaagatcatgaagcacacatgcattaaataaatttatttttcttgactactgtacattaacgtgaagtacaggttggttcgaagtttttttttttcctttttaataacaaaaatatcctaggcaaaagatgatgatgcacattagaaacaaacaaaaggaacgggttggcgatcagaaattgccaagtaattcataccaagtagtaacagaaagaatcatcgtcattgataggataaacactctcaaagacaatgacgaaagagaagacaaaatacaaagactcatttgctacttcacaatttttatctttttggtattttcttgtaaccaaatctccgttcgtttgaaatcgtatttcgacttgtcatactgaaattaaaaaaaaaaagacaaaattgatacgtgacatatacacatggtggtcaaaaatgagtatgagaaaattgatacgtgacataacacatggtggtcaaaaaagagtatgagaaatgagactttatatatcgatgaaaccaaatccaatgcatgcagagatatctaaacacatacaatcaaaagttaaagatgtccaacacatcaatgtctgtagaagacagtacaacaaaaaaagcgttttgaatcgcttattttttatatttgcatattgatgcaaatgagttttacatcacttatataagtgactttagaattggtgagtgaaaaaaattatttacatcgtttcaaataattatttacatcgattataatattagaaacatgatgcttaactcttaacataaattacgccaagaccaatttgaaccatctgaaaattaattatagcattctatatttatgtattcgttcctcgaatttatgtatctttacttttataaaattttaccatactataattaatttttagattctatatatatttataaatgaaaatttaaggaaattagtgataatggaatggcgggtaaataggatcaatcccaatgcatgcttgtgtccgaagcatgatgtcatcatttgttagttcccctgtctcgttcgatcaaaaaacacgttttgacagaagagattcaaagtgacaatcagtttcaagatttaattctcttacccactctctcaccctggctttcataactttctccgggaataagaatcgccggaaaagaagaaaaccgccaatggagagtacggtggaaagagaggcgtggaaagctcacgtggcgatgatcggtgtgcaattgttcaacggaggatatcatgtcattaccaaagtggctctcaacgttggtgtaaaccaacttgtcttctgtgtctttcgtgatctcattgctctctccattcttgctcctcttgcttatatccgtgataagagaacaagacctcctttgaatcgacagtttctcttagctttcttcttccttggtttaacagggtaattcaagttttcttctaccagtttctgttatcttcatgattgcaatcatcacagtgatgttttggtgtgattaggatatttggtaatcagcttttgttcctcattggtctgaattacaccaatccaacttatgctgcagccattcagccgtcgatcccggtttttactttcatcttggctctcattatggggtaaagactcgatccagtctttctcttttactttctctctgactcttccaaacctagaacaatccattttcgtgtgttgctgcagaacagagagactgaatttattcaagctagaaggtcaagctaaggtaggaggcacactgatttgtgtcgctggggcggtgctgatggttttgtttcgtggactggctttgtttggggaaacagaggctgagtccttgggtcatggtgaatcaagacacactgaaacatctggacacttcatgtctggcttttttaatggacttgggcgatggaatttgggagttttgtgtttgattgggaattgcacttgcatggctgcttttcttgctattcaggcatgtcattttcttctagatgatccacacactttcagtttcagatatcttcttgtctttggactgaccttgcatttgaaacatatatgatcaggctccggtcttaaagaagtatccggcgaatctttcagtcacagcatactcgtatttctttgggaccatgtttatggtgacatctgcttttttcatgactaatgagtcgacgaactggagtctcacaagatccgagttctttgcagttgtctacgcagtatgttcttcacacaccatatgtttgttgatccattaaatttctccaattgagtaactctgttgcttcctctatgcagggagtaatcgcgtctgctctcaactatggtctcttgacatggtcaaataagatcttgggtccttccttggttgctctctataatcctcttcaacccgcagcctcagctttcttgtccagaatcttccttggaagccctatctacttggggaggtttaatatctctctccttttctcttagctattctcagccatcaacgggatgtgtctgaagtttcctaactaactaggcttttttctcctcctctcttagcattttaggcggatgtgcaatcatagcaggtctttatagtgtcacctgggcatcttacaaagaaaagaaagcggcagcagcaatggctgtgatcccgatcacctcaaaggaagctgaacccttgatctacaaggaccataaaaacaaaccaataggacatctattcacaaaatctcccatctcttcaccaaaatccgatgattgaacaaaaactctggcttcttgaattacttgggtgctccgatgttttcttaaccttttgccgacgagagagtgactattttattttctaacagtatatatatgcatataaacatcaatgtttaacagagtctcattatcaggtttgatgtcctcaatgcgaaaaccattctgcataatactcgaaaccatagcctccaacagttaaaactgtctgaccctccatagctctgaacaccttctctgcatttatcaccaacctatacttcctgtacatatcaatcagcccactttgtatcaaaccatttgattcaaacccgagctttatggaattcacatgcactcgcttccaaaatctagccccatcactaacataagtggaagaaagatacaaatttgtggcagagggagtgaacttgcttccctgatgttaaatctgaaatcaaggcacatgcttttagaacacatcacattatgttgttcaacatagcaacaaggagagaagtggcattttggtaaccatccattgcaatacaggctatacagctgatgataacaattgcagagcaacgaaaatctctgtagggcatttattccatatgtggcgggcgaggtccaggcgccaacatgatacacacatcaaaaagacggttgagaaactgcaaggttggtcttaccccagatttcaaaatgtgaacttgcagctctataagccccaccagcgatcacgagtcagttgatttctgagccagagaagagtacagctcttcggttccagacggagaaagacaatccagtaacccaagaatgtcggaagtcaagcaacaaggagttcgatcctctggatggcgttaataacggcaggttatgtatgggattcatgacaagaagttgaccatggacccagttccagagtttttatctgaattactctggagattttaattaaagaacatattgaaccaaacacagccacaagagcttttatatagatgatggcttcagagttccaccattaaatcagggagcaatctgagacaaaaatgaagtcatcaacaaaagagatacaattcagagaatttcagagcttttctatcattttatggttctttataattctgggagacaaaacttaagttatagtggagaaagcaccaatggacatgacaagtaataaaattaagatcttcttagtctaaatattacataatgtaaatttaagatcttctccgagctttctaccatgactgagaaaacctgaactcagcaaaaatgttgtttcatctcttcatacctctgcatcactggattctgaatcttcgtcttctctccaagaaagaactggattgagtgaagatgacttgtataataaagattgcaagaagttaaaataagcatacttgatgtcaaactgcatgtcataccctgcaaattagatgcatacatagcttattagaggcaaggagagccgaaaaatactggcttgccactgaagacaaacagatgatggaagcaaaactaaaactcttacaatagttcactgcaatggtataacctccatctcctggggtttgactaacatggtgaaaccacatgcttggcctgcaaaattcagaaccattctgagtcagaatcatgactagaaaatccaattgtgtagtaggtctatcacccatttctaatctttgtttcttataaagcaaaggtaagactgaagtagatacattagtgatccaaattaagccaaaaagtttctgagaattttcaatctgtggagctatgggatttaaattcttacaggtaaagaacctcgccagccttgacagtacaatgaaacggcttcgggccatcaaagaacaacggaaatttcaatctctcgcttgcttccttctctggcgaagggtatggatcaacactagaccaaggtacatgcctaaccggctcctcaacctcaagcttgaacgcatcagtatcctataacgattcaaactttatctcattcaacatcacttaacaagaaaccaaactcattgaaacttattaatctaaaaatctcacagactcggtggtaagagtaattagctgccggatactgttcgatatagagacggtgaacatcagtcggaggaagaagaaggaaatgtttctcccctgaaacaacagcgtaaagattctcatagtgatctttatgaaatgaagtcacggagtcatcagtaccaatccaaaggttcacagcttccggcgaacaaccaaatgcctccgtagcccactcaatatcaccgtcgcagtctaacgcaaccgtcgaatactccgttctaaaacaatcgttttgctgttgcaaatacccaaccttcagtcctttacacgacgattgaacaaccttaagagcctccgggaacagaactttctcaacatgagccgaagcgaaacaaagatcactatctccggtgacggcgtctgcgcagccgttaggagtgagatgtagcgagacaacgtcatctgacaaagctccggtgaggtaagccggatctgaccagagttttaacgccggccaatgagtaatagctttggagattacacaaggcttgctctgagacacgtagtttcggagaaacttcaccggagacggttgagaatcaaaacgatcgattttagttcctaagctcaattctctcacttctctccataaattctctatctctttagccattgacgaaaaaaaattggcgggacaaaaaatttgggggttttaacacataaccaagaaccctaatttatatttaaagaaaaaaagaaaaaaaactgtttttgttataaaaataggatttttgaaataaacttgtttcgaagaggaagaagaagatgagttgttcttatctactttctggtgacgcttccgtcgtcgcttcacggcggtggagtgatgtttcttcccggcagcgtttatttctcccacggcaatcactccggcagccatcgggttcttcgttttcccgatgcgtccgattagtcgctaatgtaaatgatcatttcagtaaacaatcactcgcgacgagaaattgcttggcttcagtgtttagtgcagacttgggtggaagtaacggtaataatgataacggaaatggcggcggtggcggaggagacggcggcggcgataactctgatgattcttctttcgatttgagatacctctgctttcttttattgggcttgtcttgcttcttccatttccgattatcagctgcgtccgccatagctaaagatcaaaattcggatagtaatggagatgctgtgaaagagacggtttgggaagtgagaggaagtaaaaggaagagactagttcccgattttgtcaaagatgagttcgtctctgaagaatctgcttttgaattatcatcttctctaactcctgagaatctcctagctcaatgtagaaaccttctcactcaattccttcttcctgaaggttttcccaatagtgtaacttctgattacctcgattactctctctggagaggtgttcaaggtattgctagtcaaatcagcggcgttcttgccactcaggtagacgactgagcttatcatctctcttaggcattttcacaaacacttggtgttcattatattgtgttggtagtctttgctttatgcagttgggttaggtaaaggagcaattcctacagctgcagctatcaattgggtgcttaaagatggaattgggtatcttagtaagataatgttgtcgaaatacggacgacatttcgatgttcatcccaaaggatggaggctatttgctgatcttcttgaaaacgctgcttttggtatggagatgcttacgccagtcttccctcagtttttcgttatgatcggtgctgctgctggtgctggtcgatctgctgctgcattgattcaggttctgttcttgtctctgaaagctctatttgcatagctctaagtgcagcatttgttatagtttagtattttctattgaacttatcatttacttgtctgcaggctgctactagaagttgcttcaatgctggctttgcttctcaaaggaactttgctgaggtctacaataatttttatatggccttagtcttgatcacttatcaacagctatttgtttttctcaactattctgggtctctagtgtatgcatcaacaacttcttttgtaggtaattgccaagggtgaagctcaaggaatggtgagcaagtcagtgggtattctgctaggaatagtggttgccaattgcataggaacctctacaagtcttgcccttgctgcatttggagttgtgactacaatccatatgtataccaatctcaaatcttaccagtgtatccagctccggactctaaacccataccgtgcaagtaaatcccactcctgcagacgtccaattcattcaaatcgtcttacaagacgaaaataacatctctgtttattttgcaggtttggtttttagtgaatatctaatcagcggccaagctcctctaatcaaggaggtcaacgatgaagaaccgctcttcccaacagttcggttttcaaacatgaaatctccagaaaaggtaaaagtgttcattcaccttattatacactctgagatctcttatcaactagtttaaaatctaaaaactttctcggatgaacaaaacaatacttgatgacctgattgattgattcttagtatctgctctattcagctgcaagattttgtcttatcatcagaagcaaaagcagcagccgcagacatagaggaacggcttcaactagggtcaaagctcagcgatgttatccacaacaaggaagaagcaatagcactgtttgatctatatcgcaatgaaggctacatccttacagaacacaaaggaagattctgcgtaagcaatgataaaccttctcataattattattacccagcggaatctctcaccattctatctcctcttgtaattgtcaggtgatgctcaaggaaagctcaactccacaagacatgctcaggtcattgtttcaagtgaactacctctactggctagagaagaatgctgggatcgaacccgcaagcacttactcagactgcaaacccggtggtcgccttcacatttctttagattatgtgcgacgagagtttgaacacgccaaagaagacagcgaatcagtaggttgggtcactgaaggactgatagctagacctctaccaaccagaatccgtctaggtcatgatcgtgaactattattatcttctccaaacagctcataaactcagagcaaaaccatggccaatggatgatgtattagatcccatttgacttttcggtataggttagatacattgttctctgttcatctgctattggaatgtagtgagctgtttagagatttacatgtctctcaagtcagaagatccctaaatatcatattccagcaaaacaatgttgcatagtatatatcatatatgtgaacattatctcattgtggcttgagattctaatctgctttttaaaattcattgcgactaacaaacatacctgacatttttcacatttgaccccacaacatttggaatgattaataatataacacaacttgcttatttatcagatcaaacctagacttctacactgatctttagcaggttaacacagttacagacacacatacataaggcaacagaaacaaaaaaaaaatggcgagttagtcttaagtgatagagagatttctgattctactgaacaaaagggtatcgagcaacgtagaattctcttacacgtgaagccccgtctctagcaagtataccttcaagatctccaataattctagccagccaaatctccaagtttctctgaacttctttcaagttgttcttgatcaaatccaatgacctccctgtgttcatcttggcttggcttaactgatctccttgattactcctggtgatttccgtctgcaatgaaactagcttctgccctgtctccgatgcccgttgctgaagtctgaaacactcgagcagaaactcgttttgtctttgcgtcctgaactcaggtcctaatgtagcatcgcacggatcactactctgctgaaaacataaattccatgaaaggtgtaaggagtaactcaagaatgtgttgtaacttgtaagcaaatcactcatagagactaaccattcttctacatagatcatcgatcttccctgaaagagcttgatacctcttagcctgttttttcaacaaagacggaactttcgatatgtcactaggacgacaaactttctcaagattcagtaattcctcttcaagcaacctcagtttcgcagatacacccgtcccttcactatcaatcttccatggtgattcccttctatgcaatcaaagacaagctattatacatcactcatcatcacaatcacaatcacacattctcaattcaaaaactctctattaccttggcacaaaatgcttcatacgatacacagattccaaagattcatattgtaaatcctacaaaaacagaagcaaaacttgaaaaaccaaacacacaaattcttcactctcataattaagaaaatcaaaatcaaaacctggaaaggattaaaattgccataagcattaggtgatggtgatgaagatagagtgagatgatccacagcataacgttcactggactcatctccttgtccatcatcatcatcttcttcctcaatctctcttcgagacataaacccaatcatttcatctctctcactcacttccctctccaattcactaatcctattcatgaaatcttctctttcttcttcaatttcatgaatccgattcaacaatcgtttctcttcttcttgccaagcgtttctatgactagcaaagatctcgaccacacgcgcgttagctttcgaatcttccacgcgccgagatttcatctgacggacttgttcctccgccgtcgcgagtcgccgttttagctcggtgacttgagatgttaatctcgggacaagagagattgcgtcgtttgggagatgagctaacattactgagaagcttaaaactagaaatgattttgctagtttcttcaattcatcatgctctttttcttcctcaacgaagcttctcattctcaatctctcttcttcttcttcaggtttcgccatttttcgtgaccgcagaaaaaaagatactaagaaaagacaaaattttattttttgttctcttgttttcaatctatcagcaaaaacggtaggacatttttttttggcgtattagcgaagttggatataaatcaatatctgatattgacaaaatgattaagaactagcagttgacaaaaaaaaaaaaagattaagaactagtagcatatgaagctactctttaattgtctgacttttgataataaaagatctaattactaacttggaatatttatttctttaatttcttaatattcttataatgttttatcaaaacaaaaattataaatcaaacatatgaacaataagcaaacaagtcagattcttacctcagtcagttttgacacaccatcaaaccatagtacacgttttgttgctaaatccttgagatctttgggagcctttttggtgtgaaacaagattatctcaaatgcgagactcgtgatatgtgagacgtcggtgtgaagacgagaatctgaggaaattaggagcattgggcttggattacgctccaatgcccttgaatgcatagccttccccaattcaatatcgggaaaacctttgcggtttgcattggatctcttcttggtcttcgtaggcggttgtgagatatgaacctcaacaccgaatcttcgaagcatatcgatgactcctccattaagtgcattggattggacgaagagatcgaaatccaagataccccaagacaagtaagatcccaaaaacctaataaattagagaaagtaccagatttataaactggagaaactttagaactaaaatagaaatattgacaaaaattaaggattgattaattatcgggactaggagatcggcacgcctaggaataggttgagaaactcttcgacgaggaggactcggcggtggctgcagcatagagatcctacgtgcgcgtttggatcaagaagtaaacatgtcccaagattctcccatgacaaaaaggttgtgagactgcggatttcttcagggatagaattgtttccaacaacccagatcacaaacccatattgttctcgagataggttttggaccattttaaagaagtccgaggttaggagcagaatggcagcaggagggtcattctgagagtctttgcatcatagtcaagtctgagaattcacgatcaaatcttagattagagctctgttcactgaaataagtatttaaacaaactaagcagagacgtttttcaattcataattgtgacaataatcagttatctgctaatcgttaaaacaaaacaaaggaaccaagctctatgattttattcttagaaagacttttacaagactcaactagatgacctattcaagtggatcttataacaaaagagactcttaatcaaacgtgcattgactactacaacttaggatgacttattcagaccaagcataagctaaacgacttagttatattcttcataatatgctttcttagtgatcaactgaaatacaactatgataattataacgtggtcttacctggatatttctttgggtattcttgtgattcagttatgttcacgtctgatcgatgaagacgtttaataaggggtttgttttctgtgaagaactttttccgggcataagcatacggaccggatgtagaacccacattgagccatagtttgtttcacattgtcaagaaccgttttcaacctcaattccttatggatgtgaacattttctacatcccacaattccttaagaaaaagagtcaaatttgatatactgatccgaaaacaattaacaaaatttttttttgtcataacattgtgatagactcatgattaaagttttatgtactttttcttgttttatgtacttcaataacattgtgatagactcatgattaaagtttggattgacatcaactaaaaaagatctgaagagtattcgtacaaaaaaataaaaagatagcaaaaattgaatgtcattgaagtcaacacttttggattttttgtcattgcatatatcaatattagagaaatgatgtgtcttggatgatttgaaaattgttcaacttaattataaataaactatttatggttttatatattctccagatataatactctaacaacattattataggctcatgattaaatatatagaattgatataaactggataaaattttaagagtattcatatgaaaataataaaaagaaagcaaaaattaaagtatcattaaagtcaatacttttaaatcttctatcattgcatataataatataatataaaaaaatgataatgtattacattatttggtaggtctaattatatttttcaattactattataatatatcacaattttattctaaaatatataatatataaattttgtaataaataaaatttaactcatattgtagtacggatgatgatatagctataagtttaacccatattgtagtacggataataacccatactatactactagatctaaaaacaaaattatcattatgagttgaacaatgtacgtataattcatcttgctataaattttctcaaccacgaaagaaacttcgtgaacatatttatcaaacatattcttacgaacgctctgaataaattaaatactattggtaggttgctatagctccaaaagaaaaagaaaagaatgataaataaataaaagtaacatagatactagtatgttgcttaaataaaaagaatcgtaagatctctctaatttcaacctctctatccttgtgtctatggattttcataaatatttaatacaaaccaatattaaatatgtttatgaagctccaaatcaatgccatggaggatgccgacagaagggtggatgaagtctaattatgacgcttcacataatttcggatatggacagcgcaagatatgattgtttttggatggattataccgactcaaatggagttgatgcagaagaggttaaatatagtgcattaatctttgggattttagtatgtgctacctatttgaaactatagtactacactttgaaaggaaacatagaaaaccctaaccttcaccattacattaaaacacacaggagctagtgattatcgagagtaacaaatgtgttgatctattggctaggatcaaagcgagatcaatatgtagaagaaatattattatccaacaatgtccaagttttcttttcttttttaatctcgttagtaaacaatgatgacaatgaggatacaaactgatgtcaaaatagatttatggaagcaggaccgtgtctactaatgttgtaggcactatacatgagtgccaaaatggccagtttgttaatagctacataagggttatgttttttgtgtaaccttaaattttattgtaaaatgaatatttacaatcttagcaacaaaaaaaaaaaagaagattactatagaggaaagacctaccaaaatgatcttatatatatatatatatatatatatatatttacattcgaggcaaccataaacaaagtaaaggtcttctagaataagccaaagcttaattaatattcttctatctttagaaatcatcatatgttttgttcaaaaaaaaaaaaaaaaaaaagaactcatcatatgtataacaagtttcaaatcggtctagttagcctgactaatttaattgtaattccacagtaaaattatagttttacacataataactactaaacacgattgattatacttattaaaaaatatagtaaaatctcttatcctactatattatttgggaagtacatttaaaatgtaaccttattttttgtaagtaattacataggtatgccattagaaataaaatttaaagagtaaattaattcaattttaaacataggtatgccattagaaataaaatttaaagagtaaattaattcaattctttaaaaattaaaaaatcaaatactaatttaattaattaaatttaactaaaaaacaaaatacattatcaatttccaaaaaagtaaccaattaaaatcaacaaattagatttgatatctaaattatcatattattttttttattaattattatagttcatctctcatctttatatgattctatttttgcgaaaaaataatatcatcgttataaaaaaataattagagttttttcgcatatgccataatttgaattttttaaaacgaatataaactgttcaatacatgaaaaaatattataacgggtcaaaaatagatttaagaaaattttctactgagtactgggtcataatttgaatatttatattcaatttcatatatattattttaaaaatttataatcttatatactacaataattaataacatattagatttttttatgtgtatgatgtgattcaattttcaatacaagctggaaaatcctagaattgacgggtttaaatcgatattaatacaagatggtatactagaggtgaaactctaaaattaacaatcaaaatacaagtgtataattttaaacactaaacaatataaataatatcaacaaaacatatacaactcgcagtttactatacatttaaaatcaaataaaataatatcatatatttataatcatctttacaataaaagtttttagtttaactaaaatataagtctacatgcggtatactgcaagttaaaattataaataagcagattaccatcactatgtctgtaccttctcacatacacacctatcaaaaacttaaaacctttcaaaacctcttggtatattcaaattaggattcttcattcatggaatcaagggttttgggatgtcttatgaaatgattttggcagaagaggatgtgaaattttttgaagaaaaagtagtcagcaaaacatatgtttttttgggagcttttagataattaaatcagagaatagggttgggcatatgagtaacccattcgagttcgggtagaactcgttcgggtttgggattaatgggtatatgatttactacccaatagaataattctaaatattcggttctggttagggtcggatccagttgggtttgggtcagtttggataaaaagtttcagaccctaaaaatacccaaaaaaaaatagaaacaggaaatttgtatgtagatagcgggtctccaaacaaaaaaaacttttaaattttttaagttttaataaatttaattatatttgaatatattttactaaattttgacaaacataacatataatttttgaatagtttagttgttttggatatttaggtccaaaattaattgacatatttagatttataattataatcctagataattagataatattacgattaaatataattaatattttggatattaaattaatgtttgggtttttgaatactctttttgggtaacgggtaatttctggaccagtcggatatccacgggtttactaaaactctacccaataaggaatttcctaaaattttaacccgccctaacccggttttttggttcggatattgggttggttatcggatccgttttttcgtcagctctatcaaagataatctaatataggccccaattaggtccacaaatataaccaaaatactatacaaagacgaattctaagttaggccaaaaattagatcatctaatacaaagaaaacatgtttcttaccaaaacaacttgtataaaatttttacacatttacttaaaactacatatgttgtatttattataaaaataatatttttaaacaaagtcaatccaatgcagcattatatgcaaatagtaaaaacattgaaaaatattatgatatcacttttatattatactattttttatgtaattcaaacaaaatatacaatttaatttatacaatattaatgcccgtactgtatgatctagttacatttatattttaaaatgctgtacatgaaattttagtacatataagaagtcgatgctttgtcaccaatcgaaacccagcaatggtttaatactctttttaagtttaattatattatagtaattagttcaatatcctcccatataaatcatgacttcatcttgatctaaacttgataataaaaatcttttgatatgtaggaaacatggtggctctgttttaaattgggataccagattgcaaatagctagcgaagctgcattaggattataatacttgcatactagatgcaaaccagcaatggtgcatagagatgtcaaaagtataaatatattattggatgaagagttcaaggccaaaatttcggattttggactctctagatcgtttcaagttggaggcgatcaacctcaagtttcaacagttgttgttggtactctaggataccttgatcccgagtaagcattttaatcattttgcatcatggtctaaatatgttacatttgtttcaagtggttagagaattgtagattaaatatgaatcacactccattttcttgcctttacagatattacttaacaagtgagttatccgagaagagtgatgtctacagtttcgggatcttgttactagagattatcacaaaccaacgagtgattgatcaaacccgtgaaaaccctaacatagcagaatgggttacatttgtgatcaagaaaggagatactagtcaaattgtggatcctaaacttcacggaaactatgacacccactctgtctggagagctcttgaagtagcaatgtcatgcgcaaatccttcttcagtcaaacgaccaaacatgtctcaagtaatcatcaatcttaaagagtgtcttgcatctgaaaacacgaggataagtaggaataatcaaaacatggactctggtcatagctcggatcagcttaatgtgactgtgacctttgatactgatgtgaagcctaaggcaagatagtatatacgtggatcttctctaatgtgacataaaccaaacctttcgatgtataactttatgttattagttaaccattgtgaaataattttgttttatttacttgtgttaaatatgaatattacccgttcgtaatatatatatgtgaaatgttataacgaaattttttgttctatgatgatttaatttcgttagtaacggtgaaaagaatttggcgctatattcctcaatccgtggcgcttatttgaaaatttcataaactttcacttacaggcatcacggggatcgacaatattaagcgtcgataaaattaaatcaacggctaataagtaatctcattgttcacccggatcgttatctgcaaccgttagatctaaaaacacatctgatggttcaaatcaattagatccatcttgtatataaatgacatctcctcttaacaaaattctcaaatcatctcaatctcaattaaatcttcaaatcgaaaaatttccgaagaaaaattcaagttcctttagaaaatgtcaggtcgtggaaagggaggcaaaggtttgggcaaaggtggagccaaacgtcataggaaggttctgagagacaacatccaaggaatcactaaaccggcgattcggagattggctcgtagaggtggtgttaaacgtattagtggtctgatctacgaagagacacgtggcgttctcaagatctttttggagaatgttatccgtgacgccgttacttacactgagcacgctcggaggaagacggtgactgctatggatgttgtttatgctcttaagagacaaggaagaactctctacggattcggcggctagggtttttgattgttgttttttgtgtttctacgtttattaggatgttaattttcaggatttggtgttaacttcgaaaaaattaaagaattgaaggttgttgttgcaatttcgtgattgttgaaggtgttgttgcaaacttttagtaatttcagtttctcgatgcttgtttagtatcctttgaacacgacgcaatatcaaaattagtgaatctcacaagtacaaatgtcttggtcagaaataataaccggatcggtttagatcgggttagtatcaaattgggtttgccgtgaaccccaaccaaattaaacccctatgtctttggtccatttgttggagaataatatgtattttaatacttgatcacaatagtgttacactaacaaaagacatggcctcaagaagacttggaagacacataaaaacgtagcacccaagaaacaaccaaaggaacaactatatgtataattgttgtgattctcacattctctctatctcttgttctgtttttggtttacttgttctagagagaaagaacaagaacacatttacttttaagactacattgttaatatcttggataatcttacacaacataaacacacacatacatatagtggtttttctccacttgctacactacacacacttagactctagaccacatcactgtcctaagacttacatcagccactctactatgttggaactcctaactccttaattcactcttacacaacatgactctatcttagactaacaagtaacaacacaacacttattcgttatgttggaccttaactagacaacaacaaaacacttattcgtatgggccttatctcatcacttatggcccaacacacaaaacacaaacccatttagtttgttaactttcttctcttcacgacgtctcttctccgacatcgtcttcttcttccgttgcttcttcctctgttcttcatcttcttcttcacaccaagcttttcttcttgtatgatttaatctaggattctcacttccaacaataatatcacaactttgaaaccaaacctggttttgtttaagctacgcattttccgttgaaccaactccagacttaaaagatagttccaaattccaatgagctaggtcaaacaaaagataaggttatttttaaagtatacaccaaattctccagagtacacattttatgtgcattgtgacaccacaatcagcatgtgtagaaccatcttcttctttttttttcaatttgtagaaccatcttcttgaattttgtttttcctcgcatatgtcgcaccataggcacaacatatctcttaatctctgctataccgttattggtaacagagcagaagtaaacttagaatagacataagtcacaatcagcacaccagtatcggtttcttaatttgattaataaaaaagaagaattcagatgtaatgtattatgcatagcattttatccatagttgttcctttggttgtttcttgtgtgcgacgttttttaccaacaggctccatataccatattttaattgaagcccaatcaggcccacgtttggtttagggttttagtttatatatatcatattttactgtataaaaagaaaactaaaatatgacagtaatataaaaaagttctgtctggttctagtaattacacctaatttgtactctatctgaataaatctccatatcttttttgttcacccatattttaaatttttttctgtttataattagtcgtagtatgtaaccattttgtccttgtttttagtcttcgtatccatctcggtgttggatagctacgagctaaagattatgcttacgatgcaaacaatcatggaatcccacacacatcaaataattcaggatagcaagaaatgggtaggaaattgtagctttagctaaattttgaagaaatctcaaataattaagtagttttcgcaataagggcacatatgttccatattatgaggcacaaatgacaactaggtatagtttctcataggcaatagtaatcaacttctacgttatgcccttcgtcagatttattgccaagatttgtgtggttgttttgggattcaaagtcacttaatgttatctgaaagtaaatatttttaagtaacttaatttatttatttttatgtcagtttgatctatataaactagtgatgtttagttgttaaaaaggtttcgtggtgtagttggttatcacgtcagtctaacacactgaaggtctccggttcgaacccgggcgaagccattatctttatattattactcttttttgtcattatcttttgtttacagtctctgtttttctaactgattaaggtgattagtgttgaagttacttgttaagttagtatagacaatgtgtttgatttactgatatatgttattgtattgatattgatcttacgagacaagaatgtgttaggctttgatcacgttttcaacaggaaatctgatcatttattttccaaatcatatattctctctcttttggggacaattttatttcttagcgcgcgataacctcatttcctgccattgatagtacattagtactagccattttccaagatatgttgaagtccttacccactagcatctcaaggcccttaagctcaaccatgaagcttttactctctccttcatcttcagaacccaccacatacatctgctccttggagcttacctcaatcgtcttggtctcattggagattgaacttccattaagaagtatttcagaaactttccatgttcctttaagtcccaaaacaatcactttctcaatcaccaaaccttggctcaacgcaaactgaccttctttcacttgcgaccatatcttcacactctcatttccaaccgatgcgtagaagtcaatgtacgttgacttcccgtttccaagtttcatctccggaagctcatcatcatcaagaaagagtttcccggaggcgtatccctctgatgctcccgccgggaaagcgacgactagactaaacggcgtcgttcttgcttctttagaaatctacccaccttgttgcatgggtagtatcgcgttctggtaaagatgcacgttcacaacgttaaacggagcggggagggtgaaaagcctcccgttctttgaaacaacgacctgagtcatgtcaaacatgtggtaccaagaacctggtgggaacagtgcttcaacttgggttttaccttgttcaagaaccggcgatatcattaagctgcttccgagcaagaactgtttgctcaaaccgtagcattcagtgaactcagggaaagagaagaagagcggtctagcgattggtgcaccactcatatgggcttcgtagttgagagtgtagagaaaaggaaggagtttgtatctcatcccaagagcgttacgagctgactctgctactgttccccattggtaaagctcttttcttggagcgtagtaatcagcgtgatctcttgaaaaggggtaaaacgcaccaacttcaatccaacggttgcagagttcttctggtgttggaggaaagaatccacatatatctgaaccaaccataggaactccaaaaattccaaaattcaacatcgttgagatagatacttgcaagctctgccatgttccttggttatctccagtccagtgagcagcatattgacctgaaccaacaaaagtggaccgtgacaatataaatggacgtttgccttggacagcaagcaaggccttgtgggtcgctatggcctcagagaacccgtagatgctgtgagcgtcgtactcacgaacaccattgtagtgataagcacttgtgggaatagtcttgaaccctagagaagctttgtgtccagtagcattgatcttgtaaggtggaatggtggatcatcccagcttgtattggttatattcttgcagtccaagcaacacgttacaccaggttctcccccactcggacactgttttccctccgggattatatgcacaatccagagcagaaattagagacctcattcatgtcgatccaaagaccatcaatgggtactaactcatggaaacgtcgaatttcatcgccccaccaagaaaccgttttcgggttaaggaaatcagggaagtaaactggaccaggccacacttgagccaagaaaggctttccttcatatttaatgaacacatcactagccatgcctctttggtatacaccgtaactcgcgttgacaccaataccaggatcttttatcacaacatacttcattcccatcttatggattctatccaagaaactcaatagcttagcatgaggaaaattcacaagatccaaagtgaagtccttgtaaccatccatgtaatcagcatcgttccaaatcacatcaagagggatcttagccttttggtaattatccaccacatctttaacaactgatacattacggtacccccatctacattggtgaaaccctagagcacaaattaggttaaagattagtaagaaaccacataagttacagttaaactaagacaagtgagatatattacctagagaccagtacggcattggcgctggccgtcctattaacgaagtgtattgatcaacgacattaagaggcgacggtccagcgaagaaatagaaatcaaaaacacctccaattaccttgtacgtcaaggaatcgcctctgtaaaacacatccataccatgactgttaagaagcagaacagagtgtgcataggctttaccactaacgtttctcaaatccatgtaaaccggatgcgacccgtaaagatcagtgttgagattaaacgccgagacgtcttcagtgaagagagtgtatggctcattaggaaccagtttgattccattggcttgagagttttcaccaaatccgtatagagacgcgtctttaggtaaagaagttgagatctcgaggtactggtccttgaacaccatctctccgaatgactcatcggagctactagtgttgaaaatcgtctcgccgttggatcttcttcttacggcgaagctgaaaggatctacggtgaagattaaaatcagctccggtccggatatttcttgtaccgtaaccggagattttcttgattttccgattacattcggtggttgttcccggcggaggagattgtacggaacttcccatcgttgtttctttgcgtctgtaatgtgaacgcgaaggcgatgatccgtctcgtgcctacaaaaaaaaaacggttaggaatggatggataatgtgggctgcgaagcagaggattaaaaactctgtagttgatgaagagtcgaaggatggttatatcagagccgtagattttgttactctgcttcacttggagatagccaatgaagctgccatcatcgggagacttctccatggagatcagacggtagcctttgccgatggcgttggaacactggagagatgagaagcagaggataatagcaacaagaagagaaagacaagaagccattgattttgtttagcaggttagtgattctacagtttacactaataagctatgatggagataagagtcctttacatttatcacaagatgttaaaattacctaatctaatgtttgattccacattaattactctattgagggtgcttgtaattgaatacagtacaaacttgttcctatcttttcttagtatgctaataattattcacatgccagtttccaagataactgtgacttcgaagttgacgttggttacataaaaattaagaaacaaccaacgtatatataagacattcaagatatgaagacaaaaacaaggaagcacaaattgacaaaaacattagggacgagtttgattccgttggcttgtgaagtctttatcaacttactttgtccaagcaaaagctccatcggaatgtcatcttttgcagctgcatccccatactttgcaatgattgcgtcctttctctgagaattcagtttttcctttgcaatcttaaccctcttataacacaactcagcttgagatggagccgcttgcatatgtatgtcctgtcctttgtcaaacgcttcacatgaatacatgttttgctgtttgaactctatagcttgaccactgtttctatattgattatctctcaaacaaaatttctcatttggatctgtatatgggagcggatcttcacgcatggatcgagatttaggatcataataagctgagttaacatcaaggttcaacaagtattttgcaggatcttctctgatacgcaaattccttacagttcctttgcttccaccatcagttgttcgaacacgttttttaacctttgcaaaatccacctgcatgctctcatcaatcttggcttcatcaacccttaagtcttcttcctctccatcaatgttcttctcctctagtttcgcaattagttgttgctcgttcaggtacttctctcgtgcattctcttttgcttcatgacgatctctcacatgacaataagacgaaggatcataaccattccatcggtcccttttgccatcatagtcaaattcaagactctcgattttctcatcaggtgcaatgtttttgtctgtgtattttgcaccaaccttacgaggtctttccatacatgttttcacatcatgcgtcattgcaccacagttttgacacgctcctttccgatacttttcggcttgataagtctttgcacctcggtcataatatgatgttgtggaaacgggtttagttttccaattcttttgatgcttcaagctcggtttttcagacttggcatataatggaggaattgtcaaatacttaggtatgtgaagattgatttcctttccaccctcgtctacctcagccggagcaagcccggctttacgagcttcctctaattccttttgcttcctatgatctttcctagacttaaaagcaactgaagccgtcgccattgttatcgttaaacttcgttactctctgcaggctacaactaaaaaagaaaagagttaggagaatgaagcttgttgagattttgtggtaaaccagggaccatctattcttctcctgtccttatgcggctgggatttggaaagctctagcgcagaacatattcaaagacaggttctccacaatctggtcagacataatcacctcaatcaatagctcatggcagaacagagaaataagtttccttgctcgatatgttttacacgtcactctgcacactatttggcgtgaacgaaacggacgacgacatggtgagaagccgatcccagcggatcatttaacaagctggatagataaacacattcgaaacaagatctcttctatccatatgagcggagacaggcgctatgagaactgcctccaaatttggtttcaagcaagaagctagaaggccgaagctctgtttctgaagtttgtctctgtttttcttgatcttcaattttgattttaatcatgtgttgcacatagttgtaaaaacgatttttctttgagtttttaatttaacattacaaattcaaaaaaaaaaaagagattttgtggcaagaaaaactaggaacccttaataaactctatcaataaattcgttctctcgtgagcttacatattattttaggaaagtttcttaaatggtaagaagaaaaattaaatgtacttgctaaattaactaaaccataattgtaaaatttccttattgcataagaatatcccttttcttctcacatgtcttcttcaattattggtttataatctccttattaatccaatagaatcttgtttgtgtaaaagtgctatttaccgttgaaacaacagtctccatctaaagagataattccaatgagtaggctcaaaacatatactcattaagcaaaacttaaaatgggagaagaataataagcagacgattctaatttcgttttgttatagatgagaccaaaagaatatattattttactttgccgcatgaaggtttcgtggtgtagttggttatcacgtcagtctaacacactaaaggtctccggttcgaacccgggcgaagccaaatgaattattatttttacatcttttctttacagtttctcttttttttcctttaaaacaaaaaatgtgtgaaggtgattttcagaagacatgaatgtttgttttgttttgatatatgcatcaattataaatcagtaattgatatagaatctagacaaatcctaatcttatattttgtatacccccggcaatgaaacaaaagaaaacgatagagagggactagtatgaagatatattcacatgttgtaatcaatgccgtggatatgacagagtcgttctcacatggatcgttcaatggttaccaatctatttaatatttattgaagatttcattagctcaaattaacaatttaacgaacaaacttttttgacatgatgaatgatttagtgataaatcacttgaaatgaggagaggctaatactctctacatctaattattatctgtgtagactttctacactactagtttgttagtggaaatgagttgtcatggactaaacaatagatcttttaaaaagggtaaaacgagaggtcgattttttagtgaacaaaatctgtgtttaggacagaaacgatgcgaaaacgtgtgtatttgttaggttaaaaaaaaacaaatatgtgctgtttcgtttattaataagtttcacaaatacacaaataattcagaagagtagagaagagagcctctcttagagaggaggaccgacaggtaaaaggcaaaagagtcggtacaatgcaacgtcacccacccattagtcatagcatagactcatagttggtaaatatatccaatgactttatgtgatattaaatatgtcatttgaccaattaatgactatgagtcaaacgcgtaattagaaaggttacacacagtcacacactaataatgactaatgactctatgagtcaaacgcgtaattagaaaaggttacacactagcttcttagatattgagacgctgagttggcatcaactctcttcaatcttcatcatcattcatcatactatattatataatccattctttgtcctctcttctctttacatgtaaattcacatatctctctaatttgctcactagatattatttctttcctcttgaaaagtccaaaaatgagaagctttctctacctcatcgtagtcatcttcctcttctcttcatccgttaacgcttgtgatcgatgtctacaccgttctaaagcatcttatttctcctctgcttctgctctctcttgtaaacattcccatcttcttctaactacttccgtttaactactagtttgtttcttttttctcatgtcttgtttatgggtattttctagccggggcttgtgcctatggccctatggctacgagcttctttgccggccacattgcggccgctataccttccatttacaaagatggtgctggctgtggagcttgctttcaagtcagatgcaagaaccccaagttgtgtaacagtaaaggaaccattgtgatggtcacagacttgaacacgagcaaccaaactgatcttgtccttagtagtagagcttttagggctatggctaagcctgttgttggtgttgacaaataccttctcaaacaaggcatcgtcgacgttgaataccaaaggttcgatgcttgaaacacttgacttattggtttttttatagtcacttgatgtactaataagaaggtttgggaaatgaaaaacagagttccttgcaattacggtaaaaggaatttgaacgtgagagtggaagaagcaagcaaaaagccaaattacttggcgataaagctattgtaccaaggaggtcaaaccgaagtggtaggtatcgacattgctccagtaggttcgtcacaatggagttacatgagtagaagccacggagccgtttgggcgaccgataaagtaccaacgggagctctacagttcaagttcacggtgacaggcggctacgatggcaaaacggtttggtcaaagagggttcttccggcgaattggaactctgggaggatttatgatgccggcgttcagatcaccgacattgctcaagaaggttgtgatacatgcggtcacatatggaactgactcattacaattctccttatttaggcaaacaacaaacaaacaccctttataggatatatacatgtatgtgtaacagagttcattatttaatgagttgaagaattcacaacaggagtggcttatataatctggattaaacaaaagaactagagagtaaaggtcatgctaaaagctagagtccatgtcaccaaaaaaaacaagaaaaacaaaaaatgtcacttatcattgcaagcaagaatccgacaagaaaaaaaaaacatatcttagagatgtctaacaattggaaaacaataatgtatggaaaggtttaagataggtcaaagaagaaactgttgtgtctttatataaattagtaaggaaacatagtcaaaaaggtttcgtggtgtagttggttatcacgtcagtctaacacactgaaggtctccggttcgaacccgggcgaagccatttattaattttgatttttttttgataaatttccggttcaaatatgcgttgaacgtagagatttgattgaatctgaaatctaaaaatcgcaggcttaagttagtacttgaatcattgttatattcgcagttatcttgagattttcgtactgtacatttcaatattttatccatcttgatacatttacatatgttgtgatttataattagctagaaaatcccctcacaaataactatttaactaaatggaaatcaatcaaagataatgtctcattctcatctataaagtcttaagcatctcttcagtgaaatttctaaagttaaagctggtgatatatacatctatcctataggtttcaagttttttagtatgtcaagcaatgcaaccgctgcaatataagtgcaactattttgaaaataaaacatttctaatgtcatttgaagtggcttgaatgaacccaactacacgatggactcacttaaacaatactcacctcactggactcctttaaagcccgcaccactaaaaaaaatatactcttcttgttactagacattagcctataccaaatcccattagccttaattttcgatatgcatcattaataaaagtcagtggttgataaagaaatcttacacacaaaaaaaacttatatattgtatatcccgacaatgaaaaaaaagagatatagaggggagtattatgaagatatcttcacatgtagtaatcaatgccgtatgagtcgttctcacatggatgttttaaggtaccaatctttgaatattttgaagatttcaataactcaaaatcaacaaaatctaacatacaaacttttgacatgtccgaattaatactaacacatgtatcgatagagtttagtgataaatcacttagccctaatgctctacatctaattattaaatgtgtagactttcatttttataagctggtttgttagtggaaatgagttgttatgaactaaatcctagctaatccctagggaaaaaaaacttgggtagatttttcattttaattaacgaacgatacaaagacgtgtgtagagtctatagacgaagtgatgaaaagggtttaggcaaaaagagaaagatagaaagaaagtgaaattggttttggaatttgttcttatctttcccctacttcccaaagcaatcccgtttttcaggtttgtctctattattaaaattcattcttaacttgatatggtaagacgtgtttatagatacacttactgattttataataaaaatgcaaggatttttgaaatctgttaaaatcaaatctttatcaaaatgtaataaaatcaataaacgaggaataccatatttcaaaagtattaagcgaataaaaacacgattttatttttaaaaactttggtatcaacgttatgataacacatgattatgtttagatttttaaatcaattaaaatccgataactctcactaatatttttcttttatatgttttagttggcacaaattaaaaaaaaaatctatcccaaattttttaaatatatgtattattattggttaggttttaaaaaagaacaaatatgggttatttcgtttattaattagtttcgacactctaacaaatgttttgtcccttacctaaagagaagaccgtcatgaacaaagcaaagaaaagagtcggtgtaacgccacatcatcccatgactcatattggtaaaactatcttctctctttcacacttcttctttttactttggactaatgatttaatcaaagatgtcattttaacatatatgtataaaacgcgtaattgggaagatacacacacacacataccagctatgacgtgacagtgtgtgttagatattgagatgatgagctggcatcaacctctctatagtctctatataatccattctttgtcctctcttctctttacatgtaaattcacatatctctctctcttatttgatcataaagatattattgcttcttcaagtaaacaaaaaatgggaagctttctcttcctcatcgtagtcatcttcctcttctcttcatccgttaacgcttgtgatcgatgtcttcaccgttctaaagcagcttatttctcctctgcctctgctctctcttgtaaacattttaactacttcttttttaactatctgtatgtttcttttctcatgtcttgtttatgtgttttttgcagctggagcttgtgcttatggctctatggctacgagtttcttcgccggacatatcgctgcagctatcccttctatctacaaagacggtgctggctgtggagcttgctttcaagtcagatgcaagaaccctaagctgtgtagcactaaaggaaccattgtgatgatcacagacttaaacaagagtaaccaaaccgatcttgtccttagtagcagagcttttagagctatggctaaacctattgttggtgctgacaaagaccttctcaaacaaggcattgtcgacatcgaataccaaaggttcgattctcaaaacacctaaactctttggttttcttaatcacacgatattaacttggtcatcaaaaaaaaaaacagagttccttgcgattacggcaacaagaacatgaacgtgagagtagaagaagcaagcaagaaaccaaactacttagagataaagcttttataccaaggaggtcaaacagaagtagtatccatcgacattgctcaagtcggttcatcgccaaattggggttacatgacaagaagccacggagctgtttgggtaactgacaaagtacccaccggagctatccagttcaggttcgtagtaaccggtggatacgacggtaaaatgatttggtcacagagtgttcttccatccaattgggaagctgggaaaatttacgacgccggtgttcaaatcactgacattgctcaagaaggttgtgatccttgcgatgctcacatctggaactaagttatttagtggcacacaaacaaacatctttcataggtttatatataatgtgtgacagaggttattaatgaacatagttaaagaatgcttaatctaatgattctcatgattctacattgattaaacaagagaacaacattgagccattaacaaccagaacttttgattcgaagacagattcataagattactttacaacggagaatgataattaaagcttaataaaacgaaagagaaatcctaacacaagttatgacaacatcagaatcaaattcagagtatacaaaccctaatttactaattcaagagcttgtgaatttggtaacagccttggttccttcagaaacagcgtgtttagcgagctcaccaggaagaacgagtctaacagcagtctgaatctcccgagaagtaatcgtcggcttcttgttatacctagcgagctttgaagattccgatgccaatttctcgaagatgtcgttgatgaaactgttcataatacccatagccttgcttgaaataccaatatctggatgaacttgtttcagaaccttgaagatgtagatcttgtaagtttccacactcttcttcttcatcttcttcttcttatcgccgccggccccggcttccttcgggagtttcttgccggcttttggtttcttctccgccggagctttctcggcttttgatttctcctctactggtttctcggcggctggtttcttctccgcgggcttcttctctgctctcggcgccattgttttgacttttgttttacttttctgggtgaagaagaagaagcacagatctgagtgattttgatatctaatttgatgaagacgagttttgattttatagtagttagaataattgatatgattggttattagatgttgacgaggatcgatgagatgggagatcgcaaccgttgaaattgtttttaatcgacggtttataaacttatgaagcgggatcgatgacgtgtcaatattggtttatgttttagcgcggtgttaaaatctccgttcccgctccactgtattgtaaatgggcttttattgggcttaaaattttaatatcagcctgatccaaagcagatctgattaatgtggtctatacaattatgaaaaaactaactaaacatatctgtgaagaaacagagtatagaatatatatactagtaggcttgcactaacagtttaacacaatatattttgctgtaaaactgaacctgattacaacttacaagctgatttaaaatgaatttgttgactaataatatgagacagctaaaatataaagaatttgttgtatttgcataaacaagaagtaaaaaaattgtgcttggctatattgagcaatatgtgttaatactccagtttatggttcaaattatcttcagtggagagtagtaaaatctagaaactagctacattaggctactatatatgcatgatgtatgactattgactagaacatatatatttaatcatgggaacaatatataatccacaacattgtatatcaataatttagttttttggtgtgttttagcatggcattaaaagttaatccaaatctttttttcaggtattttaaatggaatgtttttcacataaatgaaaaactctatctaccttttcacataagtgaaaactgaaaacacaatcaacagccgcaaaacatcgaaaggaaaaaatcttataaacaaccatagcatgaccatcacacccaaaaaatttaacataaacatatctatatcgattcaaatatctttagtttgaaaaaatgcgaattggaaaaagaaaaatcaaaccttgttaattgcaaacacaatcatagtaactgcaaacgagactcttcgctaagccctaaattcaaattttcatctccatatccattttctacattgatgctagctagatacgcttttacgggcagtaaagaaagatcattgtaataatcagagctacaaaggctatcataactgatagacataaataaatccccataatccaaacatggtggtcaccaagaacacaaaagataagaaaccaaataacataaccatctcttgacaaaccttagagtatgaaccaaacataaaggcagatataaagccgccatgacataaatacatgccaacatgcatgctaaattacccatcataacaagaaacattaaaaacaattgttcatgaaaaatttccgcaaatttctgaaaatgagtttcttcggtatgagtttggaagtacatcccgatagcttcatcgttttaagagggtagattaggaggttttggagatgaatgaataagatgtttgtcgagaaatcagaaatcgggaaagtgatgtagtgttaccttatatcggacttttaaatgatttaataactttgttgtttgtcttttgagatgatataatcttaatgagattagcttctaataaatcttatcatctacgatgatgtataactataacatgagtggtttgcttcattttaatttagttttggtattgattattaatgctgtgactttttctcattttatctggtattcgatcatcaaattaacaaatatgaaatagaaatcaaacttagttaattgcaagtatatatatcactaattataaatcctgcccgaaactaaaacgatcgacctctagttacatcaacaccataatccaaatctccatcaaacccctgcttcttcttcttcatctaagcttgatgtgtttttactctctagcaagattgttggatagttctaagttatttgaggagaaagtaatctctttctagaagatgctagaagagatagaaaatagaaaaatacaaataatgtcaagttagttaagatttataagtttttctttttataatagaatttgctaaatttatataaataagaggctatggaaagttgttctctaagacctaagagattagaataagaggtttaggagagtttttccataagacctaaagagagagagagagagagagagagagagatttagttttgagtagtttctaaatcaataaagaaaatgtgttctttaatctatttttgctctagtttagtcgaacatgtggctgaattactttctgaatcatttagcgactaagtcaggataaggcgatcttgatttgaaagacttaaaagagggatcataaccaaaacacaaacaaatcccaagaagaacccgtacatgttcatcacaaagaagaccaaagtcaagaaaccataaaacatttacatctcttcgcagataatgtgtggtgaactattagctctcatgactctgtagtaataaatatagatgatgtaagacatgaaatacgtgtaggagccatcacagtagctaatgcttccattatataacggaatcttagatcagatatctcaacggtattgttgacgcacactaacatttagttctcatagattaaaacatatcaagacatacaataataccaaatactgtagaataaattaaatttaaggtgttaaaagttttcataatagtcaaaggaaacatattactcgagaaaacaagtttattcaagtctcttgcaagggttttatttcttagttgatgcggcgtctgatagcatcaagacttatatcggttagatcagttgcgtgaaactccacttgaattccatctagttctctcttgaacctatccttagtgctcgagtaaatcatcttctttctcatcttggcagtggatggagaccttatagcacaaaaacaaacacattgatgataataaaagcaacaaatcacggaaatgagttaacaaaaagaatagagtaaattattttaccacgcgatgaagcaaatctttctctcccctgggacgaattcgatatccaaaatggcatatcggcattcatcagctggaagactgtttgcaaactcctcatatgattgttcacgttcgccatgcactacaaaaaagggccattttatatcatttattttgaatatttgtattacttataattgatgtaaaagaattttacatcacttaaataaatgacttatatattgttgatgcaaataattgacatcagttaattaatgaccgatgttaagatataaaatatttacatcaattattctaactgatatgaatatgtgtcaattgaaaaaaaatgatgttaaattttacatctatttatttaagtgatgttagtattagtgtcaattaagagaattgatttcaattatttacatcacttaatagtaattgatgttaatatttgtgttaaatatttttcaataaacgatggttaaaagaaactacaaaatttataacagaattattatcttaaatattttcgttttgtttttaaataattttatatagcaaaatcgttttcaatatctactaaatcttttctattttttttacaaataattataccagaacgtcaattacaaaagacaaaaacatgaatttaacgcagttaataaattcattagagattttacacatacaaaaaaaaaacaaaaaaaaagtgatatgaacttaattaattcaagatctaggtatgatttcttcaagaacacacatcttgtttcttgtccaagctttttcctttccattgttttggtgacattgtttcttcactgtggagattttctgagtatgaaaaccaataaatagaaaatcagagtcatgggtgagaaaatgaaaaatacaaaataataaaaataagaacagaaaaacaattcttcgtcgtcttggaaaggtttagaagatgaacatataaggatcaacatgattttgtgttggagaagtacatgtataactcatattcatcggagttgtatgattgacatccttttaagaattctgtgaaaattgatgtttctggagaatttttaaggaagagttttatggaacttctgattttatatacaataattttgggaatactacaagttttatttgagtagatacagagagatcgtgggttggttggggtagtggaaatgaattttcgatttttaacaaaacagttttttatacataatcgaaaaacaattaaaaatgagaatttagagaataagaaaagaaaaaacagatttttagcaatttaaaatatagaacacaatcttgattccaaaacaatctatatatacatttttgcagccattttagcaaataaatcatgtacttggacttatttacgatctaatgtcattagcattaaaaaaatttccaaaataattaattttactttaaatttttgatttaaatagtcaatcacattatcaatcaaatttaatcccaacaaacttcaaatcaatcccttaaaattagcatagacatttgttaacaatattttaaaacaaatttttttgttaaataaatattattcttactaaacgttttttgtttaaataaataaattttgtatttgaacttatttacaatatcatgtcactaacattaattatttattaaagaaaatatttaattaaagatttaaatcttctaaatccttgcttttagagttattatgtcattaccttataaacaaaaatattaattttttaaatattattatttatatatttaaaatctataaaacattattaatatttaaacttataaaaagtttgatatatcacaattttttaacatcattatataatatatagagtttaaaaaaatcttaattttttccgtcatattttatgattcaaaattttaaaaatgaacatatattaaccaattggcaaacaatgtgtgggttcaatgtctcgcatcgacaaaaatatttagacaatgatttataaacatatcataaataagatcaacattaatataaataaatgatttttttacgggacgagtttggcaggacgttacttaataacaattgtaagctataaaataaaaatatattataaatagattcaatttgcaaaaaaaaaaatatactaacttaaaaaagataaattgtccccgcggtttaccgtgggttaaaatctaatatatctacgtttgtgaatataataaacaaacaaacaaaaaaattatggatgagatttgtgatatattgtttttttttaacgtatattgttttaaaacaaaaatatttgtgcaactttcaaaacatgctattttaaaatacaacagttttaaaaacaattcacatagattaagataaaatttggaaaaaagattaagatcagttaagattgagtgacataaaatggactacgtgtttttttattttgattatatgtaagttaattagcattattttattattgatactaattttgtatcatttatttaattgatattttaatttgtatcgttttgtaagtgatgctaataataaattaataaatacaacgattatctattgatgtaaatatataggtttgtatcaacatcttaaaatgatccaaatcaaaatcaatatatatttctatcaatttatcaaattgatgctaaactatttaattaaaacatcagctattataactgattctaaatcatcaatatttgtctcatttatacataagtgatttaaaataatatcacttaattttatgatacaatttaagttcttagcatcactttctattgatctatattttgtatcatttttaaaaatgatgttaataaaaataagggaatacatcggttatcttaattgatgtaaatacatatttttgtatctattttctgaagtgatgcaaactaatacaaatttgtatcaatttgattaaactgacactaaacaaactaattaacaaatcacttattagaattgatgttgaattattaaactttttttgtagtgatgtttctctacaatcacttgcatgttgtcctcaatcttgtagactatggaacggaatgttcgtctctccttcagttccaagaatgttagcttgcagtcatcatgcaaaaccatttccggtgctacgtaagcctgttattgtatcgatacacacaacatcacatttttttggagaaaaagctcaaaacagaattggatatttaattttatcatctctatagaattgttaacatcacatgtatgagaagctaataaacgtagcttccacgacattttataaagatcatctatattacaacaatttagacttcattaggaaacgaccaagtaccacataaatcgaccaatggatcgattgccattgaccaaaacattcaacgatcaaacacatgaaatacatctctagatctaacgagacaaaagcgtaatcaaaagggatatagtcccaaacaaaaccaagtaagggaaaaaagcaagctaacttaaaactgagaccgagaaaatagtttcagctataacttaaaactgaatatagctgaatcaaaccgatattggcgcataaattttctggtgaaatgaagaagacgaaaaaacgatggagtatgaatatgactttgtttttcttatccgtttcttcttttttaaaagttatttatagggtatcccaataatttttgtatggaaatttgtttcatttgtttatttgtttctttatatttggttattatcattaatatatggataagaataatcaattataataaagtattttttttttgattaaataaaagtttaagaaaatatttatctcagattatttcccacttttctcatttactcatgttaaaaaaaatataagatattgtcctacaaagaatgaaaatgtcattagttaagtgataaattcatggataagagcatctctatttgtgggttctctatgagataccctcattaaagataaatcaaagataaaaagaaattaacttttaaatcaaaatagcttagaaaagtttctcatttgagaaactttgggaaaccctctagagacattttctctcatacacttgtcactctaagattgattaacaaattattctaaaaattaattactctatgatttataatatcaactaaatagtttataggttactattttttttacaattattaaaataaaataatatatatatatatatatatcaagctccattataaaaatgttaaaataaatattaatattattttgattgatattaattgaggttaatatacatataaattgctatttttggttgatacaatactataatattagagtaaagatgagattttattaacttaaagaaatatttttgttaacatttagtattttgataaataatgtgttatttattgtcattatttacaaaatatctattttaattaaaatatatttgataaaataatgtgtaattttagtcatatttttttaacaaaatatcaaatataattaaaatataactaagatgtaaaattatatattaactttttgagtatctcactaatgaaggtaaaattttatgatgagtttatctgaatcaaaacaataaaaaatagtattatagggatgagataacctatgaagatgctcaagtttagagaatgtgtttataaccaaggattttaaatgatgtttatttttttattttttttttgggtatcagtatatgttaagtgtgaatcaaaatctccattacagctaccactatattctaaatggacttttattaggctcgtctgtttttaaactcgaccgatccgagcggattagatgtggcacatttgtaagagtgttgtacggaatagaatgatattaatttgatgtttttaaatagaatgatattaatctatttgatgattagatatccatactatatgttttgagtcttaaatcatgcatctcctttagatagcctaatgttctagattaatatcattctatttctacgattcagagaagcaacactaaactcaagtggcaccaaagataacacaaggaggaaaatatgaaaatgaaaaattgaagaacaaagaagaaaaagaagaagatatataaaaataaagcactgaaaaaaaaaccctaatcgcgatcattagctaagagtgtagagacatcttagctgttgattagttttattatcaaaggtctatacaaaatacatatccacatcagaatgtataagtgcaggatcaatgacgtgtcgctggtgttgaccttacttgacccggtccagctaagaatattgagtaattgagattctgtctgatttgaccccgtttagcagtttagttgattctcctaatatttgtgtttggtttaagttagtgaattgaaccggattggctaatatatcaagctaaatttccgccattaatttagcgtcacatgttttatcaagctattttttttttttgggtatcagtatatgttaagtgtgaatcaaaatctccattacggccaccactatattctaaatgggcttttattaggttcgtttgcttttaaactcgaccgattcgagcagatcagatgtggtccatttgtaagagtgttgtacggaataatctatttgatgattagatatccatactatatgttttgagtcttaaatcatgcatctcgtttaggtagcctaagttctagattaatatcattctatttctacaattgagagaagcaacactaaactcaagtggcaccaaacataacccaaggaggaaacgatggaaatgaaaaattgaagaacatagaaaaaaaaaaaaagatctaaaaaaataaaacactgaaaaaagaaaccctaatcgcgatcattagctaagagtttagagacatcttagttgttgattagttttattatctacggtctataaaaagatacatatccacgtccgaatgtataagtgcaagatcaatgacgtgttattggtgttgaccttacttgacccggttcagttaagaatattgagtagttgggattctgtctgatttgatcccgtttaacagtttagctagttcccctaatatttgtgtttcgatttaagttagtgaattgaaccggattggctaatatatcaagctaaatttccgtcattaatttcgctgcaaacgttttatcaagctattttttgtttttttttacttaaatcaagctagactttattttgaatcaaaatctagaaaattaaaccacttgttcatttttttttttcttttttcttttgaatatattgagtggctcttgagttatgagcaacataggtttcaagctcgaccatttatttactattttagcattacatagagagtagagagggctctatacaatgaaaatcagtacatgttattgaaagtgagaactctaaacactctcacatggagtattcaaaatctaaaccatttaaggagatgcttgatataggactccaaacatatacgaataaattatcagatagataactgagacaaggcttgaagcctagcaacaatctgatttcaagtattgtacatgtaaaactaattgaaaaccatcacaaggcacacataacacatcaaagacatacaataataccaagtagaatgaagttgaaggtgttaaaaagttttcataacagtcagaggaaacatattcactccagaaaccaaacttattcaaatgcccttacagggttttgttttacttagttggtgcggcttttgaaaacatcaagacccatttctgttggatcagtagcttgaagttccacttgaattccatctagttctctcttgaacctatctttagagctcgcgtaaatcatcttgtctctcactttggcagtgtccggagacctttggcacaacaacaaacacacattgatgaccataatctaaacagatcaaaagacatgagtgacaatatcttgcttttaccatgcaatgaagaagatcttgctcttctggcagttctccgcagtgacaaagtcgaaatcgtaaatgcaatatcggcaatcatcagctggaagactagctgcaaagtcatcatatgattgttcaggttcaccgagtttctctacaatcacttgcttatcctcaatcttgtagactatggtacggaatgttcttttcgccttcagttccataaatttcagcttgcaatcatcatgcacagccattcccgatgccgcgtttgcctgttatcatatcaatacacataacaaaacactgagaagatgcacatctcttcaaaaacacattttctaaaacaaagatcacaacttaacacagaaattggataatattatcatcatctctaacattgttaacatcacaaggaagagaagctaagtagctcctcacaactttgtagaacgattttgacttcaattttgacacatcaagaggcaagaagcacaacatagatcgaacaattgacaaacactgatgaaaaagtcaaaaattcgtagaatttaacacttgatttgaacttgaagtgaaaaacagcagattcttcctgatttcagataagctagcgaagaagcagaacaacaaagttacgagttctttaatcggatctctaatccgatcacacactacaactaccaaagatcgagtatctgaaatcatctccagatctatctaaacgagcgagaatcgttatccaaaagagaagcaaacggatttgaactcgaaatcgactagcaagcaatcgaaattttcgagaagaaagcttcaaaatcgaaaaacttaaaacagaaacaagagaaaattgagctcaccatggctaaatcaaaccgatttcaaataaaagttcctggtgaaatgaagaagaagacggcaagaagatattttctccggtcggcaaaaatcaaatggagaaaatgaaaatgaccttcttttttttcttcttcactgtttctttttttgtcagcgttatttgcaagctatccgaattatatgaatgaaacgaatttcatttgtttatatgtttctatacattttggtttattataataatatatggataagactatttcccaaagttaaatttttatttctgttaatcatcataatataagaatttatttgattgcccaacctatattgaaaatgtcatggattaggtgatataacttggtggataagttcacaagtttagaaatagtgtaatcatgatctgtgtttattaaatgatatggtaccacttcatgttggggctatacaaatgtggtcaacacaagcaatttctttggaaacaaacataagaatgaatggtcaaaacgaccaatccaatcataatcagtggaccaaataaaaaaactgaagatcaatcttgtcctatagacagttgtttcatacaaatgtgagagaaacttttaatcatccatttcatcaatgatatacctaaaagggttcatcttcaatagacgatttggggtccttacacaccattttaaaaccaaagacaacatcgaacacaagaccgaaacaccgatagaatgaagttgtttataggttcataacttcacaacacaatgtaaaaacataatcaagtaccagtaccatcactcaaaaataacagaataagagaatagatctttcaaggggatgatgataataaactttggtttttactttttagttggcacggctcctgaaaacatcgagatccatctctgttggatcagttgcctgtagctctacttgaatcccatctagttccctcttgaacctgtccttggagctcgcgtagatcatcttgcttctcaccttagcaatatccggacaccttagcaaaacaacgaagttgcatcatataagtacgttgaaaacctttggaagataacaataaaacgagacacagatttaatggcagattatgtgactagctaccacgcgatgaagaagatcttgctcttctggcaattctcagcagttacaaagtcaaaatcgtaaatggcgtaacggcattcatcagctggaagacatgctgcaaactcctcgtaagtttggatcggttgaccaactttctcaacaacaacttgcttctgcttctcctcaatcttgtaaactatgaaacggtgtgtccttttagccttcagttccagaaatctcagcttgcaatcatcatgcacagccattccagatgccgcgttcgcctgttaaaccaaacaacactcatattcaaatcttttcacataacacaatccaaaaacctctattgttctcaaacctctagagtgattatcaattacatgaaactgatgaatcaaacatcaaggataatggatcaaacaaccaaatgttatcgaaattgatatataactttgaaattttttgcaataacaggaagccgtaaatactcttctgatttcaaattttagatagaggaatcgaaagagccacagtgaactcaacagagaagctctctcgcacagttttgattctaaatcagtcacaaaacgatcacataaacaccaaatcttagagatctaaaaccaaaatctgtatacagatctagcgaaacaacaaaatgagccagaatcgcgtaaacagaagatttgtatataagacgaaaccaaaatcgagagaagcacactacagatcgagataacaagtggaaaattgagcttaccatggctagagaaacactaatatcagagcaaattcgtggttaaacgagagaggagaagatatttcttcgggcggctacaatcgacggagaatacggtcacctttttttcttttttcttctcaatttcttttctctttctttcttcaactttattcgggagtccaccatattatagagacgaaaaaaaactattattatttggtatgtatttcaaattttcaataatattgttgaattatgaattc

SEQ ID NO: 1358 - DNA, 106730 bp, Arabidopsis thaliana
gaattcgttccctctgtagatgtttttatgtacatgtcaataagattcgtgaagctgttgatttatgtttttgcagtttttgaaattttgaagaatggtgagaatcagtgtgctcaatgatggtcttaagagtatgtacaatgcagagaagagaggaaagaggcaggttatgatcaggccttcttctaaagttatcatcaagttccttatcgtcatgcaaaagcacggtatgctagtaactttgcagagctagcgtttgattcctgtatacagttttcaagtgtaatgatgcttcttggtttttaggttacattggcgagtttgagtatgttgatgaccacaggtctggtaagattgttgttgagcttaatggaaggctgaacaagtgtggagttatcagtcctcgtttcgatgtcggtgttaaggagattgaaggatggactgctcgtctacttccttccagacaggttagtctagagactatatagtagtggtaccaatcaatgttttagctattgatctgctgccttactttgctgttcctattatggtttaattggatgtttagtgtcattactttgccttactttatctttcaatgttacaacttcattgaacacttctctatgtgcagtttggtttcattgttctgacgacctcagcgggaatcatggatcatgaagaagctaggagaaagaacgttggtggcaaagttcttgggttcttttactgaagcagggtctcgagatctatcttatcgggttatagtttggttctctgtaagtcgattgacctcactgtcaaagtagtagttttatatgttgtggtcactcggatacgtaaaaacttggagatgagtagactaattaatttcagtttttgaattcgttagacttgcgatttatgaaatcaaaatcatctttcttgacttatcgttatatgtggcatttactcattttagtctcgtgctcttcttgtttgttttcttaaaacattttaatatgtttttcatttacaatgttcatcaaaatacaaacaaatctctgagggaactgtgaaaattcgaaaaagattttagaaatactgacaaaataagttaaaattctaagaaacaaaatttaatagttttccttccaacaaggtttctatgctacataggtataattttaggtattcttcgttaataaatttgaaggaaataactaataacgcacaaaaaccctaaatcaaaaacctaagaagacgtttaccagaaacaaaaaaactaagaagacaatgacgacgaaagagaagaataaatcatcaaactcaccgcctccgacgtcgttttcttcgttaccggacgacatcgttctcaactgtttggctcgtgtctccagattccattatccaactctatccctagtctgcaagggtttccgatcactcctagactcccgtgagctccacgcaacacgatcttgcatcggaaaaaccgagagtttcctctacgtctgcttagacctgcataggaattgctatccagactgtcctccacgatggtttatagtttccccgattaccaaacagaaactgaaacctatcccttcggttacttgtcaatcctcaaccgttgtatcaatcggttcaaagatttacataatcggaggcttcgttgatggacatagtagcaggagattgatagtactcgattgtccatctcatggatggcgtagactccccgagatgcgtgtacctcgacaaaacgcagcagctgatgtaatcaacgataagatctacgtgattggaggctctagttccaacaatatcgaggattggggagaggtttatgacccaaagacccaaacttgggagccagtattgcccacaacactagatcttactgttcaaatgagtgtggttccaggtagcttggtaatgagtgggaaagtttatgacatgaatggattgaagcttaactttcagaagaatatttgcttggtggagatagagaacatgatgtgccaaacaaaggtttgtgaaggggtgttagtttggtgtgaaccagaggaagatcgtgggtggtgtccggttgatggacttgaaggacttcccaataggccaacttctcctggttatcttacctcggtggcacattccgaccgaggaagaagagtaacagtttggtgggagtcggctgtgttacatcgtctaggtcccaaatggactaaggaatgtaaaacagagatttggtgtgcagagatttcgtttgagagacgcggtgttggaaaggtttgtggatttgttgaatggtctaagaatgtctttactaaggatgactacaaaacttataagttacctgcttctctttctgatttcttcttgaattctaccattgtgacatattgatcaatggaagtttatgttaatttttgagagagttttaaattcttttgtggggattttgtttagaacatcttgagtatagattttatgataatgaacgaaaatactggtggtgtttatgtatctctaataaatatgcagttgcgtaagaacataaacatcaacacacttcttatgaaagagttatatattgttgaaaagtatagttgtatagtagtagtatatatttccaaagatgacttcagattacattagtatacagtagtagtatttgataccaaatataaaaataaaaattactatagcattgttttagtccagctaattgattttaaagtaattaataaaaggcccataaggcttcgtgccttcttctttctatataggcccttcaaaaaagaatccttctctctttttctgcgcactccttcgtttccaactaacgtgcgcagtgtatcctatcgtgcacgcgaagcagacgaagaagaagtaaaatagaagaagccgggaaacaaaagctaaatcgggaactggcgcattttagtcgtccgccataaccttcgctctctgattcttccgattacatcggttttcttctctctccggtacatgatcttcttctttcccgcagccgattcattcgatttctccctcttttgtttgatctaattcgatttcgatgaaactcagattttgatctttgagtttttgtttcctttagattcaatggctgctccacctgctagagccagagctgattacgattatctcattaagcttcttttgattggagatagcggtacgttgatctgaaacctctccgatgtttttatcgtcgatccgttgaaatttgttgaatctgtttgatttccattgaatcgatctattccactgtgatttttgtttgtgattagatcgttgtgtggatcggtgtttgtattgagagatctctgtaacctaaggttttttttttttgttgcaggtgttggtaaaagttgtcttcttctacgtttctctgatggatctttcaccactagcttcattaccaccattgggtttgtgttttctctttgcttatggagataaattgaattctgtgatgtttgttttggattctgtttttacagagtcttgtttctctattttgctttgatgtagcattgactttaagataagaacgattgagcttgacggtaaacgtatcaagcttcagatttgggataccgctggtcaagagcggtttcggactatcaccactggtgagttcatctttttcataagaattgcttgctggattagtacttagagcattcacaacatcagtaatgaatcagattagatagattctcgaggagatgaacacttacatgtgctatgatctcttgtacaatgccacttgactgatttattttgtttggctgattactttacttggtcttgtatagttgatgtttatgggctattttcgacacttcatagttcatcttttcgtataaatgtactcactgatcactttgcttagcattcaccatcacaatagaagtcaagttagaaagattgtcaagatgagattgatgacaaacgcctataagtagtctaagatagccacttatagttctaggtaaaggggatgcatttgtgcaatgccaatttactgatttgctctttttggctggttacttttgtaggtactgtctagttgatattattaggatatttaggcagtttatactgatctgtttctgttgtttcaacaccattttgacgattctttttctctcgcattttcgcagcttattaccgtggggcaatgggcattttgctggtgtatgatgtcacagacgagtcatccttcaacagtaaaactcccaccatcaagtctttcacttactggtttctataaatctccttaaccaaaatgaacatctcttttactaacacgattcttgacgttattgcagacattaggaactggattcgtaatatcgaacagcatgcttcggataatgttaacaagatcttggtagggaacaaggctgacatggatgaaagcaagagggtatgaagcacaccacctttatccctgttccttattcacgactgatcctaataataatagcttcttggtcctgtcaaaattttcaggcagtacctacagcaaagggtcaggctcttgctgatgagtacggaattaagttcttcgaaacagtaagtctaacaatgctctcaatcttcgaaactagatgggtagtgtttacattgcttacacatctagctatatatgtgttgttgttgcagagtgccaagacaaacctaaacgtggaagaagttttcttctcaatagggagggacattaagcagaggctttcagacaccgactcgagggcagaggtttgttacatctctctctttcacatctttgcgttgttaggtctgaaaacgcattgatcattcatgttacgtggtcaattgcagcctgcaacgatcaagataagccaaacggaccaagcagctggagcagggcaggccacacagaaatctgcatgctgtggaacttaaaaaagttttaaaagtgaagtttaagtcgaaaaaagtttgggggtgaagtgaaaaactaagatatcgttgggtgcttatgtaattttttgttttatgccaacaattctgattcgttcttctaaattgtccttcctatttgtacgaaggtttaatcgaaacttgtatttttcttttctattactgattttttatgacggtgactgaattgtttatgttggtcatcacttctctctatatatcctctgttcttaatttttctcttgcttcctcttttatcaagtctttaaacattacttctaatactcgtaaactcatctttgacacaaccataagcaatacaaaaccataatatgtacactgcctgatttatgagtcgtaaacgtataattgtgttagcaatccagtgatgaagaaacttatcatgttttagttgcactacagttactatagctgacacttatattgtagtttcaacaccagttaaaccattctcatagttcaacaacattctagggttaataaaacgtgaaaccaaaatttagcgaacaagaaaataaatcttgaatagtatatcagattgtattcagatcatgtattcacatcgaatagtaagataaatggatcaacaaagactaaaaccatgtaaaaagtactactctatgtaagattatcaataaaactaaaaccctaacgaacatgaaaaatcagtacatcgttcttcccaactccaattccgtgttgacaaagctctccaccgaagttaagtcgaaatccaaacacgccactctcttcccactactcgatttcttcaaagtcgtcaccgttgtcgtctccggcatgaaagaatgcgtaaccaatacgttagaagccttttctcgttctttctcgttcctatgtttcctcatgtgaccaccaagagcttgtcccatcggaaactccaagccacaaatcggacaagtatgagccgtcgtcgtagtcgtagttttaggcttcttctttggtgatccaggaagtgatttatcgtcactgttggttagtttcgagtggcttgcacggtggcctcctaaagcttggaacgaatcgaagtctctctcacaagtcttgcatcggaaaacacgtttctttcttccgtcgtgttctccaattcctgataacaacatcagacagctcgccgccgtatccaccgtcagatcacgattatcactttcagcaaccatgattttagtttcgaatcgagcgagtgactttctagggttttgttttatgcttgtgtgtgttgactcactcctcttatatataggagactggattgagtaaagacggttttaattgacgaaaataccctctcaagacttgctgcctaagttagtaaaaattgaagctgcggtgtaaagatgtacatgtagaaaatcagagtcaccgctttaacactaaaaactcggaaaaatggaaatattcatttgtgaaagaatatattcttattgctttcctccactaattagacaaatattgaaagacgtactataaccagttttaattatttttataaaaaaaacaagttttaattaatatataaatatgtatattatatataaaaaatattgtaattatcttaataaatattttattctaacgcggtctcttcgggttcgtgttccttcttaagccgccttttactatttgagattgggcaaatctacttggtacgtaacttatccgtattcatttatcaccaagaaaaagaaaaaaacttattcatagtcgacatacttctagaactttttgttggttcgatagtcaatatttatgttcagtttatttgtgaaactcatgtcctagtaattacacttacacgcatattattcatttgtatatacttcggaatcttctgacctacgtctttttattcgcaatgatcaatagaactcaagacttgagaagatcatcgtgtcattatctaactaagattttgtcacagtaacgtacgtaaatgagggacaagtagaggtgtgtggctctcgcacgagtcaccgagaagggaacgaataaaaagtgtgaaaatagtggttgtacggaaactagagggaaactattagaagcaaagcagaagaaaaaaagaaaatgagagagtggtttgatgcgacatttttgatacacttccacgcggtttcttcttaccacaaatctcttcacatgtttttattcacaaattaggtttatctctcatattcatctcccactaaataagcaaatagagacaaggatgttatatctgtaagcatttagctaatatctaatataagaatacatataaaattaaaattaatagaaacattttattgttgaagtttactacacacagacttctctaagcatcttacctatttattttatgtgctagtttgactgtttaaattaattttaacttcattatttatattcgacacattattcaaatctcaatgcaatgattcaatctctagtttgacgattaaaaatttgaatagttgataattcttttaatattagtctataatctaaagataacgggtgccaaaaaaaaaaactgaaaacaagaaaaactttgagaacatttaggaatcataactacttattagaacgatccaaacttgaagattaactaatttgaacctttttttaacaatttcttcccttggatgtgcgattcttgtaagagagagtggagagaggttggttagcttagtcttgtctctggttatacttgtttcaattgttttcttgttgttgaagttgaccacacatataatggtttcaagtttcaacactacttaaaccattcatagatcaaacttcaagggctaatttaaagaaaacaagaaaattagtgtacattgaatgtaaactccaatagtgtatatcaaaataatattcacatcgatcggtaagataaatggatctacaaagattacaatatgaaactgtatgaaaatatgttaaaaccctataacgaatatgaagaaataaaacgaatcaagaaatcgttcttcccaactccaacttccaattgactaaactctccatcgaatctaagtccaaacaagccactctcttcccactactcgattttttcaaagtcgtcaccgtcgtcgtctccggtaaaaaagaacgtgtaaccaacgtgcctggtgaggctttctcactcctatgtctcctcatgtgaccaccaagagcttgccccatcggaaactccacgccacatatcggacaaggatgagacgtcgccgttttagttttcttgttagacaaggatccaagaagtgatggatcgctactgttaatgagtttcttgtggcttgcacgatgacctcccaaagcttgaaacgacgaaaactctttaagacaagtcttgcatcggaaaactcgtttctctcctcctccgccgcattctccaactcttgataacaacatcaaacatttcgccgccgtatcttccactatctcaacttcctcacttctcgcaaccattttgaatcaacttagtgacttcaagggttttgtttttttattctatgatcgagtttttagtttgtgtgtgttgtgtctcatatttatactagaaattagtttaataattttaattgacgaaaatacccatttgtgacttgctgcgtaaggattaggatatattataagcgtcaccgcgtcacgggttgcgtcacgcgtaacacttatgagactaagaaaaatgaaatcagcagtcgttatacgttagttaaggaaaaaggaatgttcttggtgctttcctccacaaaaaaatacaatattttgaagtttagaagaacaaattaaattagttggaaaaaaagaaaaagaataacaagttattaattattatcttctttttttggtcgttaaagttattaaattcttgtctagaagtttactcttcaacgataatttacttgctaacttatccacagtctacatctatagaacttttcctaggttggatagtcaatatttttattcgttaaacttatctactaatttagttactagtcatagattattcatttttatataattagagcatctccaatattaaaatatcattattttagtttaatttaattgtataactaaaatttaattttaaaacaagtgatacacaaatgagagagtgacaaatgtcaataagagtttttgtttagatatcaaaggttatcaaagaagaactctttctcatttctctttccaattttttttattatttttacatgaaatatcttgtttgcatactcccattgtagatgttcttacaatttctatacgtaactcgattttttttttcatattatatgcttataatattttattatttatcatcttatgtggtaactcgggcagcaactcgattaatctgtagatagaaaaatttgtaggtacaaatttaaacacattaaactaaagatttgaagtaaaatcgagagataaataatccaacagaagtaaaaatttaactagaagaggaacaaattttacacattgctattagtcagctaccacctctccaccaccgctgaatatatatttagaaaacgtcgtactctttgtatatagaaaacgtcatactccaccaaactatggtataggagggaattttatctggactatttaagacaacgaaattacctacaacttcatatatatgctgttatatctccagatcaccgattgaattacgactgaacaaagaaaataactatggtgtacatattttctaagggtggccacgggacgtgtacttttgaattttgaggtatcctttatttaatacgatctttatgggtactaattgtttttacttttactttatccgtaaattacagatactcggtaaaaatagtgatacccgaccctttacctttgtacatctattttgtgctaattcatgtgtaatgtttttcgtagatgcataatcatttcatatacaaagacatatatgcaacatacaattctaaaagatataaaattacaaacatagattttaactttcattttagaaagtatttataaaattttagtaatattgtaaaacactaataaaacgggtaactatgagtgatctcgtagtaaagcgggtaacatgacagataattaaaaagaaattaatatccgatacacgatccttatccacgagtaatagatttataacacattaccgaactgaaggttacagttaccctttttgtgaaacgggtaaaagatcgaatacgggtatcaactatcaagtatcagtgtcagccctaatatattctagactacatatttttttttttttttactacgattgtgagttatctcgagataagtttgttgaaaaagaaaggtgactgcaacttgaaaatgctgaattgcgctagacttttagctctagaagccattcactggaggtccgaggatgggccgtccacggcagaaactcaaagtccccgatcacatactccttatacacacaccttataatctttctcataggttagctacttacctgtatagtttattcagatcgtctcattctaaaaaaccaatataagattttctcacagtaacgtacatgagggacaagtagagatatgtggctctcgcacgagtcgccgagaagggaacgaatagaaagtgtgaaaagagtggttatatggaaactagagagaaactttaagaagcaaagcagaagaaaataagaaaatgagagagtgatttgatgcgacatttttgatacacttccatgcggtttcttcttaccacacacatcttcacaagattaaatccacaaagttttatctctcatattcatctcccattagataaatatgtatagcaattatcataccatccatataagattatatatatatatatatatatatatatataattaacaaaaatattatgtataaaacatttggttgttgaagtttactacataagtttacctgattatttatatgtgctagctcgactgttcaattttaaacttcattatttctacactattggaatctcaatccaatgattcaatatgtagtttgacgattacagatttgaataattggtaattcttttaatattagtactagataaccttaagataacgggtgccaaaaaactgaaaaaaaagaaaaaccgtagacaacatttaggaatcataactacttatattagaatgatccaaactaagttcagcttatagaacaatttcttagttgcatttcttcccttggatatgcgattcttgtaagagagcaagggaggttggatagcttaatctcgtctctggttatacttcttcaatgagttcttgtttttctagttgaccacactaatgatatagttcttacactacttaaaaccattgatatagctcaaccttcaagggttaatttaaagaaaccaaaaaaattagtaaaccgtaaaagaaatttcggatattgtatcaaaataatattcacatcgatcggtacgataattggatcaacaaagattacaaaatcatgtgaaactgtatacaacccaaaaacttaactccaagaaatcgttcttcccaactccaacttccaattgaccaaactctccatcgaatctaagtccaaatccaaacaagccactctcttcccactactaaatttcttcaaagccgtcaccgtcgtcgtctccggtagaaaagaacgtgtaaccaacgagcctgagactttctcgttcctatgtctcctcatgtgaccaccaagagcttgtcccatcggaaacttcactccacatatcggacaaggatgagacgttttagttttcttgttggacaaggatccaagaagtgatggattgtcactgttgataagtttcttgtggcttgcacgatgacctcccaaagcttgaaacgatgagaactctttaagacaagtcttgcatcggaaaacacgttcatctcccccgcagccgccgccgcattctccgactcttgataacaacatcaaacatttcgcagtcgtatcttcttccactatcacaatttcctcacttctcgcaaccattttgaatcgacttagtgacttctagggttttgattttttttttcctttctatgatcggttttttagtttgtgtgtgttgtgtgatgagtactcctatttatatactagaatctagtttagttaatattaattgacgaaaatacccattgtgcttgctgcgtaagtaagctaaagtgtaaggaaatatgattattagcgtcaccgcgtcacgcgtaacacttaggagactcagaaaaatgaaaaagtcaagtgttacgaaaaggaatgttcttggtgctttcctccacaaaatacaatatttgaagactactagaacaacttattatctttctcattggtcgtcgaagttattaaaatctggttcgtgcatattttttttttgacgtcggttcatgcatttttaagccgtcttctagattttttttttgtgaacttaaatcttctatatggatagagcaaatgaatgtatttgctgacttatccatacacagtcttgatgcatctagaatattcttggttggatagtcgatattattcgttaagtttatcaacgaataatttaataactcatcaaaaatcgaactaggtgtctctataacctcatttttttggaaggataagagattcccccactagatcaaatccccacttggtgttttatgtgttgctgtttttttcggaggcatttttggaatgttttggctgggaccatcttgtgataaatacatcatacactctccaacaaaagaccaaactagggtatagaacgcaatattatctggacaaattaagactaacgaaactacctacaactttatatgtgttgttatgtttattatctccatatgatcaccgattgaaatacgactgtttggataccatatatatatatatatatatatatatatatatatatcttaattcatgtcaacttctaaacaacacataaatagtggcatgtaccttacgatataccttgtaaattaatcaatgtcaatttgttgtacgttcttgctctctttttaatagattttctgtataatctttgtaacttctgtcatatatcatatcatcctcgcagtaacgtacatatgagagacaagaagaggtgtgtgtgtgtgtttctcggaaagatgagaattgaggacgcggttgtacggtaactagagagaaatgtttggaagcaaaaatcagaagaaaacaaggaaaggagaaagtgatatgatgcgagacttttgatacatttccacacggtttcttcttagaacacacaacacctcttcacaagttgttttccactaaatttctctcgcatattcatcctccagtagagaaacatgtatatagcataatatctatacaagatcattagtataaacactttgattgttgaagtttactacacctaattaagagttctacaagcatcttattcttaccctgataatataataagatcaaatttagctttttaaacatgtttacttaattatattcgatccataattgtattcccgaatcaataattcaatacttttgacgaataagagatttgaatgattggttcttttactatagtaagccgtaaggagaatgaaacaatggttcatcatgttaataaagccttaagatactactctaagtcactgagtttgacttggaactgctcacctgaagacaacaccttaacactgaccgaaccatcttcccactctgttttcccaaccagaaccagccttcttgcgtttacccgagctgctctcttgaacacccatttcagcggtttactctctaataccaaatcaacggtttggcctttgtctctgagagctgttgcaactgtggctgcagctccttggagatctttgtccaacgcacacactatgttctctacttcttgtcccagttctggcaacaaatccttctctttgagcaactaaatgaaagtggcaaaaataagaaccagatattcagagacccacaactattcgctgcgggttataatagtgaccagaagcaaatttaacttacttcaactattacagcatcgccgaaaccaaaaccacaagcaggaaagtcatcacctccataagtagagagtaacctatcatatctcccaccaccacatatagctcgcagcttcccttttcgatcaaatccctatcacaaaacgttgtctatcagttgctattacaaaactatagaccagtatccatgtatggagaaaatctaacctcgaagacgataccagtgtaataagcaagaccgcgcacaacagatgcatcaaactgtatccactctgaataaccaaacttttcagcaagtgagaagagttgtttcaaatctgcaatggcttctcctgctccaccaattatatctgcttatacaaattagagattcttatcagcagaaaatttcggagaaaaggactcaccagaaaaataatggaaggacataccttccaaatcatccaaggacttcacagaaagcacttgcagtaattgttcaatagcatcttctgatatccccgtgaacccaagttccttttttatttcatcaattggtatcttttctatctatttagcatgcaacataaaaaaaatagggtgacaaaatcagtaacaacagtaacattcctaaagctggagtatttaattatatcagcaaatgaagtagccttgatttcaaagcagtagtatattgatgtttagactacgaaccttgtctataatgatacaaactcttccaaacaggtcttcgggtacaccatacttttttagcaattcttgtaaaacctgtacaaggaagaagttatggtagatgaaagctacagtagatattcagattgtgcaaaataatctcaaatcatgtctgccgttgcaagtaaattccttgattctgtatcttgggggaaaaccaagaaacaagatgatcatatataatctacatcaaaagagaaaaataccttgcggcttgaaaccttaaaacccacatctgacgcagtgattccaattcgcttgaagaaggtgactatagatgaaattagttctgcttcagcctaaaagaaaccaaattagcggcacgacttaaaaaaataaacacaggtgaggttaatatagcaagaaactcaaaggccttaaaagtgattgaagttgtgaggtacatacagttacttgaggcacaccaataatatccatattccattggtaatgctcacgtcgccttcctcttgtcattctctcatatcgccaacactgcccaattgcaaaccacttcaatggaagggaaacagattttctggaccaaaaagaatatgggaatcaaccaacactctcacatccatacctggatacaaggaatgttttacaagcaaaaacaaataaatccgtccttagaaagatttcatggacaattctcaagacttggagctgagtttattaccctttctgtatgacaagcctggctaaagaaggtgtaagctcaggcctcaatgctacacgccgatttcctctatcttcaaagcagtaaagctacataacaaggttgcaagctaaggaactaaatacttctaacaattctacataaaactgcagataaagatcctcgaaatgtagagaaagactaacttggtctctaatctcttccccagcttttctgatgaacaatgcctccgtctccagtactggataatccacttcctcatacccatataaccgtgagacctttaaatcaaagtaaacagaaaaaagtgtcaaactttcaacatcccatatcacagtgagaccttgaaagcaaagcaaacagataaaagtgtcaaactttgaacacagtattcaaatttcattgagaattgcaaaaatccaaagaacaagtagagttcatataagacctctttgaagtggttaaagagccaattgcggagacgcatatcctcaggaggaaaatcacgagttcctttaggaggattgacatcgatcttcttgtgaaagtcttcttcagtcaccaaaggagcaacaatggaacctgacctgcctcctccattggcggcggcacagattaggcgcctagggatagagaactgtcgaggaggcgaacaagaagaaaccaagtcaagaagaagaataggtctaaagctcgagctcaatcgcgtcgtcacgatatgaatcgctcgcatctctctttctgcttcagctgagtgagatagagaattagcaaaagaaagagagaacacaatttctttttggtttgattcaaaattagattgggcatgtccggttaaagtccaaccggtttggttttcctcttattccacactgaaactctaatgggctgggctttataatgatcgttataggccctgtaactttttttttccatgcaatttaaacagaagaaatttcatcagaactatataattataaaaatcgacggtgatcagaatcaataatggtacaaaaatgtaaaatgtttgatacatgcatgcaagtgataagaaaaaaaacgttttaatcaatcttgaccggtcatcgtctctcaagaggccacataaatcgttagtgaaccaaagagaaaacaacaaaaaattacattcgccaacaaaaaacataatcgtttgaatgaagagattatttgtttttgtttcaaacatgcaaatattaggccacgagtcatttcaattaacagagtatttcatcaacataactcttataattcaaaaaaaatattgaaaatttgagatagtgtggtaacaatttcttacttgtgaaactatgaaaacgttgcagctggggctccactcgtggctctcgttttagacatgtagtcaaagttaggtgtgaatatgaatttaagtggactcattaagtcaactcttaaatatttgaattctcaattataacaaaactttgttgactacttgcctcttatatttaactttgcctcttaaattcaaattactttgtattaaaaaaatataaacaacttaatcagaattttattgaacacaatgctttatcatagtttatttttttttatgaatttggacacaatatacataagcttattatatttttgattaatacagaaaaagctttttatgtatgttcataataaaatcaaatttaaacctttaaaatcaaaattttgcccaaaaaaattaaaaataaatcaaaatttaaatctttatccaacacttttttaataaaaaaacctcgtcatttatgtcagacaatacttttgcacgaatgattatgtaaaaaaaaaacaccaaaagagaggaacaaaaagtcttatttggtgtctctcattctcaaatctctcattgtgtgtctgtgactatctctctatacaattcaaactcttcaagattacttcctcttcactttgagaagaagaacaaaccaacaaatctccaaaatacaccgaacaacattaatggcgttggtgagttcaagagcaacgcaagactcaaaaccctccagggaacggatagtccccgtcgtttattatctcagccggaatggccgactcgatcacccacacttcattgaagtacctctctcttctcacaacggtctctatctcaaaggtagtaaaaatctcatctttttgctctgtttttctctcctctgtttttgatatcataaagtttcgatttttattctgttttctcagatgtaatcaatagattaaatgatctacgaggcaatggaatggcttgtctctactcttggtcctcaaaacggtaaaaagctcacttctccaccgtcggatctttaaatctttctccaccgtccgatcttctcacaattttttgtttactctgtttttaatctcagaacttacaagaacggtttcgtctggtacgatttatcagatgaagatttcatttttcccgttcatggccaagaatatgtactcaaaggctctcaaattctcgaccttgataataactccggtaatttctccgccgtcactcaccggcgtaaccagtcttggagctctgttgatcattacaaagtctacaaagcgtctgagttaaacgctgaggcaactcgtaaactctcgatggatgcttcgacacagactgatgatcgtcgccggaggaaaagtccggtggatgaagtgaatgaggtcactgagctgagtagagaagagattacttcgcctccacagtcagattctagcccagaaaccttagaatcattgatgagagcagatggacggttgatattgcttcaggaagatcaagaattgaatcggacggttgagaagatgcgaccatcggctgttctgatgcagctgatatcgtgcggtgcgatgtcgtttaagaaatgtggtccgacgctaatgaatgggaacacgagatctacggcggtgcgaggaacagggaattataggctcgagagggcagagaaggaattaaagagttttggaagggtaaaattggaagagaaagagtattttagtggtagcttgattgatgagagtagtaagaaggaacttgttcctgctttgaagaggtcatcttcttacaatattgataggtaaacaaaaacatcaacaataatcataataacattataatttgctaagtaagtcacatttaagatgatgaatttggtatttacgtagttctaatgggctaatggcgatattaatcaactaatgttgtcttaggagttcaaggatggggttgacgaaagagaaagaaggggaagagttggctcgggctaactttattccgagaaacccaaattctgtggttggacaaccataaagcccataacaaagccgaggcaggtgtttgataagcgtcaggagaatattacatagaggtttcatgtaaatatgttgtaatctgacgtttggtgttttgggaatctttcaattttctatgcatttttgactattttcattccttcaagatttcaatttttttggtcaaacactcaggaatccacaaataaacgattcaaaaacaaaacaaaaaacaattccaagcattttgactatttccatatgacttttgtttttaatcgacgttataatgatgtaaaaaaggcttgtatcatttaattaaatgattcttaaagtggtgatacaaaaactttacgttgattattgtaacctatatgaatatgtgttaattgcaaaaacatgatgttaatttttacatttaatttatttaagtgatgttagtattactatgaactaggactcaaatccccagagatatcgtagaaaaaatattataattttttttatataataatttttgtaaaataaatcaaacttaaaatgatgcatattacaaattttagtagttatttaagagtatatatccccctgttcttttttgtttggttgtttagaaaaaaaatttgtttctaaaagattgatttttttaagttttctatgtaatatttattggttagtattggcgaattgtaattttcaagaaaaatagttaattattattggtttagagttatagaaaactgtaaaacactaaaaataatacatttataatcaacatttaatatgttttcttaatatatgtgtttttcctaaacaatcaaacaaaaaagaacagagggagtatatattaacggaaaacaattaccgtgaatatttttataaaaatttgcgataaaaaatcacaaccgagaaaaattaaccgccaatgttaatagaagttacgataaaaagtaaccatcaatatttttaatagaaaattgtgataaaaacacaactagaacacataaccttcaatatgttaacataaagcaacgataaaaagacacgaacgaaaatagtaattgttaatattttaacgaaaagttacgatgaaaagactcaccaaaagagataaccatcaatattataacggaatgttgcaatgaggagatacaaccgaggaaaaataactgtcaatatttttacgagaagttgcgataaaagaaaaaatccaaacagaaaaataaccggtaatattaacaaaatattacgatgaaaaacacgaacaaaaaaattaactatcatttaatagaaagttacgataaaaagattttaaaaaaataatcgtcaatattataacgtaaaattgcaataaagagacaaccgagaaaaataaccgtcaatatttttatgaaaatttgtgatcaaagacacaaacggattaaataaccgtcgatattaactaaagttacaatgaaaagacacaaactaaaagttgcgaagaaaaaacacaaaagaaaaaaatacccagaatgttaacagaaagttacgatgaaaaacactaataaaaaaagataacgtcaatattttagtagaaagttgcgataaaaagatataaccaaaaaataattgtcaatattataatagaaagttgtggtaaagagacaaccaaaacaaaataattgtcaatatttataagaaaaataccgataaaatacactaaaggaataaataactgttgatgttaacaaaagttacgattaaaatgcacaaacaaaaagttacgatcaaaaaataataatggaaaaagtaaccatcaatagttaacagaaaattacgataaaaagacttgaacgaaaagtaaccatcgatatttcaacggaaagatatgtaaaaagacacagtgagtaaaaataaccgttttttatttttacaaaaaattactataaaaagatactaacgtttaaataaccaaataaccgtcgatgttaaaaaaaagtcatgatgaaaagattcaaatgaaaagttacgataaaaagacactaacgaaaaaaataaccttcaatattaacggaaagttacgatgaaaagatacaaacataaaaaagaactgtcaatattcgaatgaaatctgattatctctttatttagattttgtactatggtgctttcaacctgaagttattttctcatttagcatttgatatatcgagataatcttaatgatgtaagatagtggaattatgaaaagagaaatgattttcacatttcgttatctaaataaatcctaaaaagaacaataaaacacttcactagtcttattattaaaaagagaaacatagattcttaaaagaaaccaaataaactcgaccctaagatgtctcctcctctcgcaagtagtatctattcttcaaccaaatagaatctgcaataacagcctcaggaataaactcgtcttctttattcctatgccaagtgtaatgtgcatgagtcctgttctttatttccaaaatagcgtgtccgaaactcgcctccctaaacgccgagtaacttggttggggatcaatgaaactgcatgaaaaataaatgatattaatcaaacaattcacaaacaaaactttaattaaagtaaagattattttatacttgttagcgattccttctatgttgcctccatctccaatggtgatgtaaaccggagcattttgatctttaaccggagtactcattccatcagtgatattgtattgaatgttggagatgcgctctgatcgctcgtaagcatgaacatgaccagcaaagacgatatcgactttgttttcaacgaaccatggctcgaacgtaactctcatgctctcaccttccatataatgataattattgctgttgtaccagggagcgtgaaccagaacaatcagccacggagtctctgatcggttaactttcttgagctcatcctggagccacgagttctgcggtgtgtacttgtctatggtaatgtgtcacaaaagataaacattaacattgtaatataaagtaaaaatatagtagagtttgagtcttagatcgtaccataagttgagtaagaggagagtacgatgatgtaagctgaagctcgtttgatttagtaccaaagtgaagatgtactttgtgaggctctgtaaggaacgtggtaacggttcttgtacggcttgaagggttgagtctcgctgtgcaagcagatttaatggtttaatattgaacttaaaaatgtatggaaatagatatatagattggatcttactatgctctcggcgtaatctatctcgtggttccctgcagcccaaatccaaggctgatacgcggcgcttggttccacaaaccggccgtatgaatcccattttctttggtcgtggttaggatggtcatcagcataagataaatctccggcaaaaagaaccgcttggccttttggattcgacatgtagttatacaatgtctagttagaggcaaaggtttgtccaagatcaccttaaaaaaaattaaggttactgaattaggttcagaaaatttaaactcatagttgaaacttaaaactcaaagcctatttactgaaataagaaacacttgtctatggcctctaatattgaatcaaatatagcaagtctttagcgaaatgtgataattagtaatttagtagtgtgataattactaatagaataacaccaacttctaggtttagaaaatactactaaactaaatattaacctacggtacactgcatgtgaaaatgttcattgaaaagttatatatatatatatatatatatatattttattggaactattatttttatatgaataatatatcattgacacataattttaatatatttaaagcttgggaaattcatgttttatgttatgatatttgttgcatattattttattattaaaagtttagtattttttgtttgtggtttgagtgttttttagaggtaataaatattcaaaatttgtattatctagagatttttattttattaatattatttatatataaataatatatttaagaggtacatcataggcctatatttgtattaaattttttattttaagatgatataaagatatatgctattgtttttatgtatgatacaccttgggatgatttttataactatttttttttaattttaagatatatttattttgttaatattattagttttgtttaatttttaaaattatataattgtattttgattgttatatctaggatttcacccgtagtataccgtattaatatgtttttaattatttataatatttaattttataaaaaattaaatatttaaaatttcagaacagttttaaattacaaatatttaaaaccttttataaagtataacttgataaaagatttaaaatttgtaatatttatcttttagaaaagtttaaatatttttaatatttttaaattttttaagattcaattatttaaaataaagaatcggagtaaagcaaataacacttttaattttggatgcttgataaatgaagtctctggcatattcgtattcaaaattatttttgttcttttatagtaagactctgaaccattatccaatttcttaagcaatgtgggactttttacatttattttgttttctttatagattgagtaatatatgtatattttaaaaattttgaattacatcatataaataaaaaaatctaatattttattaactgtatgtatttttttaaaaatcaaacaaattagatatatgaacaaagaaaagttaaagaaaaatcatatatttatatttaatgtatatagagagattttagtaaattaataattaattgaatgtagttcaataaagataaaatttaattaatgatataaatttagacatatatatatattttttgatactaaatatataataaaggaaagagttaattcatgtatttaatgtcaactaaggaattgtaagttattagatatttggttgagacataatttgtaaagacttaaatttaatagtaaataatatatgtagaagtttaagacaaggtctttaatgatttagtaacttttactaaacttttaaaaacccttctgaacttacgtttgtggtatatttgtaacttcttacaaggtaattatttgggtgataattagtaatttagtagaattgctttacagacgaaagtaaacttcatcatttgttttttttccttgttttctagcattgatttttacttaacctgtataatgagaggggaaattggaatagtccaacaaaagatttcaaaatcgttttaaaattttcttttgttattgtgttttagaataatacaaaaaaactttgtgtgaaaattagtaatttgtgaagggaaaaggaccgagaagacatcaatctgttgactgattctcgagcctactccatactttcactctccttttccttttattttattttctattcatatttttaaatatggtactttttgtatatattgtaactaatctgattttttgtttctgctaagatttaaaaatcgccggatatcagaagatctccaattaactcaggatagtggaattattaaaggaggaatgattttcacatttcgttaactaaacaaatctagtacaatttaaataagaaacattaaaagcaatttaaataatatatatatatatatatatatatattacttaggaaatagtcaaataaatttataatacctcaagcccttttatggtagcatggtaaagataaccagatgtgtaattgaagtatctataggacgaagttgtcgctagagcactcttattatcactaccatcactattggcgatccaatatgtaacgacgttagaaccatcctcatttaatggtgttacccacgagatgatcatacctcgaccagcgtgatctccttgcgttatgtgaacctgagaaataagtaagagtaaaagcctataaatcctaagtggcgaaagaaataaataatatgtaaatagtaattttataaagagaaattgagaattacttgttcaggagcgttataacaagcaggagggggaaatgtttcgagtggcatttcttcagatggttccgatactcggacatgagtactggtgactccagcttggctaacgacaaagatgcttaacaacgcaatcgcagagcaaacaagtgttaagtgattcaatcccatttcgtttctagaaaattctaatagatcttgctttgtaaataataatttttactatgagatccatatgcttttatagaaaaaacaaaatgctaagtatattctattgttaaagatttattccaaagataatcagtttgaaaaatattctaagaattattcatatttctcgatttcaaacgaaataatcaagagaaaatgttacagtttcctagattttctccgaacaattgttcttataattttattaatgctaattaaaatatatttgtcgaacctgaaaaagaatatacctcgttacactgtgacaagattctatagaaactagatgacaaatgaaacataataatgcaacaatcatttcatcaaaattcgtatcattatcgatcacaatctagctctagcaattttgtttttgttttgtctttgcaacattaatttacgtattacattacatagcatatgcttatacaaaaatgagttgacagataatttatcgtaaaaagcgttcccccatgtatataaagttgcatatttgtagtaattaaacaccaaaagttgcatacttggtagagtaactaattaaaataattaagaacaggacttgtcgtcaatttaaatgttttgttttattttatatgcggctgtagattatggctgatgaaatccttatctccacctgagggcaaaaagctagtgattgcttaattggacaacacttctctaaatggaataataattagtgaacaaaatggaattttaattagtgtaatatagaggttgttcttgagaattgttccacaataaggcaaagtgacgattgcagcaatttgtctgaattcccaagagaggaataatccaaatgtcaaagccaaagatgcaatcattttctcttgctaagacaagatttttcctcttttgcttgaagatgatataatttctaaaggcaccgattccatcttccatagactatggatctaatgccttttttctttctcttcttgggtagtcatggtactagcatcttagaaccaattaacctaaaagaaaaaaaataaaaaaaataaaaattcacaaatttcctcacaaattctgtataaaaaactatgtatattttatttttcgtatatttatacttaacaatatatatgtatctatatgtttaaattagaaacacataaaaaaaatcaaaataattcggccaagatatttattctaccaatgtatttttcttttttgatgaggtgatatggattactaggtaagaccacgacatgacaaaatatgaattcaatatactttgatctctatgaattttggaattcatttttatccttccaaacccgcaaaaagaagcaaaaatagtaacttcattttcataatctcattccatttttttagcatctcaatattgatggttatgtttctaatggaagtcatctgaatagaagaaattcacatctataatatagttatttcattcttttgttttcatatgaaacacaagttaagaattttactcggaaagataatcagaaaaccgcacacatatattttattttcattttggtactaaacaacacacatatatgatacgaaggtttgtagcttattttataaaattttcaaaactcaatgactaacgtttaagataaagggtatatatatagaagaattatagacagtcattatatgaatatgaataagtggttgcaaatctgcaaactttgaggatgtttggtaaccactttgaggaaggcttaaacatttctttctttcaaagggaaattcgctactttacgatatcatcgcttatctagctatatagaggataaacatttttttttaaagaagcaagatattcttaattaagtaatctttgttttctgtaatattaatatattatatatatatatatatatattatatgaatatatataatgcaatcttaaataataaaagtatattactccatatgggggatcacatatcattgcatacgtaagatttcatacgatgtgggttttatacctttagggcgtgatcatcatgttcataagaatatccatcgcatcgatcctcatcctctttaattaacaactacggcttcttcttttgcattacccaaaccttgtaaaaatacagaagtatatatattattatatgatttatgatacgtatgcatctatcatctatgtatgcttacatatgctgatatgcatgcatatgtcatgtgtgcatggagtgacggtatacatgcatggagattgaaattcaaaatacatgaagattgaaaacatatgtaacgcaagcatatctatgcatgtgtacgtgtggacggacgacatcttaaagaaatactctaaaaccatttgaaatcaaaagaaaaatgattgcaaccatagacatctatgcacttgaataaaagtcaagggacacacagtacttaactcatatgtactgacaaaatagtgttactttgctcttaaccattggatatcaaaagaaatatgattccacaagtagttgaagacatgcaaaatgaaaaaatctttctatccttcgtttagcggctcaacaaatgaatcaagtttttcagtcgtattccggatcattggcaggatggtccaaaccataattcacatattttaaaactaattttcacatttctatcagcaacggtaattaatagaaaatgttagtattattaaaaatttgcgtgtgggagtcacgaggcaaagaggaggatataaatatttttagtggagattggtcatagaggagtgtgttggtgtcgtccacgtccctcaatctcatttcttaatctggctccactataagaatcagtgatcaatttcgaatcctctccgttcgttttgttgaagttcagaatctctagtaaattctcattagatttctaaatcataaaagaatatatagttagacacgatgatcaaacccaactaacaatagaatatatttgtttatcaatcatcttctaatcatattcttccaaatgtattggtataattgcttccgttaaccacctcattaagtggtcaaatccaactaataatcatgcatcacttcaaatgccgtagctttcagagtgtggtgttttgtagaatattttctttagacaaaaggacgattctaggaatgccaaagcaacacgcatgaatgataaacccctcgaacccaaatctaatcgagcatttaaaataaaaagaagaaccacatgatccattatggaataaatataaaataatttgttccgtaatgccattgcatccattcaaagcctttaaatctattgagaaccaactctataaaccgtctttacaaaaaaaaaaaaaaatggatccgcaacaaattattgtcttggtccactccagaactaattagatggtctaacatttactccgctttctccgtaacctccattcaaagcgtatctcatcttatttgttttcttttgtgttaacaattttacaatttatgcaaatttttctttttcattatcatttgacattaactcttttaatttacaaatttttttttatgaaaactgaaaaaatagtttctaatttaaaatcatgatacatcttgtctcatgtaatagcaaatgcaaatgcttgaaagaatcagtatgtgtcggtaacaattcggatagccaagataaagaaaacgaaagaacaattcccaaataaaaatcaaccgttgaagagttcaaactaatatttccaaataacttaagaaacttaattcatatatgttggtgtcggatcccgcaccacgggctcgggacctgtcaaagattgccacgtaaagaggaaaggcccacgggcctttcttgagcaagaatacaagcggagtgattgatccgcgaggtgaatgtgacatcgaggtcaaagctgcccggattggagagtcaagtggaccggaagatagggcccaagaagtccggaatcaattcaaattcgaacatttgaatagttaattcgaatactgaaacggatacatttaagacagaataattgtgtgtaaataaaaattaaatttatttattgagtataaattatgggccaaaggccatggaaagacacacgcatttttgtgcaaacttactatacacattttcttacaaaactcatagttttctctataatcgttagttcattttcttatacatttgtcctcaagtataatccttctcactaaataaataaatacttgagtgtgtgaatccgacatccacaatacgaaccatctcccttcatttttatgaagcttattattgtttttttgtttaagattcttatgaagcttataaacttgagatctagctctagctcaaattcaagaatggtttagggccgccttagaatactttctaattgttaaaaccctaaattagtactttaatttatatggctttaataacaaggaaatatagtaaaaacgatacttttgtttttgcttttggcttgaactattgacaatgacataggagatagtgcacttgcaaatatggagtataagaaagagttcttattaccacacacatccaccaaaataaagacaaaaactaatgggagtgttacgtcagtacatcaatcacctcttcactcaatacatgtttgtttaccccatatggtcataaccaaaggcccaaaatatcaacttaagacatagttctacctcagtttaatgaatcttaagaacactatgccaactgcggacaaaaataaaaaacactatgccaataagagagaagaaacatgtaccttaaaagaattccacaagtttattttgtacttgtgtgtgtttggacaatgtaaaccctcaggcccaagagagaagaaaaccacaaaccgccacaaactcaagatctaaagcaagtatctaattcctatctcaggtactgttactagatacaaaaactcacttatcaagctcccacaacaccattcgacttctaaagctgtccaagctttttgtctgtttcttcttctctctttttcttttctaagcttcaacagttgctaccaatataacccttaataaagtcaagagacacttctctcatatcccccacaaaaaaaaggtgaagaaagatctaggggtcttaatattatttttaacacccatagaaaatttatattatgagtttttctactctaaataacaagaaactatagaaatccataccttcttctttttggattaatttaagagattttgtatatccatattcgagatagtgcctgccaaagaatataagaaagagttcttattatcacacacggcataaaagaataaaaggcagtagaattaatgggagtgttacatcagtaacaccaatcacaagacactctttaacgatcaagtttttttatataatggccttgtgacatcacaataaagagaccctacattctcaataggataatccctcaaacatatggacactaaagatcggaataaagataagaaatcattagagatttaatattgcgagtgtgatatcgtgtagacacagcacagtgttgaaatttttaccttataaatatagtatccaaaggatgccatgatgaatcaagctgagaaataacttttttagtaacacgagagagataaagaagagctaaagagacagagagatgaaaatgatgcaagaggagggaaaccgaaaaggtccatggacagaacaggaagacatacttctggtaaattttgttcacttatttggagatcgacgatgggattttatagcaaaagtatcaggtttgaaggtggagggagaaagataagaataggtaaggagccaccattaatgagctagttttggttgtaggtttgaacagaacaggaaagagttgcaggctaagatgggttaattacctacatcctggtctcaaacgtggcaagatgacgcctcaagaagagcgcctcgtccttgagcttcacgctaagtggggaaacaggtctgatccatctaagaaagaaacagaaattatggttacttgaatctcaaattattgttgtaacagtattgatacttaaaagtttccatctatatctatgtaggtggtcgaaaatagcccgaaaattgccgggacgaacggataacgagataaagaactactggaggactcatatgaggaagaaagctcaagaaaagaagcgtcctgtttccccaacttcctcattttccaactgcagctcgtcatctgtgaccactaccaccaccaatactcaagatacatcgtgccactcgcgtaaatcttcaggggaagtgagcttttacgacactggaggttcccgatccactagagagatgaatcaagaaaacgaagacgtgtactcgttggatgatatatggagagagattgatcactcagcagtaaacataataaaaccggttaaagacatctactcagaacaaagccattgcttaagttacccaaatctagcttcaccatcatgggaaagctcattggattctatatggaacatggatgcagataaaagtaagatatcgtcttactttgcaaatgatcagtttcctttctgtttccaacacagtagatcaccatggtcgtcaggttaaaaattttaagatttaattcattgagataaatctgttttatatatatgttatataacttataaatacaataaaacctaacgactgtaatagttggttgatgaacacaaaaacagcttaagtctggactctgtaatcatacaatgtgtagtagtagtaagtaaccagcctaagtctatgtctagaatgaataagaataaaagtcttgtgatcccactttcttttatttgtttgtcaatgtataatacaactcaatactctaattctaaagtaaacatttcaaaatttcaatttcttttctctgtttctttttggtgacatctctctttaatatatctaaggtttaaggtactataccaaaataagcaaacttggacaataaaattatgaagaaactcgcttattctgaccgaaaaaatatcattcttgaatcttttgatatggcatatactctctcattcagtgatttagtgaagagacattaggtactacgtaccatttatcttaatccaagctaaaacaaaacaggaactggaacataatcagtgatgtataacattcaattgtgaattgaatgagtgtgacaatattatatagaaatatgaagcaaaaaccacacaaactatttaagaacttacgggtgaatagagtaactccagaaacagaaccctaattagaccatcggtccatcacgacgcagtcaaatccttataatattggttgttggatgcagaccccaacatcctagccaagacgacgtcgtttgtcgacatgaccgagcattttgaaaatttacaatttacattgtttgttttccctcccgccagattttgttcataaaaagaaaagaatctgtgtcaagcctcgaatatcctacggtgttggaagctgatccactatttaaaatgcttcaagtggtttaaatttcaaaacaacacaaaatatttttccaaaaaaagtatttttcaatacacatttaaaatttgagaaaatattttgttaatgttaaagtatcacttcatgataccgattaaaaacaaggagatttgagtacatgttaaatttataattataatataatataaataactaaattcataaatttgtttatattactaatattttctaaattaaaaactagtggttttaaaaaattgaaatttcttaaaaaaactaaatattagttagtgtttaggaaattaacgtttatcgaaaatataactggtgatttgaaataaaacaaaaaaactagtctaaacactagaattttaaaaaaaaatcgtatcaaataataaaattgtaataataatatttgagaatgctatttagattacatttcttgccttaattactgagacaaatgtgattggtctactaatggattgccatgtatatttttatttatctgtaaaagtgtgagagaaaaatgtctgccaattcataattcattaaggaaattaagaaaaacaaatatattcggaaactacgcgtgtttgtatgtaagcattagattttcttatgaaactgaatctaacgaagatttcttaatgaaactgaatctaactacgatcttctcattaaccgctagaaaaaaggaaactttgaccaaagtcaaagcaagcttataaaaaggaaattttcggtttcttcttctctgtttttgttttcatcactttcagaaatattttacagagaaaagcgagagaaagaagaagaatggagatgatagagacagagatttcgttttctggttacctcaaaagatatggtcatctcaaattcatcgagttatcagaccctcctctcacaaaaagacctagatattcaccctcggtgatccctcctcttcctgatcaaaaccctattttcactcttaaactatctccgatcattctgaagaacaataaaaggaagagatttacaccgaagagtagtagtagtcgcagtgttgaagagataaccaaacaagtattcgacggagtagtcagaaagtcttcatcttggatcaagtctgagttccttggaagaggctcttacggttcggtttatctggcgacaagtaagaaggccaaaactaaaacgaccatggcgatcaaatctgcagagatttcacgagcttcgagtctaatggacgaggaaagaatattaacccgtctctcatctcctttcattgttcgttgctatggccacgagattgcacgtgaggagactctgttcggtggcgagagaacgaattacaatttgattctcgagtattgctctggcaaaagcctcttcgacttggtcaacgataaccttggaggattgtcagagaaagatgtgaaacttcttgctagagatatcctttacggtctcgactgcatccacagggcaaacattattcattgtgacattaaaccggaaaatatcttcttaacccctgtcgagaaccggataagacctagtgggtatgtggcaaagattggggatttcggtttagcattggagaagggttcaagcgagtatgaaaaagcatcaggtcataggagaggcacaacgcgatacatgtctccggagcttatacgacatgggattgttgattacgctgttgacacgtgggctttcggatgcacagttttggaaatgttaacgggacaacaagtatggggagaacatagtgatctcggttctgtagattgggacattctcatcggtcaaagctgttacattccttatataccggattggttatctgaagaagcacagcattttctcagcagatgtttaaaaagggaccctgcttcaaggtgggggattggtgcactcttgaaccacccctttttgcaatgtggatctataattgtttagtaacggttttgtttattagttttaagttgtaagatgaagtatccaactctctatttgttatgtgtttgtggaagttttgattagcataaatcgtacttgcgagataaatgataagagacttttataactttcttatagaaacaccaaatttaattgagtattatagcaaatcacaatattgtttcattaagatagaacagattctgatgtctaaagctaacaagaacaaacacaacaagaccaagtgttccatattagacaactccaccaagcaaagctaacattgccatgaagtaaaagagcaaaatcatcattggtgagaagagctgctgcaacttttgatatcccatgaaatatgcttgtcttcttcctcgtagaaagaaataaaaccttcataaacttgagcaaatgaaagaggaagcaacaaggctaggtgtctcttgaataaccaatgatcactatcagctcccccttgtcttggaacacatgtcatgtcatttcttgtaaaagacagtgtagtgtttgtgctatcaacaaagagaagaagaactggaattggaacacatctctgagcagcaacatgacacaagcatcacacaatacatcactcaaaattgtgtggtgtattggactgaaccacgctctctgcgacagaaaccatcaaaaccaccaagctctcgagcaacaacatcatcactaacgaagacaattccagaatctgaaattatcattcattccagaagctaaattcatactgagaaagggccagtatccatgaacatataacatcaaacatgaaccagagagtatgaatgactttctggtggtcgcgtaagagatccaacgatgtaaccattataccaaatcctgttggtttagcagaatcatgagctggcatgagcatcacctgagaagatgtaaccattttaccaaatctcaaactagtagctgagatctacacgaagctcgtttttggcgatgattcgaacagaaacacgatcaattttgatgaatcaactggatattgaacaaattgaatactttgatcggagaagaaacaaatcggaaacacacacggattgatcggaaaaatcaaccaatcggagaaattaaactatcaaacgaaacgaaattgactgtagaatcagaatatataaattggtttagaaagtatactaaaccaaagtctaaaccaaagatactaaccaaactaaaccaagtgtatagactctattaccacaaattctgaaattatctagccaaaagtcagacaattaacatgtgactactggttttagtttcgcatattctacaaattctgaaatcaaaacaataaactatgaaaaaaataagaaggaaatttagtataccgaaaccgaaatttctgtttcttttgagattaaactaatccggaaaatggagactctaaccaaaccgggtcggttttgctgatcggaaataaataaattaataatgaataagaaataggaaactcgtataccgaaacctaaatttctatttcgtttcagattatactaatcagaaaaatggaaactcttaccgaaccggttcggttttgtacttgactaatactaaaccctaaaagaaaaaaggaaatttgagtcacaagttataaatagtctctctcgcctcttcgctctgtctcatcgtttttgtctaacaacaacaattcagagaaaatagagaattataaaaagttctagagtgaaaaatatgccgagatctatgtcttctgatcgattagttcagtgggacgacgactctaaccgtcctcacaagaagttgaagcattcaacaacgatttcagagacgagtgtgatagaggatgatgctgattcgtctacccagatgggccattcgatcaaaaccattccaaaaagcgatcggtgggtcgtaactcgttatcttggaaactcttcacgcagttctgtttacttagccgagagcacgatcgaaggagaggaagactatcttcctgacgagatgaccattaaatctattgagatctcacaagcgtcacgtcttatgaacgaagaaaagtttctatcccgtctccaaaacccttttgttgtgtctttctacggccacgaggtcactatagagaaggacgggaaggatccattactcgagaagatgtattacaacacgttacaagagtacagctcaggaagaaacctagcgacacacattgaaaaaaacagaggaaaattaccggaagatgatgtgaggagtctcgctaatgagatattgcttggtctcaagtatattcatgaagagaagatcattcattgtgacatcaaaccaaagaatatcatacttccgtttgagaataacctatttgctcagatcgctggttttggaaaagcgataaagaaatggtcggttgagtatggtgaaggattaggtcataggataggcacgtcacgattattgcccccggaggttatgatggacatggttttggattatggtgctgatgtgtgggcttttggctgtaccgtgcttgagatgttgactggagaaagagtttggagtgagtttggtaagcttgattgggaaggctggaagaccctcattggtgaaagtggtagcgttccctatattcctaattacttgtctgataaggcaaaggattttcttgcaaagtgtttggagagagatccatctaagaggtggtcagttgatagtttgctcgaacatgagttccttaaatggattgacgaagacgaagaagaagaaatatacgaagaagaagaggatgacttttatgatggaatagaagatgtcgatgaagaatatgaagcaaatctagaagctgaagcagcagttgaggaagaagaagccattgaaatagatgaagaatatcctaaagaggaatcggaagatgacctataagaatatattcatgttaatttctactcttttttggatcttgttacattatatatctttatttgtatgacaatgcaaaagtttcactgaaaaatagaatttaaggggaaattactccaaaaataaaaagaggtagagcacaacaatattcaaaaatcagaatcagaggtaaggtttagtaatatactactactaaccaagacgttgattactttctccaatagataataagcttctacaacaaatacagatcctaagcttaggttcagaaaagcaaaaaagcaacaaattaaacaccagcgaagaattctccattgatcatctaataaccataaatcaaaagctccagtgctccactcagtttttgataaaaatatacaaactctaaacaaaattcaaccaagtaaaaaaagaatcagggaatcaaaatatattgggcccaaaggcccaccattttgtacagatgaaatttttgataaaaaaaagaattggtttacagttaatgcaattactaatgaaaaacatggaatatgttcctacatgtattcacttattattgcacacaagcagaacatataaggttcgaatttcagagagatgaaaagatgggcacaccgggcaatgtagctccggaatcaacaatatatgtattcccggatatatattgagaagagtcatggatgagatagcgtacgagagaagttatccctggatcaacggtctgttgcagctttaatggtacagtcctctcggtcacattcttgaaccactccttttgcataagaccttgtgtgatctctgacttgaaaatcccgggcgcaatcgagttcactctgatcttgtgcacacctaactcaactgccatcatctttgacatggtatcaacacctattttggaacaagcatatgcaagtgcaccgggcaatataccgcgaatcccggcaatcgatgagatgtttatcaccgagccacctagtttagcatcacgcattagaacacaaacatatttagatactaaccaaggtcccgttaagttggtcttgaagacgttgtcccattcttcctttgacaaatccaaactcgacttgacattgcctctgatcccggcattgttgatcaacgcatcgatctttccaaagattccccaagctccctgaaccactttttgaatggtggctgcgtctgatgtaacgtctagcttaagagccgcggcttggattccagttgaactggagctgttgatttcagagcagagagagttgagacgatcgacacgacgagctactgcaataatcttacaaccagctttgcctagatcaagacagatctctcttcctataccagaggaagctcctgtcacaagaaccactttgtctttaagttcacaccacggctccaattgcttcaacacctccttctctccaaaaacaaaagtcaaagtttgatgattgctcatattgattgttttctctgtttatgttcgatggagaagaagaagcacatgaaaaaacttagtgatataaaaatagaagtgtcagaagatatttaatctgtatataccagactcgaacaagtcccatccataacaaaagacggtcctatacttacactcttaattatttcatcatcagatcgacaatttgtttattcgttaggtttgattttattgttatcctgattatatttgtttttttggtcaactatcaattcaacacgacgttttcaaaatgcaatgatctttttctgtcttggttttggcaacaagcaacaataatgcatataatatatataagtttattatattataaccacgagtttctcgcggatcgattcgtttatgattcagagtttggactccacaataaactgttctttattattggaaagtatctaaaaaacaattatggtgcaacgttctctatcactgcaaggtttatgtcaccggagcttataagggacaatgttttggattatggtgcggatgtgtgggcttttgggtgtaccgtgcttgagatgttgacaggagaacgagtctggtaagcttgattggtaaggttggagaactctcattggtgaaagtggaattgtttcatatatccctgattacttgtctgataaataaggcaaaggattttctcaccaactctaatgttgactttagtgtaatttcttatattgtgtcaatcgtaaactctgtaataaccaaacttttaagttctgtttgatcctttaaaccaaaattgttactgtattaaattcagttgatatgaatcagccattgtatcacaaatttatgatatttcttgatacaatatcaaaactccataacaattttacttcacaatcattttaacaagtctacagaaacagtaaataaattgatccttggtctcattggtctctataagtacccgtcctacgtcatgtatgactcaactgctttagttttgttagttagatgcctcaaagacagagggatctttagatttggctggtaactgtttaagcctcagagaagataaagctctctctgtgctttaagggtttcccttcagaggctgcgcctcttcatcccgtggaagttcttgagctgccggcggcttttctgatttcttcttcacgaaggttttagcatatagagatccgaaaacaattacctgcgccagtgaaaagtggttttagtttcgggaacaaggagagatgaaaaagagggaagacaaagtaaagagaggattggaagagcttacggatccaatacactgctcccagctaagcgggtgtgagaaccaaatgcaggagagcatgatgctggcaagctttttatttttcagacaacgaagaaggaattagatttgattatattgtgcttatgaatcaaagagttgagatcagactaacttacctgccttgtagtcattatggcagcaaacgttagagcaccaaatgtcctaatggtgtaggaaatgaaaaattggctggctgttgctacctgcaaaacaacgtgttcatctctggtcagttgtgactactgctgcaatgcaatcatagtctaataaatgtaatgactaagctgaaaacttacagtggaaagcaaagctatgtcaaataggcaatccctatgtcgagaaacaaagtctactgctgggagtaaatgtccttgcaatataaggcctatatcaaccaagaaatttcacatatgagtagcaaaaaagcatggtcaacctgattctcgagcatttttaggtccacacattgaggtttatacaaggcagctgagttctatatcgaaaagcactgatggactaatagaatcacagttagaataagaaagtttcctaatatctactaacatatggcctcagttgaaagcttaaatcagaagtttatatgtatccaaaattgatcaaacagtaatggaaactaatcatcacagaaggtaagacatggtccagagtccaaacaaaatgagagtaaaagagacaaaagaagcacaaagagaagttctcaccagtaaaactaagaatagaggaacaaattgttgtgtagaatatctggttatgtatttccatattataacctttaaaaagtttgtcttggaatgtgcttgtaaaaccatcaaacctgttagccattttaccaacacccagttatggacataacaaacgagtattaaggttcctatcccaaaaccaaacaacaatgaaacgagtaaaacggatatgtacccaagataaccaaccataagggatacaccccacacagtattttctcttcccttgttgtacggactaatatcatctcccgcctacaactcaaatacaaaaacaacagagcagccaagataagcttactacaaactaatagagagatctctttagaaagattgtgtttttaccggaaaaagaataaacacagagcagccaagagtcacgagaaaggccactagataatcaaatcccctatactttttctgcataatgagagttccccaaacctgtaaaaaacatcacatagattagaagagtgttgataaactcacatgtacaaaaaagtctcctcctttacataaaaactaaataacttaccattacaggtatcatcttggcacatttagccaaagtttggactgggaaactcacatacttgagggcctcatattggcatgttgtggttaagatgttagttactgatataagacaatacttataaaccggagctacaggatccaaaactttcttgcttgcctacgaattacacaaatcaagcttctttaagtgtattgagataagtatgaatataaactacaagacaagatttgataagtgttaccagtaaagcagcagcagaaacagctgatgtagtgagacgattacagaaaacaagaaacaaagagtgcttaaagtactcttttttcaatccataaggtactctcatgatcttttcctgcaattacaataacatattctaaaaacccagatcgtttcttcgatcaattttgaacaatgagagacgaattcgaaggtaaaacaaaaggaacccagaaaaggagagacctgaagaagaccatagatgacgagagtgagcatgatcccagagattgcgaaaacagctttccatagcttcttcttcttctccttggcttcgtttacagaatctggctcagccatttttctccattaacgatccgcttctctctctccatcgccgagacaagaaacgaaacaactaaccaaaacattcaaccagtcccacccgaaccgaaccgaaccggaattaaaaccactggttatcaaattttgtttataccgtaggcctttcggcccaatatgtatatttagaacttaacgacgtcgtataacttcttctttcatccaaaactcgccagtcgtcaatggctcctcggtttactacattaaagcatttacaatctaattttcggtttacactttaaccggaatttcagtaaaagaatgtttttggattaacgatactctatgtgagtccaatattatagacaggttattttcttaaaactctttacccattttatttcattatcctttagttactgtaattgcttactagttactatgtataagtattgagtttgagtataacagatacatgaataaagatcaaaacaagctaggtctaccgaaagatttaaaaaagaacaaaaccatagctagtttgacatttgtttggttaccaaatccgtgtgttgacgactacaaatagtttatgttgccatttagccaagattttttgtatggctatgtggtggcgaattcatgtctaagaccatctccattccacattttatgagaagggtgaaagtaagagcaagacggctactttaggtaatgttttgagtgaactttgctttgtattatttcacttggtctttaagttacaacattagttccctttatagctagacaatactagggtttcaatgattgtaaactgacagctgtctctgtcttatcaagcttcgcaggtcaccaaacaaccaaatctgttctttgtgttgattggctccgtacagacgttcttcttcttcgtcttcactctgtttttgttttcttgcacaggtggtggtcttgtctgttgagaagaggaagaagacttgttgggcttcactgttgtgttggttgtgttgtcattgggcctgtttggtgagtggcccaataacccttttcctttgttaagctgagcgacgtcgttctctttctttgactcttcagctgaacttgagctctgattcgatctcatttcagatcttggagctgttgatggcggagcagtggagctcttgctaatatccccccgcaaacccggtgtaggtggctcaactacaccgagtttgtacctgagtgaagtaaacgcattgaacggaagcaatttggtgaagatgtctgcggtctgctcatgtccaggtatgtgtctcacttccagcaatccaagagccactctttctctgacgtagtgatagtggttctcaaagtgtttggtccttttgtggaacgccggatttactgttaggtagactgcggagagattgtcacaatagagggttggagctttgagaagaggaactcgcagctccttcataattgagctgagccaggtgatttcagaggctgcttcagatagcgttctgtattcggcttcagttgagctcttcgatacagagttctgcttgtgagacgaccaagagatgatgttgagtcccaaatacgtgcagtaaccaccagttgaacgtcttgtttcaggacaaccagaccaatcactatcactctaagctcgtagtgtacaatctgactgctttcgaaagtttattcccatagtcattgtacctttaacatacctcaatatttttttcagaagtaagaagtccagagttgttggcgcatgcatcttctgacagacataattcactgcaaactgaatgtcaggtctagtaagtgttagatattgtaacttaccagcaagactgcgaaagtatattggattctcaaaggtatcctgattctgtctcctttgtttgtttagttgaagaggcagaggagttggcattggggcacaatcactcattgaagcagcaatcagtaagtcttctgcatacttttgttgtgataagaaaagtccctctgaatgaaattgagcttgaattcccaagaaatagtgcatttgaccgaagtctttcatcttgaaccttttgtttagttctgcaagcaataaggcaagtgaatctgagctgttacagtgatcaacatatcgtcaacatacaggaggagcggaatgatatcctttcctctgctgaagagaaagagggacgggtctggaatactgcaatgaaatccaaactccaagaggtatgtgctgaacttgtcaaaccaggctctaggtgactgttttaaaccatacagtaacttgtgtagcttacagacatgatctggtttgtctggatctacaaaacctgcaggttgagccatatagactgtttcagttagatcaccatggaggaagacattttgtacatccatctgtttgatgtcccactccattatggttgcaagatgcagaactcccctcactgttgctgttctcaccactggactgtaagtctcgagatagtctatgccttcagcttgattaaatccctgagccactaaccttgctttcagcttttgtagtgatctgtcagcatttaacttggttcgaaagatccatttgctgcctaaaacatgcatatctggagtgtaaggaaccagagaccatgtttcagcctctttacagttccccatctcttctcccatagcacctgtccatccagggtctttaagagctgcagctacagtctttggttccgggtaagacactttgtgtgtcagtaaagcatatcttggatttggctttctgattccactcttttgtcttatggtcatagggtgtgtagacttgacttctgcagattcttgtgcagactcttggacaggtatctgactagctaagatgtcatcttgtctctcattttctgatcttgttgtggactgttctgtgatttcttttgtagcctgacttgatgtttctattgagataccaggactgtgagaagaagaagagaagctgttgcctataggaacaggatcggagcctgccgtacacccagaacttctttctccttccacagcaggtacaacaatggagattggtgtctgtagaatgattggagttttcacaggtagaggaggaaattcttcttctgaaaatagactatcatcttgttttggtggagctttgttaacattgttgattccttttgtccaagctagcattagtggagtgagacttcctgtcttaggtcttgagtgagactgagcaaaaggaaagactgtttcatcaaatataacatggcgactgatgtagcctcttcgagttgatggtaagtaacatctgtagcctttgtacttctcgttataccctagaaacacacacttgagtgatctaggatcaaacttgttcgaagcataatctctcaatgttggataacaggcacaaccaaaggttctgagagctgagtagtctggtggcttgccatgcaatttctcatagggactgcacttcatatccaaagcagttgtgggaagaagattgattaagaagtttgcagtgtagaaagcttcaacccaaaacttctgaggacaggtactctgaaacatcactgagagaccaagcttaatgatatgtctgtgtttcctctcagctaacccattatgttgcgatgtgtagggacaggagatgagctgtttgatcccacattattgtaggtgatctgtcagctttctgtttgtgaactctcctcctccatcacactgaaatgtaccaatctttgtttggtattgattttcaaccaaagcttggaacacagaaaaggtatgagcaaaatctgatttgagctttaatgggtagaaccagcaaaatctagagtagttatcaatgaacactacataataactgaatccttgatttgatttaacaggtgaaggaccccagagatcacagtgtattctctctagaggtctagtagctacgaaagtagaagcagaaaagggaagtctaacacttttcccaagctggcaagattcacacaccatcttggtactcttattcccgatactgatagctttttttggagataacacatggagaacttgtgaatgaggatgccccaacctttgatgccatatatcttcactcgccccttactgtgctttccctttgtcaacaatttccttgttgccttatcatatattcgaacatcatcacagtcaaattgaaatacgcagggatagtcattggtgagcttggaaactgacaacaagggtttagaaatgtcaggacacacaagaacatcatttaaaggtaagttacctgaagtagaaggaagactgcctgatccggtgtgagttatgggaaggaaattgccatttccaaccatcactgagtcacttccttcatacaactgtgtctgtgtgagcttgtgaggagcattggtgatgtgagcagtggagccagagtcaccaacccattcactgccagattgatctgtgacatcagttatcctcaatgctgcaagctgctggcagatcttcatcctggtacctgttattgaacctgtgccagcacttcagagcatgatgaccaggtttgccacaaatctgacaaacaattctttctccattagagttctgagatatttgctgatgaaatcctctaccacgggttgagaatgaatccttgcttttgccactgccaaatcttgagttgcctttccctctgttgttgttgttgtagtaaccagaagagtcagatcttgaagtgctgaaagccatgtgtggtgaggtttcagtgtctggaccatagctgtttagtctgtcaacaaagcctgacaaccttggaatcacactctcaaacgttggtggtggctgagtatccatagaaccctctacagatgtcttgatgggcttatactctcgacctaacccgtgaagagcagcaaaaatcttcatttgttcactaacaggactacctatggaagctaactgttcacagaccctctttatttccttaagataagtttccatgggtttatcctgtttatctatggtttgtagctttctctgtagctcaaaaaggcgtgatgatgataccttattgcagtgttgagccaaagcattccagacttgataggaggtggcacagttgacaacttcccgcatgatatcttcattcagagatcccaacagccaagctcggactacttggtcagatctgttccaagtatgatactctggatttggtacctcagtagtaagaccatcaatgttgttgaatggagttgttgcaggaggaggttttagtgacccattgacaaagcctagaaggttttggcctggcagaaaagactcaaactatgtcttccaaagagaatagttttgctcattgagcttaaccgtgacacactttgagatgtgaagaacatgagcagaatagagttggatagattgatccatcatagaccgctgtgctctgataccatgaaagtaagagcaagacggctactttaggtaatgttttgagtgaactttgctttgtattatttcacttggtctttaggttacaacattagttcccttttatagctagacaatactagggtttcaatgattgtaaactgacagctgtctctatcttatcaagcttcgcaggtcaccaaacaaccaaatctgttctttctgttgattggctccatacagacgctcctcttctctgtcttcactctggttttgttttcttgcacaggtggtggtcttgtctgttgagaagaggaagaagacttgttgggcttcgctgttgtgttggttgtgttgtcattgggcctgtttggtgagtggcccaataacccttttcctttgttaagctgagcgacgtcgttctctttctttgactcttcagctgaacttgagctctgattcgatctcatttcagatattggagctgttgatggcggagcagtgaaactcttgctaataaagggtctttccaccattacaatatattatgtaaaaataaaaatagtattttattatttgtgtgtctttaaatttgagacacaaagtcttcaatgtcttagtaaaaacatttttaagaataatgtctttaatttaatgagcatttacatttatttaacgatattttgtaactttagttatttaaagacactctccaaaaacatgcaatggagatgctctaactatcttggccataaccgtagctaaatcatagatttttgtaagttatgtagcatgctatggtttgcaaatatatttttataagctttcatagaattagactttacatttggtcaagtacaagaaagctgaaagcctacgcaactaactaacaaaataagaccagcttatatatttttaagttaaattttggattcaaattcgatattgttgcaagaatttatatttgttcagcctcttttgtgtctagatatacatattttaaaagacacttcaaataggatgttatatataatatacatgatatatggtgcccgctagggaagctagtggatctagtgggttcacgtggaattattgatatgggaatatcaacacatgcttctgttgctgaagcgttggccttgcattgaagacaaaatcatcgagtcgatactcttacccaaatagagaatcagcttgagttagttcgaaggaatcaaattggggaggaagaccgttcgctttggagagctaaggatgatagcttcaagagcaaattctcttcgaaacaaacatggcatcagctaagagagaccacccgagctgcgaatggaacaaaggagtttagttctttctctcaactccacattatttcttcttaacttggttacgatattaagaataaaaacgaaatgaataggcctacttgattaaattattggttgaaaccaatatgaggataagcaagatggcagtgaggcaaacggagttttgaatatttgccatactttttttaatctttcatacacttcaaagatataaaaccttttcttctttattgttctttgtcacacttttataatcaaaagacgaggttgtatttatatatgaattctagttgactttttgcctatccaataaactcctagccacgttaattatgcatgacgacatatgtctatccaaattatttgctaaaattaaattacgaagtccaaaagtttaatttcgctttgcaaatttaactacatattttaatctcgagaaatataaaaccattcttattagcaggaaattagtggtaaaatatgtgtaatgttttgtacttttacgataaaatgtttttagcttaaacacgcaattgttgaagaaggcgaactagttacccgagatcatatttggaagaacttgatgaagtatgatcacgatcgagataactcaacatttatgactacgcttcagcaattgttaatgccaataggcctcacgagtacatgttaatctccatctattaatctaattcatcaacaaagtatataatttgttgataaataattaagtatatttatcgttatatatataaccactatgtggccatggttgttggaatgttgaaactatattcagatttattaatgaccaaatgaagccggttggtttattattaagttaaaaaagacttaaaaatcttgtacttaaaaacaatttgtgtcgacatagtaacatagtaacataaagaaaaaaaaagaaaaaaaaagaagaggatgcatgtctctaattagttagatgtagaaatatagaaattttaaaaaatgaaataatggatttaacaataataaagtcagcaaaatattactataaacagatttcaaacgtaatgatttaggtctcattcgatggaaactctcatcaaaaggaaaaaaatcagatttaaattgagtgtacaaacaaagaaaaaaaaacatggcgatgataatgaatccatgttggttacaaacaatcattcataaggaaaaatatatagatttacaatacaacaaaaccctttatcaaaaatgaagaagctattttacaataaaatcaaagagttcatgtattatcattcgggtagccaaaaatgtaagtgtatttttctaaaagactttagttagttgatgtatcttaaaataatgtttcccttttcaaattgtcaacttataacttcaccaatgtcccatctttaaaaaagctccataacacgaccaattcacataaacgactcaaaagaaagtctttatttatttaggggaaaccttttattattttttgtttgacgtcaagaaagtctttataaaagctgaaactattgcttaaatatcagacacaaaaaggcagttttgagaatatttcccaagacggagtaaaacgtggttattgtgaaggactcatttttcccatctggtttatcatggaaaaagatgcaatcaaagaagaagagatcattagcaatgatttattatggaaaaaagctgatatcaaagaggtactttctttggcttctattttcggtttgcgataatccatgaattttagaggggttgacttgtttagtcttggaggtgtttcttgattagtaattttttgtgatgtatgatgaattatgacggtattaatgcatgattcatagatagttcttttgagttttgatgatatatatttgttgagccgtgaatgatcaaattatatgaacacatcctattaatcttcgagtcatttttctgaaatggaccaatttgtaagcaagttgtgattgttagtagaaaaaagtaactaatgtcaatgactcttattgagtatttgactttttcttattttatttatttttcttcataattttccatttgaatacaggaatctgatatatccgaaggtacgcaaaggatgaactacaacaattgtgtcaaaattgaaaactatatcatataatttttctttcttcataaaagctctacaccaacattattattattattatttacaaaaaataagaattattgttccaaatattcgaaatcttagacatacattattaatatattttttagatcatcaaaatgttcaaacgtaaacataccatggcttttaattttttcttaatatttcttgctactagaaataataagttgatatatcaaaaatgtctaaatacgaattaaaagtaacttctaaagggtcacaaaaacacgagaagctcaagaccgctcttctaccatattggagagaacgtcctccaacaacttacagcgtcacgttcgagtcttttgggaaaatgatggagctagtaaacaatggatattacgagtcccttcctttcactgtcgatggaatcaactggtacgtcgttttcgttaaagaccattacaacattaatttgttacctagcttatatatgtttctaattgtaacccttattctttttcttaaattaacgttttaaaaggacgttcaaaatctaccctaacggaaactcggacaccacaagaggacttatttatctttatgtaaaaattgatgactcaagcatcaccgacccaccattagatgtgtatgcggagatcaagttcttcgtctacaactatggcattagcgagtattatacataccaaggtacttcaacttagaggattgattcattggtatgtaatgtaagacgaatgtgtattttcattggttgttgaagaatttacatagcgatttatggctccaagattaacgtcgttttcctttgttgttgtagaagtcgagccggtaaagtttgatagtgtacaacaggagtggggaaggtggattggtctttctacggcatcgttttccacggcgacaatagatccatacaaattcattaccgatggagataatgtgtgtttggcatagatgtcttcgttgctcaacgcaacaaatcagaagttttctcctatgatgaaaacataagcaaccctgttttcacttggagcctccccaatttctctaccctcactctcgactcttacacatccgacccgttttcttctggagacagaaactggtgactctctctcactctctacatgtatgggcacaaatacattttgttatatatctatgtgttagtaatttatatgatggttttaattagggttttgaaagtatatccaaatggagatggtgttggaaaggataattctttgtcactctacttgttgagtgagtctaatgaaaagaattacgttcgagccacactacgagttctaaaccaaatcggatccgacaatgtggagaagccaggtgagtggtttagtatgttctttgatatactcgatcatttaaagagaggaagaaaacttttagtttgatatttaataacaaaagaaatatcattatacaagtatatatcaaaattaaattattatttgtttgaagtttttcttttgtggctcttttgttttcttatggtaagttgagggatggcctaatgcagcagaaaatggatggggttaccaggagtttatacctctcgcagatcttcaagatgcaaccaaaggttttgttgtggacgatttgcttgaagttgaagttgagatcatggccatctctaaacaaactccaattaattagggcttgtgagccctaaaagaacctacgaccactttcgttttttctatttgtgtttttgtttacaatgtcatttgttggaggttcaaacgggagatctctttggaaaaacttgagacgttttatcaatggatcgtcaaaggcttcatgcatcatctactcgaagccatgcgagaccctctacctctactgtttctatatatttcaaaataagaaaggtttccataaaactctttttccacaatttactatgttgtttgtactctatgtctctccaaaattataaagaatattaaaaaatacttttacgtacccatttatttcattatccctgatcgttatataataaatctgatatagtttttaatattcaacgcgactacacaatttgcttagaaatgaacttatgttaaagtgttaaactatagtgactgcttactatgtatgagtctaagagatacatgaaaaaagatcaaaactagctagatctaccgagagattaaaaagaaaacaatagcttgactttttttttgttggcgaatccgtatgtttgaggaaacaggagattaatcatcgtttataatatgacgtatatattggttaatgtcaagttaaatgtcttatctgacctctactcaatcatctagtttagtaagtttgtaaatactgcttaatatatttctagcaaaagacttttaacttttggaaaatcgtaatcttgtggaagttgtattctcagtatgcctttggaacttttttcaaaacccctcatctataacgttaaaaggaaaaaaagaagactaacatatgtctaacattgtcactttgacccactcccctcgtggacgtggccaaaatatctcaccaacttcatatatcctaaccaaacatatcttactacaatttttttttttaatctattactagatgtataccaccacctgcaaacgggaacctaccaccatccatctcctatatatatataatctattatgtacgcgcactacatcttccttcctaatccatacatgcacgcacccatatatataaatgactcatgcatgaatgatgaatcatatcataatagtaatcattcacaaatccaaaccaaaaatacctaaacttactctcaaatcaaatatatatatgcttctttcaaaatgttctttcaactattctcacttctcttcttaactctatttgttacttccgttacttccagccgtttcatctacgactttgatcctgtcccatcatctgccaccacgccacttgaaactaacccagttggcttcagcggagccgtcatcaaagtcggggcaaatatggccgtcagtggaagtcagattccgttagctagccttttgatacgtaatggcgccattttgaccagtaacaaagacgaagtccctctcattcaccatcaccatatcagtggtacaatatccaacataatcaaatgatcagctcgttggtacaactagtcaacaaaaccataatttttaaggaattgtttttctcaatacatgcaacgttttcttctagagtgaattcattatcgacttggaagattgaacatgtatcatcaagagttgtatctgtaatcatatcagttgacagtttgaatggtcttattgaactaaggggtgttaacaaagccaaagcaagtagatttatgctccaatgagcttattaagatagaaataaactagggacttgaatagctcatgcagagctttattgtgcaaagaagtaaagagaggaagaacaacttatcaaaagattaaagcgttgacaaaaatataaaatagatttaagcttcggcccattagttcccttcttgggattaatggtttatttatcggcccatttagtgatttcagcccattaatggtttcattcctctctcatttttttctttctgtgttcgagcttcttccatggcgaaactagcagaagagatgaatcctgaaggttcacgataccagcttcttctctcatgtccttctggcctctctccgtctcaggtttctctccaatcgaatctatacaatgtgacttagtatccttaatcatccgatattgttgtttcgatgctaaaaaaggtctcagtggatttctcgaaatcgcatgatcggattcctcgtcaagatcctggtctagaagattctatttcacaggtgagaaccgaaaatggagtatctagaattcaataatgcttgttgatcgaaatttgaaaaaaaaaactcaatctcaatgacgaagatccatttcgaaactctaatcaatttaggtttgattacttttgaaaatttaggtttgggagcagagatcacagggaaattcatcattgttcaatggccaaaaatttagggtatgtatctattgttttaccaaacgttcatgttatgtttcgataagcttactcttagttaaaattttcagtatggaggatattgtttagatgatgatgatggtagtaccaatgaagtgccacacgtttgtcttcgtcttggcctgacagattacaggtttctcatttatctccttcacaggattatgcttctagtttattgatttctggtttacattgtatggtttgatggagagaattattaatcatggacatggtttccaaggacttttgtaggaacgaatttgagttctctgtgggagaagttccttgttacatcagaaggtatatcctctgaggaatttagttatcattgcctctagttttgtgttggggaactggagagcttccaggtggtttgatcaggtttcttatcgttatagttttgttctctcacagatgactctgttagatgtcgacacacctcaagtccattgggaaatggtgcagttatcgaaacttctgataagaagattattgtgttacgtcggagtaataatgttggggaatttccaggacactatgtattccctgggggccatccagaggtatttacatgaagcatccttatttacattaagcatcaccatattgtgtctgttactaactctttagcattgttgttgatgactttaaacattgcagccaacagcagtaggtattgattatcatcagcttgaaaacaatgttcaaaccggtgaggttttaaacaagaaggtaactcaagaaatgtttgatagcattatctgtgaagttgtcgaagaaactggaataccagcatcatcacttgtaagccggaatgagttcttttggtctctcacttaggcgtcccgagagatatctgattgatcttttatacaattacagagctcgcctctcttcatcggtatatctcgaagggagttgaatgtaagaccagctatgtttttctacctcaagtgtagtcatcattcagatgacattcaaagattatactctagcgctgaagatgggttcgagtcaacacagctccacactgtctcattggttagttctctaatccatcaaggaagaaaaaaccatcgactgcatgttttttactctctaaatgttatgatctcatcacgaatgtaactgtagatgtgctttaaataatcgatcaggatgagctgaagatgatgacatcgagaatgccaggttgccatcatggcggattcgctctctacgaactgatgcttcaacgtctcaagaacactaaggaaacgtctttaatagcaacgtaagaggaagatacttaaactttacacctagttgtgaattattgtttgctaatgatcatgtcattttcgagtaacttttattagattaaccgtattaatttgtaaaatccatgataatgagtaactatcatgtaattcagggatagaaagctctaagttatgttggataacaggttcatttgttcacatatgtaaatggtaagggtttcgtttctgtagaacctacaacatggggaatatgaaagcttacaaatctcacgcaaataccattatgattcatgcgtttaccctgttttggatgaaaattcctctggctttgttggaatatactcctaaaaagtgcagataaaatagccgtagcagcaccaccattctcaaaaccgatgattcagaactatatagataatgcagtgattgagaaccaagttctgtaaaacattctcagacaaatggaacgtaagaatacaatagatcactgcatggaattctattcaagaaagggagagttgtctttggaaagactaaaaaagccaaggccgccattttctgttctctaagcgtgtttatggtaataaccaggaatcacaaactgaagccacaaaaacagcatccagacatggttaaactacatgcatttaaagataccaatctgcccggttttaggcatccatatgacttcaaaacaagccttgtcaacaatttcattcttcgtagttcctgctttagactgcagctagaacttttgtatcccctgaaataagaacgagaaccatacccattagaaagttccatatggacagtccgctgaaccctgcaatcaaacctatgctcagttttttttgtcttctgataacttgaacattcaaccttcggccttccacagagatactgcaggatgataaatctttaacagatgatggacctctgtcgccactctgtccttcctgcagacttagcagatatgtatattttatagatttagttataactacagctatcccgaaactaacatttttggattcattgtgaatcaggatgtatatcatcatatggaagggacaacagagttgaagcacagcttaaaaaatagaaacaatcttctgaggagtcagaggatgcacttccaatagctgttcttggtcaggccaaatttgttgaacactacacagagctacaagagaagtacaatgagttaggcttaaaccataaagcaacggtggaatgaacactagagttgaagaaggcagttagtagcaaaggctggtaaaatgggtcctggatctgctaactcactttctttctactgagctctaagcattagaaagaaggagaacgtaagcctcaagattgaataccactggagttcttgttagactcagagactctgctgaggtaacacaaatttttcattttctaatcgatagaccattggtgtgtgagtgagtgactaagcgtggcattttttttcagagttttgggctcccactatgaacttattctgttccaggagaatatgttcatagtgaagacacaagttaaatgatttcacacgagaagttaaaggaaaaaatatggaaaagctaaaggagacacaagttggaagtgataacaatcaaacataatctaaaacaaaacacattgccaggatctgcattacttttactatgaacatattcggttgcaggaaaagttcaatgaagtagaagaagaaaacgaaaagctaaagaggagacagaatcaaacagaatctaaagcaaaacccattgcagaatccgcatttacagtcacagcatcagaggaactaggctattgaggaagggaaaaatataccaaagtgaatgacttattgcagaagtttagaacctgttgagttcgctagaatcttaaaaccctccctcgtgaaacagctagaaggttgccttctttgtcgaaccgcaatcccaccttcggcatctgttgtactcagaagatcgacgctgtccatatgccaaaacttgatcagcccgtcttgactaggatgggtttttttgaagactgaaactgaaccacgcctcccagtttattagtcagcccactataaattctcttgactattcctttcttttctgtgatctgcatgaggggtgagtctctcagtttactggttccacaacaaaacaacctgccaaagaaaatgcataatagttatagtgaagtttgttgaaagagtttgaagtaggaaatcttataaatcgcaactataacctgttcccatcagcattgtagagcaatgttgtacatcagccacttggacatttctagttttcttttgaacactttgtatcatataataccacgcccttatgtttccattggtatcagttgaacgaatgaactgaaatcaagagaagaatattaattttgactcatccaagaagcactaaactatgagtacaattctacataccttaaaaaatttctctttcatgtagacaattgaatatacattatacaggagcttcatgaccatgaaaagtgtaataaacccaaccctcaagatccccatacctgttttacaccaaatagttaaacaactgacaagttaacattaggataaccaaaacaactttaggttcgtgtctcaccttgattagtttgtcatctccacaactaactatacttggttgtttttgtggggatgcgaaaaagctatgttagttacagaacctatatgagcttcaatctacaggaaatgattgtataagttatatggaataaaaatgtcaattttttatggaaaagatgatcgtttaaggatcaagcgagccacctcaagatgccggagaaagtcatggttatataaagggaaagatgatcctctaactcatctatttttgcaactttaccctccaccttcaacaaatgcaaattaatactatgaagtctaaaataatatttattgtaaccctttttcgcccttcttttgctaccatcaattttgtaaaatattgacatatattatgttaaatcaaagctctcttgacgaagtgttcaactctaccttcacaattttaaatatctaatatatgtgaacgtaaaaacgtctacaatatacgtataagggtcatattgcgtattattttagacttcaaaagattaatctgcatttgttggagatggagggtaaagttgcaaaacatagatgagttagaaacattttttttgcacaaaccccttatataaatgaatcaaactcttattaaatgaaacccctacaaaaatatatttaaaatgagagagaagacatgaagtactactaattaaaaacacacatagcataaaggattaccaatgaatctgccatccagactccatagaacacaagtaatagatgttgttatttcttcagtcaatagcaaaaatccacttagttgaaagcagagattaagggcaaaaataacaagtcataaatagatgttgttatttcttcagtcacaccttgtatatctccttctagaagactctgatctctttaggtgaaacgcaccgtcttggaccatcacgtgcactcatgtgacataagacttgagacttgagaccctctgcttccaatagaggcttcttcttaagtttctttcaagttggctcacactcaataaatctccaccttgagacaatccttgaaagactctttatgacttgtgagatgtccataagagagggaaagatgaaccttaagctttggtgaaagtttagacatctcccatggcatgaatgacttcgaagccacttctttaaggacagaaaagtctcacaatgtgactacaatgcttgcagaatcgactgatggaatatagataaacaaaagatcaaatgaccaaattatgttaagagaaactaagctcaggattttgtaagttgtgaagtttacacaccaagaagtaatgcttagaattcttcctaaattttgtaaaatcctttctgaattctatttttttacgagaaatttttgacgaaaattgttttagcgagaaaatattgtctgaaatttttggtgatgaatttatgtattatttgaatgttatttttgtccaaaaaacttttgagtgctatttttgtccaaaaaacttgaaatgttgctatttgtgggaatttcctataaactaacaatcttttgtttttctttcttttcttgcagtcactaaaaataataatttaattctcttcagttaaaacccaaaaaacaaaaaaaaaactagaaaagcttttctcctatatgtaatcgttttcttgaaaatgtattgtgatccatgtaaaattatttaattctttcaacataatacatattttgtttgatatgttctctcaaaaattaatcatattttttcttatgtgtttaggaataaaattgtgaaatgaaatttacttttctgattttataattggcctattatacgagaagcaacacaaagtggcagcaaagtcatcatttagtattggaggtcgggttttgatccctttcaaaaatcgcctcctttctagaaatgttcaagccttgctacgtactaaaaatattcaaaactgacttagaaggtaaaaaagaatagactattttttatacttatttttttttatttattgatttatatctttaaattgtacgtgacattgttcaagccttactatgttctagaaactgaccacgtggttttgcagagttagaaggtaaaaaagaatagtctattttttatacttaatttttttatttattggtttatatatttaaattgtaggtgacattgaagaatactttaatgatagaattgaaggtattacatcgatagcaagtagttgtggagtatgagaagaagttgtttagatttttttcactactttttgtatttctgttttaaattagaaactttgatgaaactctgttttgtataatcgtttaaattattaatgtttgagtggatttgggtttacaaatttgttagaaacttggatgaaaatagagaattaaaatataattaaggataacaaataaagttgtttatacaaaatataaatacatgattatatgtaaaattcataatattagtatatatgatactagtaaatacatatgacactgaatataatttaaatatatctatatatagaaacagaaaataaatacaattgaaaatatatctctatataattcggatacccacatgtagttctggaacacatgtgtttttctgagttttatccacaagtcccaaaactttcggaatttttgaatttgagttttttatgggcgggctcaatttaggttcggactgggcggttttcttttatccacggcaacatttcaggacagtattatatctcaactattcgatgagtttagtttggttcggttcggttcttttcacttcagttccagttcagttgtttcggttccgtaaatttgtccgggccttcctatgattattgaaccagctttaatccaatttgcaactatcaggagtaatggagtattattgatcagaaaggggccaatttgttttcattactactttccccaatattgttgaagcttgttgtgcttatcgttcatctcatatgttggataattgaaataaatagctcatctgctcttgttattagaaattatactagattttctagtaaattacagtataatccatgaacatgttctttataattgactcgaatctgatccccacgggctgaaaaattgtcaagacaagtgatgaatcaatagctctgaccatggctaccatttgtattaaagatacgaggttcatctgttcacatatctaatgatactagataataggccactagcttttgatttttgattagacacatagacgacaaggattctatcaaagctacaacaggagtaatatgaaaccgtttcaaaatctcatgcaaaccattatgaatttgtgcttttacccagccttggatgaactttgttggaagttctttctaaaaaatgcagataaactagccgtagcagcacggccgttctctacacacaggaaataatcgtccactgaaacaaaaaggcaagaattcagaattatagatgatgcagtgattgagagaaacaagttctttaaaacatgtcttacacaaatgaaatgtatgagcataatacaccatagtgaattctattcaagaaaggaaagttgatcagtacctgacattactccatgtgtaattgatgtgatgatcccatgctctactggctcgccttccgctactgatgacccttccggaagaacagagagagttgtatttggaaagactaaataagcaaaggccgtcattttctgtccattgcagtttcaagtaagtataaccaacacgcaaaagaaaatataacaatggacaacaaggcttttaaataaccttttcttcaagcttgtttggatcgagtacgagatatccattctcagccaggcaacagcatatagcaactgaaaaaacaaaaagctgatgaaacagtaagaagtaacacacaaagtcaattagagaagagtgtaaatgtaccagccagatgcttcatagggattcctgcatcgacaagcgctgcacatgctgcatttatcgcacatggtagaagctaaacagaattgaatcaaggaaaaagcagcaaaaactgtcttctaaagtaatgcaccaattattccactaaaacatattcacactcccagctcatgggactacaaactttcactgctaaaaactctaaaaatactaaaaccaagattgcttatactggattatatgtgtttgacacagtatcagtaaatgtttaccaaaaggcaaggatcataaaaaggatacagaaccatcatcatgcacaacctacacaggaatcaaagaatgaaaagttcagatacaactcaagttgataaatcgatatatacaacaatgaaatagctactcacctgaattatcactgaggtggtggtatttggattaacagtcaaaacacaaatactctgtatcgtccttttcaatatcatctcatactccttttcaacttttcctatcattatgcaaagtaaaagtcagtcagaatctaaaaaccaagaatcacctctaccgcatactcaagcaacaaaacaacatccagacatgattaaactaaatgcatttacgaaccaatctgcccggatttaggcttccatatgacttcaaaacaagccttctcagcattttcgttctttttcgttcctgctttaggtccataaaccgcagctagaacttttgtatcccctgaaaatataaacaagaagcatacccattagaaagtgctgatatatgtaatcaaacaaacaaaaaacatggagattaaaacaagtaccttgtgaccaactagcagagccatgaggacgatgaaggatattacgggaacaagcaagaggtctcagctgatttggtgttcttccatcttctctatcaatctccattgctacaatacttcttcacacaaaagggtttcacaaagtaagcatcttttgtcacaaaatcaaattctcagattctataactgtgaattgttaccactgaaaacaaaatttgaactgcttctagctcaacagtaggtgtattttaatggttctgaccaacatccgagtagtttttttgttaattgagacaaaaaaatcgttctttcaattctacaatactcgttatctagcacataaaagacgatgtatgaacaaaaggacacacgaatcaacacagagctagactaagaacctaattttgaggaagctagaagcagagacgattccgtatcaaacaagaagactaacgaaagagagaatacacagctacggaactgaaagctggaagaacaactgaaaccaccagaggagagaaactcgaagaattagggtttatttgtttcaaaaccctcaatttcaaatcaattagagtataccgaaaacaaaccggttaatccggttattcaaacattggtttaactttaaccagtaaactcaattgaggaaagatacttaatacggtgtttgaacataatcaatcttccggagaagaatttgtgtataactgacggaaaaaatccgacgcatcgacgatatcaaattttgatctgagattcaaattccggtgataacgcgaagaggaagatggatgatgaattgttggaattgcagcgtcagttcgagttcgctcaacaggtgaagtcaagcgtgagattgtcggatcgaaatgttgtcgaattggttcagaagcttcaggagcttggcgttattgacttcgatctgcttcataccgtcaccggaaaagaatacatcactcaggtactgattctatttcgtttccggtgtgaatttagactccagaagaatcatcactgggtttcgcatagaattctggtatcatgatgtgagtaatgtgttaatggagtgaaaaattgctaactcttcttgttgcatgaggaatttaatcggaaaaaatgaagttaagttgtttgatcttgatttgtttcaggagcaattgaggaatgaaattactcgtgagatcagtaaattgggacgtgtctctgttattgatctggcagatacgattggggttgatttgtatcatgtggagaagcaagcacaagatgtggtgttgaatgatccagggttaatgttagttcagggagaaataatatcacaaagttattgggattcgattgcagaagaaattaatgagaggcttcaagagtgtagccaaattgctgtggctgaacttgctggtcagttacaggttggctctgagttggtgcaatcggttttagagcctcgacttggaactttggtaattgtgcttctcctcttgagctttccagattgtgtttaagtgaatgtgaacttttatatttatggatttttttttcaatcttttttaggtgaaagctaggctagaaggtggacagttatatacacctgcttatgtagaacgtgtgaccgctatggttcgaggtgcttccaggggtatatttgttccttccaatttgtcggcattgtgggcaccattgcaacagttggtacaagaaacgaatggagccagtggagttgctgttgagaattcatttttccagtctatatttaaccgactgttgaaggaagaggagatgcttggatcactacgtgctggaacccattggactcctagtgtatgtcataaaattcttatcttttgggtttctgccacgaatggatttaccactctattaatttacgacagtcttcaaaatttcatgagtgcactcttgtctatgcttgatgtttcccatgtttaccattcattagagtaacttgtttgattttggtggcaggcttttgcaactgctcaaaaggaatgcgtagactcttctttttcacaggtttggtcatcattttatctgaaatgtctttagtccgtttatttatcagttggttgtggaaaagacctatattttgaactttatcagactgcagttttagcatgttctttaaattaatctttctttaagaaatggtggatcaacggatttatggttgttctgttttcctgcagaattcctacatctcctatgagagcatgcagaagcttgggatttctcaagctgtgcagttcttacaggtattgtatcatgttaatttagcgtcatttatctgtagtttgtgaaatctaagttatggaataatagccagaatgtgtgttatgttggctctttcactttcttctcattataagttgtgttttgtgacatgtatagtctagatacccagatggcacacctttagctgctgtatttattcattcctcaatgattgagatgctggattctgcaactgaggatgctattgaacaaaacagttggtgagattaaatttctcgtactctttctccctccgtctatggtgtttgttttctttcatgttatgctgcctataatactagattcgttgttactgaaacacttgatactgtgttcaggatcgattccctctctgtattaccttcatcgttcacgtcacaggatgcaaacaagatgttgcttctttgtccctctgtccaatcagctctcaaggtgggattttgatcaaatttgataactagtcaacactcttttgcaataaatttctgaaatattttgcctttcaggctgagaaagcacttatcttgggcgaatcctatgtcctaagcagtggctttatcaaggtaaaaatatgaaatggagggtattattagtagcttgcttgcgagctgttgtctttcccacttggttttctccatctgaactatgccttagtttgacctacttatgtttagggaatatatgatcaaattgagaaagaggcagatgcttttagcatccaagcttctactgctactttgatacatccttcaagcaagtcgtcagagtcgacagaaagcatacctgccaatacagataaagggtcaaagaagaaaaaaggaaagtctgcaagcacgaaggcagctaccgttgaaactgttccagatgatgaagaggatgcccgtccaaaatctaagagaaaccagaagaaaggaagggattcatcttcatcacagaagttggattcaaaagcaggaggcaagaaagagtcagttaaggcgcaagaaagtaataacattattccgccagacgaatgggtgatgaaaaagatcgtcgactctgtacctgaatttgaagatgatggtacatctgagaactttttcctatgtatgtttaaaataagtatgtagctatgaattttgagcccatgtgacataaactacggggtttcttataggtacggagaacccagattcgattcttaagcatttagctgatcatatgaaaccgatgctcattaattcactgaaggagagaagaaagaaaatcttcacagaaaatgcagatagaatgaggcgcttgattgatgatctgcagaaaaagcttgatgaggttgacaccaactgcttcaactatagttgtatctttcgcttgactaccaatgtctttccactgtttaccactagcaccatcacatagtattttgtgaccttatttttcttggatttccttttggcagtctttcctaaatatgcagctgtacgaaaaagcgctagaccttttcgaagatgaccaatcaactgcagtaagtactttcagtcattttgcacgccatgtttactactcaaagaagctagtgtttaacactttcttttcttcttgtcctaggttgttttacataggcatctgctgagaacaacagcagctacaattgctgatacacttcttcatggcttggtacgtcaaaaattaagtggagtttctaaggccatcttcatattgatttaactaatcatgcttcgattttcaatacaggacatccacaacaaaatgaagaatggtactgaagttgaagaatccaaaacgcaagatctagtgttgcttgattcttctgagagaacagcccttgtaatgcaactttgattctaacttagtactttattgttgcacttttttaatatttaattgtgattagttctaggcaataattgactctcccatgtttcctttcttctggggcaggctaagaatctcaacggttcactttcaaaaaaggctcttgcactagttgaggcattggaaggaaaggttagattttcgttaatccatagagtttttttctttccgtacagttgttactgcctggcatgttaaaaagtagttagctgtttcttttttgttcttccatctcgattcctcttctcctgtggctgaccatgttgatatacagccaaaatatgggtatgcacatagccatatatagcttttttttttttggcaaaagccatatatagctatggagtcagaataaataaccctcttaaagggtggtgtggtttcactttggttgtacttgtgaatatataatatactaactgccattggtgggattatttttgtttcagcgtgtagacactttcatggtcaccttcagagacctggcagaagaaaggtattataattcgtatttttttgaggaatctcttaagcaagtctacttttctttcaccgggtttgaactgaatgttaactgtatttgtgcagtgggttagtcttgaagaagcttgacaaaaaactggaaaggacactcctacattcatatcgtaaggtatgtaccacaccatgtcggtgtttctataacgttatgatctctcatcactgctttttatcccttcaatgatgatgttatctatgcttgcaggatttgatatctcaagtttccaccgaatcagaccctattgcacttctcgctaaagttgtctccctcctttttattaaggtacatacatatccacgttcgtgtaactatattctgtgctcaaaattcagattaatttatggttggaaaattgtcgacagattcacaataaagctttacaagcccctggtagagccattgctgcggctatttcacacttgaaggtataacataacaacttaggagattcacaataaccgtatcatcttttctctcgagcattcctattttttcgggtgtctggtcactctgtattatatcttagttttctttttctgtggctaacacgtctattttaaaccatgtaggaaaaacttgatgaatctgcgtacaagactctgacagattaccaaacagcaactgtaactcttcttgctctaatgtcagcttcatccggcgaggttcatatccttctcttattttgtgggctacaaatgttcatttgaaatgaaaccaattaaatctgtagtgaatgatatcttaaaactattccatcaacatgaacaggaacatgattgctccgcagacagaatcttgaccaaacgggaacttctcgagagccagatgccattgcttagaaccctcgtccttggtgactcgcagccacaacaatcctaatccaacaaagtcaggtcggaaagtttctttagtgttctgctgacaagactgaggtcccttcacttaaaaacttattaggactaggagaaatgacacttcaaaacttttatattcaaaagattcgtatggttggctcgtaactatcaatggatcaaaacactcttttattacgattacttatattgatacaacgagattggtgattacaagaaaaagaagaaaggaaagtcgcaccatttatttcacactatcacatattactgtcttaagctttccaacttcagagttcctcttaaccagagatatcaacggacttgacctccggcttactctcctgaactttcggcaccgtaaccgacaacaccccattctccatactcgcctttacttcctccacctttgcattctctggcaaccgaaacctcctcatgaacttcccacttgaccgctccacacggtgccatgtgtcactcttctcttcattctcactgctcctctcaccgcttatctgaagtatgttaccatcttcaacctccaccttcacctcttccttcttaagcccaggcacgtccgccttgaacacatgcgcttcaggtgtctccctccagtccactttagcgtttgtgaacgctgccacgtccttggcaggtgcgtttgtcaacccgggcgtcaagaatccttcgaacggatcccatacgtctagtgaaaatgggtcgaacacgtttgttcttcggcctccaaaaaagctcggaactagagacatcgtttcgcttactctgtttgctctgttttgttttgttttgctagaactctcttcgaatgcaaacacttatgtgcgttggcgtatttatagggagaaatgatggtagagaagaggataagagatagaaagctctgcaagtttcttgaaatttcaggtttcttctttccgtttctttataacgtgtctttcaagagtgtcgctaccagatttctcaggtggcttcaagaagcttctatgttgatggttgagacgacatgcagttcattaggtggggtagtgaacgccatgccgtttcattttaccatggacttcgttaatgggccttaatacaccatgcaattaatcacgtgttgtataatgaacacttatcttttgttgataaattcaatcttaatcatgcatcagcaactattcttcattatctaaattttgattgttggtgttggtccctgtaagactagagttctcttctcacaaacaaattattaagttatagcaatgaaaagttacactctttattgaattttaaccaagaagtcgaagatgacacgggatttttagtggtttgatgaacaagttattaataacaattaatctaagatttttgtgtgaaaagttgcaaatccctttctcgattgaagatctagaaacggcgggaaagaagcaatgaaagcaagtggaaactggaaatttgaagaaaatcgaaggaaagttgaatgaggtgggttgctttggatttgaaactaatattaatttttgggaagaagaagagtcggattaatatccgattaagatagagaaaataaaataaaaaaattacattagtatagttttttaaagagcaaactctttttttgtgataaatataaagacaaaaaattcgtatgggaaaattgagaataaataaagcgcaacctaaaataaataaatgataatagaaatttataactatatacattaatgcggatacatgacattcatgatcagaagaatcaaactattacgtacaaagagagagaaaaaaaatcattgaaaacatatactaaaactcaagattaaaacatttcttttacatgatgttcaatatcattgcgctacgtatgactggttcatccagtaaggtcgtcgatctctcccatttcatttgtaggctggtttgatgtagaatcattgtccatctgttgtgtgaacagagttgacggtccagtccccatagtagccactatcatcaaaacatttaactagtcacatctctagagtagatagagagattagccatgcatgaacaaaacttcatatatgtttagaagaaatggatcaaatatataatcactctatatataaatacctgtggacgtaggcatagccaaggcttgcagcctcactttgcgacgattagctaagattatagcgatgaacacatatgcgacaagaacaaacgcaaccggtgacactacaccgagtataattggcagtttactgctctttccattggttgatccacctgaccccataacaaatgtaattttttttacttgcataatatgcataactaaatgttttttttttcttttcttcataatattcatgttatgatgattactgagagctttttctaattaacaaacccataagataacaagataaaatgaatagaaagatccaaatacaaacctggactcacttcattgctacctccagttcctcctttgctagtcccacctgagcctaacacaaataaaattcaatgtgactctctttttttttcactcaaacttcaaaggtgattatataatctaaatatactaaaagcttgtttgttttggtaattcgtcgaaaaatagagtaattcattaaaaatgcattccaagaaaacaaaccagatccggatccactgctcccagatcctcctcctccacttccaccggatcctgatcctgaaccggaaccagtttcgtttccgcctgtgctttcgcttgtacccttactaattacataaagctcggccgcatttatcatgggcggtaaaagcgcactagaagtggaccagagcgtcagtagggtgcttgaactggccaccacatctctcacgaccacttgagttgcttttccaaacaaaggcacaacaggacccctaccaacttgcttaccaccaaagaaaatgttgaacgatcgtaaacttgactctagaggctccgagaaatacatagccaagtacaccggaactcctgctgaaggaagagtagggtcgactaatgataagccttccccggtccaagagttacggaggacggactcaggcggcttgtttgatgcaccagaggtatcaatggatacagccgtggactgtattcccgtcaccaatatgtttatctcggatggaagccaaaacctaccttgaagatccgatctaaccaaaaaagaaaaacattcttcgtaaactagccaaacccgacaagttattaaatattgtgtataatcaatctcccggcaagttgacataattatgtctcagtcagtgccccatactaattagaaattttaagctatgagattatgagactatgaagtaattgttctatctaatccttggtgatgatcagaatgtaatcgtgaacaccaaaactaaaatatataatcatgtacaccaaaactaaaatatataatcgtgaacaccaatttctaattccaacgctgctttatttaaacacattgtaattgtgaacaccaaaactaaaatatatatatattgagacatatgtttatgctacttatacacgtaatatcgatgttaccttagaaattctgttgcaccatacgcacgtcgttgttggtaaaataaaccttcaccaggaccaagctcggcatacatgccatcatccaagtcgacaacttcaatggaagacacaaaagggtttgatgatgaagaagtacgtacaaaacagacgctggtctctccaccggccggggaaaatatcaactccagaaggtaaggttcgaatgctgaggatatcgatagggtgcctcggtgtttcccttcaaacactacgctgaaggatggggttgaggacttcccgtcgtaattcccgtagtaaaacatggttctcactagaacttttccgccttttgtaaccggaatgttggagtagcaattggagtcgcccgtgggaaagtaccgaagtgtggtgagggatttctcaacggtggtggacgaaatagtagccgagtctccggatgtgatgaagtcttggtctccgacccattttaggttgttgttgtctacgcctggcaatgacgttccacagtctatgtttacgcctgcatgaatcatgatcgctaagggttaaatacataaaaaaaaattcttcctaaaattaggtggatctacatgattaagggacattgtttaacgctttatgtttgatggatgttgtgaccaaaggataagaaaagttcctttttttgtaaacacttttatgcaccccttaaaagaatgtggattttgtgacttagaacacactttaaaacatgtgcaaccaaaacaaaaacatacagaatcccttaattatctagatcggacgaagatgttcgagtttatggcgaaatcccagactcttcctgcttcagcttacgtaatagcctaataggataaagaaataagtacttactggatagagagagggttaggaaggaaagaaagtagagaagacaaagcaaagcagcacccatggcaggtgctaatatttcaactaattaatgtttcatacaaaatttatatagacacccgaatatatttacgtcatctgtgtatatagatgttatatatgttatttagttgagctgtcagttagtattttaaaaccaagttgaaatcggcaaaataaataaaacttgagaacatttcttaagagttttgacctatttttatgttccagcgggaaacaattggtacttgaagaacgggcaattacaaaatatttacaacatgcatttgatatttaatttttctaaaacatgctaacaagttaggaaattcatgtccaatgccaattagattttgatattagctatacacaatttgaggccttattttaccaaagaaataaaaaggagaataagttgaggccttgtgatctaagttggcgcaaatcaataacgatgcatcagtcagtacaccataaactcttatgaaaaatacttggcttcatccctagaaccttatattcatcttttttattttagccaattaaaatttgacatctaataataataaaaagaatttaatttaatcataaaatctaatttgccactaaaacgaaattatgtatcggtttggatttattagaaaaggtcagaatttagattttatgattaaacgaggttaaatatcggtttgagtttagaaagtacgattagggtttagattttatgattaaacgggttaaatattggtttaggtttacaaacagatttagattttacaattaaacgaggttgaatgtcggtttggatttagaaaatacgattagggtttagttttttttacgattaaatgagtttaaatgacggtttaggtttataaaggagaattaatgtttaaattttgtaattaaacgagattatatatcggtttggattataagtatagctttaatttaatatgtaatctaagtaggatttgacatgacatgtttttattggttaatgcaaaaggaggtgaataaaagggtttcatccctagaagtgaacccaagttttgttcaactcttatttaacgattgttttttacataatattatttagatagtattgaatataattgcaaatatatcagaatttatgtaatttcaaatttttttatgtttcaataaaaagtaaatttatcttttttgaatgaatgtaatatttattcaccaaaataaccagtgttatatcaggtacatcttttctgaattttcaatactgttgggtacaaaccaaaggtcccacatcgaaagtttagaaaaagagtttctaatatataagctaagtccaactccaactagtatgaggccttttgggaaggaacccaataataaatccttgcgggcttgagcatataagcccaaagaggacaatatcatactaaatgagagttggaatgggcttagaaagctctttaaatacaaagcaatatttcttaatgcaaatgtagaggagtgccaccagcgttcgagcaaaatattattactccatggagaaggaaaataaatctattctctatgtgaaggaaaggatgtctttgatggttataggaattggcacaacagcacgagtgatgccacatgagaaatgtggcaaataaaaaagttgacaactaatttccatattaatgttgttcaccttgaccaacatacgaatcattcctgtcactggccatttcttgtccaaatagaggcgacgtccctgtgcctatcccacgctcttgaggacatagaagagaccaaaaaccattattaattacttgtcaattatattccaatgtttaatctaggaacatgtatataacgattaatcaaccatatacctgtggaagtagttggtgctgtgttggacactggcttcgcattttgacgctttctcaaaatattaaccacaaacgctgaccagagaagtacgaatacggaggcgaatgtaacgcctagaatgagtggtaagctgctctttttctttcctccttttaaatttgtcccacctaaaatgtcatagaaagggttattctatttagtaatataagtaagcagggaagtataatataagctcatttttttgtctaaaaatgaagttattatttttatctatatttagtaattaaatgctataatatccaaaaagattatacaatgaaatgatttagagttatatgattatatcttcactattaaactatctttatatgaataaattaattttatttactacctttaagaaactcaatacacttttttgggtatttttcttcagtgttcagataatacccaaccttttagaattcgtttgtagatgtttatttctgtcattttcgtcacttttttaacgtcagaaaatgactacactattcattaacttcaaaatattgcttctttaaattcatacgttttggttgtttacaaaaacatgggaaaatttggtgaatattttgtgtgatttagtttgtttgattgatttggaagaaagaaagaagttatctacataaaaatcatatacagtacataggttgaatagaaacttaccattattaccaccaccgctttgcccctcgccaccaccgttatcaccaccaccgttatcaccaccaccgttatcaccaccaccgctttttcctccgcttccaccgtgctggttgttacttatggaatatagctccaaaccattgatcatggttggcaaaaccgagtcatcagtagactttaagactatttgggaccccgaagtggcctctacatctctcaaaacgagttgagtcgctttcccaaaaaccggtacgatgggatgtgaacccacttgcatgtcgtccaagaaaacgttgaacgatcgtttctgggtccgacctagactctgaggctccgagaagtaaagagccaaatataccagtgtagcagttgaggggagaggcaggtcggagatgattaagccgtctcctgacaatgccttggacataacaatctctggcggcttgttagacgccccggtgatgtctatagatggggctgaggtcgatagatcggtcagtgcggtgttgtctccggacgctgacggagaccatagcctaccgaaaggatctaacggatagctaaaataagtttccaaaaaaccaagttaaccaacaatagaaaatttataattactaaacaaaattttgatatatgtacttgaaattatataaagagttatatatatatatgaatcagtaaatgttatctttagcaaggatcgaaatcaaataccaagaaaatcaatgttaaggatgaaaaacatatgctattttatcaaaaaagaaaacaatatgctaattgctacattgctaacgagaaccccaaacattgcatgactaacgtttttattttttgcatgactaattaactttgtgtataccttataagctttttggctccgtacgtaattctttgatagagaatgagaccttcttcaggaccaagatctttgtacatgccgtcatcgaagctgtaaacttcaatggaagatataaagggttatcggacggagacgtacggagaaggcaaacgctgatattctcactcgccggagcaaaaatcacctcagagaaataaaatgtgtcctcgtcgtcgagtaacgactcagtaatatcaacagaatcacggtgtttcccgtcataaactatgtcgaaagatgtcgaaactatgtcaactttgtcatcgtagttctcgtagtagtacttcgtcctcacgagggttttcctgcattttgtcaccggaatgttggtgtagcagtttgtttgaccggttggaaagtaccggagagtattgatcggctttgtggtgacgtccgtaatattaatggactcgccggttgtgacgaagccattatctccgacccatgttacgttattggagtccacgtaggatcccgttgttccacagtcaatgcttatacctaacgataaaaaaaaaaaaaaatcagtaaattatatgaacaaagtttatggacaaagtcatcttttatcattcatgtgcaacgtaaaaatttatatacacagatatataaatggggacctacaattttttaaaaaaaattataaacatatcaaaatactagaagttgtacacgcgatgtgtggattttatattcggttttagttttgaatatagaataatatttatattaaattatttataaaatttatttataattgttaatatatcgctcaaaataattaataatagtaattttgatgtttataaattatgattttttttacaaagacattttagttgattaaaagtttgcattcaaattttttttctttttatgaaaacagtatgttttactatatataaaaaaataaacataaattatttagtttttttttgtgaaaatgcaaatgcatgtattacgaattgttttgaaattcaaaacaatagatgaaccttcttcacatttacaaatttaaagcctatgatttaagataactttcaatgaaaaaccctccaacttgactaaagatctcagatgtcggttaaaaaaataataagtctataaaatttgttaaatgtattgaaagacgttaatttctatatatatttaatttttttaaaattgttaatataattcaaaatatttaatttggaaagacaaataaatagttatattattattgtggtcatacctgttattatcgctccatcattttttgagactaactaaaacacttgcctcaatttttgtattttatgaataatcaaaactttgattcttgccttctcttgcaattgactttactatccatagtatactagctttttctttcatatccatttaaatggtttaaagtgcatttgatgcctaccaaaaaaaaaaactaacaaaaatatataagtaagactcaatataactattttagaaactttaaacaatgtgaaatcatttacaaacacttacaaaaaacgaaatctgaaagctattatgagtccaaaccttaaaagaaagagacaaattgataaggttgagactcttgcccgttttgcttcctctttcatatccatttatggtttaaagtgcatttgatgtctacttccaaaaaaaaaaaagatgcaaaaatttctcgatttacatttagaacaaaacaaaaacatgtaagtaagactcaatataaccattttagaaacattaaacaatatgaaatcattcacaaaaactaaaagaaaaagaaaaaaaaaaactcttgccgtaaacgttggtgataccgtaaatgttggtgatacaacaaaccatcttccatttttctttcagtaattgagtaacttcaattgtcaaaggaaacaaaagcatttgtaaatatgtgtgtgttgtgtttgtgtaaatatttgctatttatattagaaaagtagattgttagggtataactaataaaggttaataattatagaagaacgtttacaacacgaacgttacatgagtaacaaactaataatatctttttttaaaacgttacatgagacattgagtattcaatctcattgagccactaataaccttaatgaggtttaatcctaattttttttctctcgttcctcttaacagttatcaaaactatggtcatttgagtcttttttaatcaggtgagctttacatctatttctcatttattttttattaaatcatatttttaaaagcatatgtagtatttaaatattgataagtgatacatcataacatatatactataattactattcttttatcattgttttaaataaatcacttccaaaataaaatgatttggaactattatatatgagtttatatcaacaaactattttgtaatttactttatcatacatttattttgtaaaaataagatatgatatgtttattaatatatacatgcataaataacatagaaaaagaaaaactgttaaaatatgagcaaatgtaagatatcaaattttacagattttttaaaaatgtaatcatataatactgaaacaaaattattttaattaattattgtttaaaagaactaaaaatggaaaaaaatcttataaaattggagaattatttatagttgtgaactattaatgtgcagtctaaaacataatatcatgtcaaaatttaaaagattttattttgcaattagttaagagagttgcaattatgctagaaaaaaaattatttcaaaattgtagtttaatatgtagtaattttatagtttaatgactatttttctaaatatatgatatatatattaataaattatattagttaaatatgagaaaatgtaagatatcaaattttaacagatttttaagacatttaatcatataatattgaaacaaaattattttaattaattattgttaaacgaactaaaaatggaaaaaaaatcttataaaattgaagaattatttatagttgtgaactattaatgccagtctaaaacataatatcatatcaaaattttaaaagatttgattttgcaattagttaagagagttgcaattatgctagaaaaaaaattatttcaaaattgtaatttaatatgtagtaattttatagtttaatgactattttctaaatatatgatatatttattaataaattatattagttaaatatgagtaaatgtaagatatcaaattttaactgattttaaatttatttaatcatataatattaaaacaaaattattttaattaattattgtttaaaagaactaaaaatggaaaaaaaatctgttaaaattgaagaattatttatagttgtgaactattaatgtgcagtctaaaacataatatcatgtcaaaaattttaaaagatttgattttgcaattagttaagagagttgcaattatgctagaaaaaaaatcatttcaaaattgtaatttaatatgtagtaattttatagtttaatgactattttctaaatatatgatatatttattaataaattatattagttaaatatgagcaaatgtaagatatcaaattttaacagattttaaattttttaatcatataatattgaaacaaaattattttaattaattattgtttaaaagaactaaaaatggaaaaaaatcttataaaattggagaattatttatagttgtgaactattaatgtgcagtataaaacataatatcatgtcaaaatttaaaagatttgattttgtaattaagtaagagagttgcaattatgctaaaaaaaaaattattttaaaattgtagtttaataattttatagtttaatgactatttttctaaatatataatatatttattaataaattattttagtcaaactacaattaatgataagtacacgtgtcatcaaagtagagtgccaaatgtcgcattggtaggcaatagaaaaaaccttctcttattatataagatttgtagtttaagtttataccaaaaaatgatttaaaataattatatttgttttttatgtattataaagctgaaacaaatctgaaaaaaatcaaatccaaccaaaccgattctttaactggactgcccatccctaaaccaaattccatttatcaaactaaacagttaaggagattttagacattctattagttgtatacttgtaaaaacatttattgtggtccatattcatttccttcatcacaaactgtaacacccttttcgatgtctagatggcttctaagtttcaattacgtatacgttaacccataagggttgattccattatgttcattgtagtaagacgatgatcatgaatgcgaaagtgatacaactatatatattgtttcttaaaaaagccttgtaaattaaatatataaaaaatatttaccattttgatcttgagcttgaacaatgtgaataatagccaaagttgatataaatgcgagcaacaaaaacctatggcgactctccatattctcttatttccaaagcactgtcaatgcaacttctgcttcaaatcaaaacaatatatatgatgtcaatatatacacagtggaagcacacaactattgtgccacattacaatacaataaaagcctttccaaagtgaaacctcaaaatacgtgagaacatgactaattattagtatacaaagagaagttcaatgattaaatacgtaatctagtgggcaataagatgttttcaaattatatatcattcctcctccctcatataactctgttaggctaaaattccattcatataccgtcaattgctaattaatatttttcttatcagtcacactgcaaattaatgttgtatcatatcatttcagtgtcaatattatctgtaagatttggttttgacttttgacattgatatatgttataacacaattttgaggtcttattttatgccccaaaaagaacaacttgagacctgattttggttggcttgcgtgcgagctaatcggagattgccttttctggtttgtttcgttgacaccttttgaacaattcatcacatattggtaagtagggtccgcaacacatatatattatgaatataatttttgaagtttaacaagaattgtatcaaagaattcattatagttaattggtctagctcccccctcgaccacatctccccactatcccactcatttgtctaactcatagctaccaccaactttcaataatcattaaatagaatggttttgaaataattgttttcatctaattgtttaatttgttcccggatggataaggatatggttaaggctagttggttcgaattgtcattcattaatttacattttacatataaaatatagttttgagaaagtttagcttcttttttatgaccaagaaatcattgatcttactgactgatcggaagtaataacactatataactttgctgactatagttattctgtgagcaagaaatcattattcttcgatcgaaaacaatggtaattaaacaacgtttgcgaagagttttggataaggttttagatattgcattgcatcacttcttatataagctttcaattacctttctaatcttatcagacttcttgtcggatatcatataattaaacttttattaaaaagaatcataaataagaccaaaaaaggtgtagaaatagaataacacatggatctagctcgtccacaactagtttccatgttcatcttgaacaacatactacgaatcaatcttgtcgctgaccgtttcttgtccaaatagaggcgacgtccctgtgcgtattccatgctcttgaggacataggagagaccaaaaaccaatatgacctgtcaattatattccaatatttaatctaggaaaaatataacgattacgcaaccatataaatacctgtggacatagttggtgatttgttggactgttgcatcgcattttgacgctttctcaaaatactaaccacaaacgctgaccagagaattacgaacacgaaggcgaacgtaacgcctagaatgagtggtacgttgttttttttctttcctcctttgcatgtataattaagttaattatttgtctaaaaatgaaaattgtatccttatctatacacgttgataaaaaaaaatctatatttagtaattatattttctgatatataataatatccaatcaaatgatataatgttacctatatactgttaaactttctatatatgagttataattaatttaatttgttttgtttttgaaactcaatacaccttttaacgtcagaaaatgaaaacacattcactatcttcaaaatagtacttctttaaatttaacttattaccttttggttgtttactaaaacttgggaaaatcttgtgaatttttggatgtgatgtaatttgtttaattgaccaggaaaaaaagttattaataaaacatttacataggttcaataaaaacttaccattattactactgccgctttggcccccgcctccgcttccatggtccttgtagttacttatcgaatagacctccaaaccactgatgatggtcggcaaacccgagtcatcggttgacttaaaaactaactgggactccgaactggccattatatctcttaaaacgacttgagtcgctttcccaaaaactggtactatgggatgtgaacccacttgcatgccgtccaagaaaacggtgaacgatcgtttttgggtccgacctagactctgaggctctgaaaagtaaagagctaagtataccggtagaagggtagaggggagattcaggccggacattataaagccgtctcctgacattgccttcgtcataacaatctctggcggtttgttcaacgctccggtgatatctatggatggggctgaggttgtaagatcgatcagtccgggatagtcttgggacccttttggggaccatagcctaccgtaaggatctaacgggtagctaaaataaattttgaagaaaccacaattagaaaaattatgggtctcactttagttaataaattgacatgagactttaaagatactacgactaattgatgcatgtatgaataataaatccccaaacattcgaggaccagttttgtgtgtaccttataagctttgtggcaccgtacgcatttcttttatagagaatgaaaccttcttcaggaccaagatcgtcatacatgccggcatcgaagcggtaaacttcaatggaagatataaaagggttatcggacggagacgtacggacgaggcaaacgctgatattctcattcgccggagcaaatatcacctcagagtaatggaatgtttcctcgtcgctgaacaacgagtcaactgtcatagcaatagaattacggtgtttcccatcgtaaaccacgtcgaaagatggtggcgagtaattctcgtcatagtttttgtagtaaaatttcgtcctcacgagggtggtccggccttttgtcgctggaatgttggtgtagcaatttgtttgacctgttggaaagtaccggagggtattgatcggttttttgacgacgtccgtgatattaatggactcgccggtggtgacgaagcctttatctccgacccatgttacattgttggagtccacgtaggaacccgttgttccacagtcaatgcttatacctaatgatagtgggaaataaataaccgatcagtaatttgaaaatagtttgatttggtcagattattcagtaatcaaaccccattggtcaaaaaaaaacaatgaaggaaatttagacattcttaatatgttaggtgcatacttgtaaaagaagaagactatcttgtgatacaacttcaatgtaaacttcttttctttgtttttggtaaatatatatttccttcttcacaaattgtacaaccttttttggtgttttagcaatgggtttcaactacgtgatacaatgaatatcttttaacaaaaaaaaaaaaaaaaaactacgtgatatacaacaaaaaaaaactcgtaaatggaatttataaatgtgtgtacgtaccttcttgagcttgaataatgtggaattggtgaactgtaaccaaagttgatagaaatgcgagcaacaagagcccactctccatattttctaactcaaggagcaaaatcaagacaagtactactataaatcaaggatatgtaagatatatatacacaagtgggagcacacaactatttctcgacacttcaagaaaataatttcccaaatgaagccacaaagttacgtgagaacatgacttattattaagatgcaaagagaaatacaatgattaaatacgtactctagtgggaaataaaatgttttttgtttccttttctaataagtttagaagccctattatattcaagtggtctagtttaatcataaaaacctatagtaaatcgtatgaaagacattcgaaacttagtagttttctattgggatttgaaaccgtaaaacaaaaccgaaatttttgtatgatatgttacaaccgatgactcaaataaccttgatactcaacacaattcagctcaaacttaagaactttccaagatttcaatccaaaataaaacgcataaagagataagcgaccacacaagacaacacgcgattgtttatccaattcgaatcatcggtatgatgaatctacgtctggggccagattcaatccatcaatccactacgaagaatcaatcgtttctctctcttgagctcaaaaaagagcttcagaccatctccaataggaggatgtaatcaaaaaattgttgggttctcttgtttaatgacaataaaaacaaatcaaaactgataaaaatcaagagagtcggctttctggggagaagataatctggacataactaggatttgtattagataactcctagtacacatattttagataactcctaaaataataagcctaatttcctttttcttcattagtaacttgctcttcaagtcacttatccttcaagcttaatccaacatagtttccatgttaatgttgttcattttgaacaacgtacgaatcattcgtgtcactggccatttcttgtccaaatagaggtgacgtccctgtgcctatcccacgctcttgaggacataggagagaccaaaaaccattattaactacttgtcaattatattccaatgttaaatctaggaacatgtatataacgattaatcatccatatacctgtggaagtagttggtgctgtgttggacactggcttcgcattttgacgctttctcaaaatattaaccacaaacgctgaccagagaattacgaatacggaggcgaatgtaacgcctagaatgagtggtaagctgttctttttctttcctccttttaaatttgtcccacctaaaatgtcatagaaagggttattctattaagtaatataagcaagcagggaagtataatttaagctcattttttgtcttaaaatgaagtttgtatttttatctatatttactaattaaatgctataatatccaaaaagattatacaatgaaatgatttaaagttatatgattatatcttcactattaaaccatctttatatgaataaattaattttatttactacctttaagaaactcaatacacttttttgggtaaatgaccaaaaaaaacctgtatttttcttcagcgttcatataatacccaaccttttagaattcgtttgtagaggtttatttctgtcatcttcctcacttttttagcgtcagaaaatgactacactattcattatcttcaaaatattgcttctttaaattaatacgttttggttgtttaccaaaaacatgggaaaacttggtgaatattttgtgtgacttagtttgtttgatttatctggaaaaagaaacaagttatctatataaaaatcatatatgcagtacataggtcaatagaaacttaccattattaccaccaccgctttgccccccgccaccaccgttatcaccaccaccgctttttcctccgcttccaccgtgctgattgttacttatggaatatagctccaaaccattgatcatggtcggcaataccgagtcatcagtagactttaagactatttgggaccccgaagtggcctctacatctctcaaaacgagttgagtcgctttcccaaaaaccggtacgatgggatgtgaacccacttgcatgtcgtccaagaaaacgttgaacgatcgtttctgggtccgacctagactctgaggctccgagaagtaaagagccaaatataccagtgtagcagttgaggggagaggcaggtcggagatgattaagccgtctcctgacaatgccttggacataacaatctctggcggcttgttagacgccccggtgatgtctatagatggggctgaggtcgatagatcggtcagtgcggtgttgtctccggacgctgacggagaccatagcctaccgaaaggatctaacggatagctaaaataagtttccaaaaaaccaagttaaccaacaatagaaaatttataattactaaacaaaattttgatatatgtacttgaaattatataaagagttaaatatatatatgaatcagtaaatgttatctatagcaaggatcgaaatcaaatgccaagaaaatcaatgtcaaggatgaaaaacatatgctattttatcaaaaaaaaagaaaacaatatggtaattgctaacgagaatgaaatttccctatttgaataccacgattatttgattcatatatggaaccccaaacattgcatgactaacttttttttttttttttgcatgactaactttgtgtgtaccttataagctttttggctccgtacgtaattctttgatagagaatgagaccttcttcaggaccaagatctttgtacatgccgtcatcgaagctgtaaacttcaatggaagatataaaagggttatcggacggagacgtacggagaaggcaaacgctgatattctcactcgccggagcaaaaatcacctcagagaaataaaatgtgtcctcgtcgtcgagtaacgactcagtaatatcaacagaatcacggtgtttcccgtcataaactatgtcgaaagatggcggcgagaacttgtcatcgtagttctcgtagtagtacttcgtcctcacgagggttttcctgccttttgtcaccggaatattggtgtagcagtttgtttgaccggttggaaaataccggagagtattgatcggctttgtggtgacgtccgtaatattaatggattcgccggtggtgacgaaacccttatctccgacccatgttacgttgttggagtccacgtaggatcccgttgttccacagtcaatgcttatacctaacgatagtggaggaaataaaaactgatcagtaacttaaaaattagattgatatatggatacatatatataacattgggaggtttttaaaaattataataatctatatatcagatatttatagtttaggtttcaacaaaacaaccaaaagaagaacaataaaaactgatttaaaaatgattttatatggatattttgttattatcgaaaaaatctgaaaaaaactaaactgaaaccaaacctaatctttaactagactgcccatccctaaatcaaactacagtgatcaaacaaaacaattaaacacagcgggaaggagattttagacacttttgtggtctatattcatttccttcttcacatattgtagtaacacccttttcgatgtttagatgattttagcaaggacaattctcaaaataccacatttaagtttttgttttttaaaataccacttaaatataagtttttagtaataccattgaatgttttaggtttcaaaagtacaacaaaactaaaatttaactttcaagattcaaaactaatccttgaagcctaaactaagcatgccacttcgaattaaccaaaccgaaccaatcagatattttggttattatatcggttaattgcattttaaaattcttccgaaattaatttctatggttagtgtaaaaaaaatcaaactaaaccgaaattaaccataaattattttgcgttctaaatcacaattttatgaaactaatagtagtagttattgcaacaaaacttacaagtatggtattttaaagaatttatcttttaccaatggctttcaagtttcaactacatatgtcgtcaacccataagggttgattccattatgttcattgtagtaagacgatgatcatgaatgccaaagggatatacaactatatctaacaaaaatatttacctttttgatcctgagcttgaacaaggtgaacaatagccaaagttgatataaatgcgagtaacaaaaccccatggggactctccatatccccactgtgtatagacatcatgtattttttcttgatttaaagcagaacttgcattgacattataagagaagacttttcagagtaaagcctgaaaattacgtgagatcatgactaattagtaggatacaaagagaaattcaatgattaaatacgtatctggtgggcaataggatatattatttttgggttatacgtcatattatattcaagttaggtagtttatcaaagtagtatcatataaacctagtagaatgaaatttattaatttaagcctaagagaaatattccgttcatatactgtcaattggaaattaataattttcttatcagttaaactggaacttaataatatcgtatcatatcatttcatcaatattatatgtaaaatttggtgttggcttttgacattgatatacatgtcgtacacaattttggtgttggcattttgtcaccggaatgttggtgtagcaattggtttgaccggttggaaagtaccggagagtattgatcgattttcttacgacgtccgtaatattaatggactagccggtggcgacgaagccattatctccgacccatgttacgttgttggagtccacgtaaagatcccgttgatccacagtcaatgattatacctaatgaagtaatgatagtgggaaattaataaccgatcagtaatttaaaaggaagattaattatgataacacgaagattagtggatggagagatttgcatttgttaatttactttagcatgtgcaaccgaagatagttatagtgtttgccccaacaaatgactataagatcattcacatttgtagttatacttttctaaagtaactttcaacataaagaccatgatggttaattacacgaatttttctgactatatcaagaaattattgatcttgataattacaatattattggatcgaagactatgataattaacgagttcatgtaacttgtagcactcttccaaaactaaaaatttggataagattttatatcagttgattcttcttttttttttcttgtgggtagtgtaaaagaaaagagctatattgtttttttttgtaggaagaaaacagcgagtttcgaatcaatatcaatctctataatgtctcctatcatgtactattctaatattctcttgtaaataattagaattaggtccatcttgtgtatataatatatacgtctgatgtctactgaagactatatcagagcaataacatattttccaattctaaatttactgtcacattatcatgcatcacgttttcaaattattctttccactcttggtcggatacagatagaaatacaatagaacttttttacaaactaaaagaatcataaatgtttggaaagaaaaaaacatgaagaataataacacatggattgagctcttcaataactagtgtccatgtcaatgatgtccatcttcaacaacatatgaatcagtcatatcgctggcaaattgctgtccaactagaggcgacatccctgtgcctgttccatgctcttgaaaaataaattcaaattattacgtacttgtcatttatattcgaataattaacatatagtaatttatatttcaattaacttaaccatacctgtggacgtatttggtacagtactgttcgactgtgacttagcattttgacgctttttccaaatagctgcaaacgctgacgcgagaactgcaaaggcggaggcgaacgtaacgccaagaatgagtggtaatttgttattcttcttccctccactgctttttgccccacctaaagtcgtcatataaaggcgtcacgacatgcacaaaagaaaaacttttctaaaccttatctaaaatttgaaaattaattgagatatatctaaatttagtaatttattaaatgtgctgagataaagtggcaaagaatgatccaatcaaatgattaaatttcatatcctcactgttaaatttttatgtatatgaacttaaaaaaaaaaaaaaaaaatcagtataatctctgctagaaaataatagataccatttactaaaataaattaacagaaaatatatatatttaataatgtatataaataaatagtgttgttaaagagtactaaatatctatgttatccatgtaggttagatatatatccaatatctttagactttagatacatagtgtaccattttttattttccgaaaattctatttggtgagataattttcaatttgtgataactaaaaatcattaaaaaaaaattaaaaaacaccaaagttaaataacttaataacaataaagagaaatgtatatagagatttgagtaaaaaccttttcccaaattttttgcttgtttcgctcctccagaaccttcattcattacattataaaatgaaaataattagtatcatccaaagcatttcatactttagatttaatcaagttgattttttctttctttgcattgagatcattccttcctaattattgtccactaaaatcaacatcaatttttcatgttcgagtttggttatttatttataacttgacaaattatcgttatttaattacttgaattaactatttatagtttttatgtattggtccaataataaattaactaaccttccgaatcatccgtactaccgccgccttggtctccaccgccgcctccactgtctggactggtattacttatcgagtacagctccaatccgttgatgaggggtggcaaaacggagtcatccgttgactgaaagactatctgggacgccgatgtggccactacatctctcaaaatgaattgagttgctttcccaaaaaccggtacgatgggacgcgaacccacttgagtgttgtccaagaaaacgttgaacgatcgtctctgggttcgacctagactttgaggctctgagaagtaaagaaccaagtatactggtactccggttaggggtagagtctggtctgagagtactaagccgactcctgataatgcctttgacataacaatctctggtggcttgttcgacgccccggtgatgtctattgatggggctgaggtcgttagatcggtcagtgtggagtcttgggatcctaacgctaaccataccctaccgtaggggtctaacgggtagctaaatatatatcaagaaaccaacaatatgaaaatatattaattacgcaataatatcacattgaaagaaagttgtcctttctaattgatacaattctataaatgcaaattgacgttatacaagcttttatatttgaattaataaatcttgtctagacgtatagggttaaaactacatgcctaatgaaatattagcaatggattgcagataatttaaagctttaaagaaaattaaagtcaacgaaaagacatcatataaaacttttaatactatgattattagatgcatatattgattaaaaaattctagtaaaagctttgtgtatcagtataccttataagctctttggcaccgtatgcaattctgtcgtggagaatgagaccttcgttaggaccaagatcgtcgtacatgccagtgtccaaactataaacttcaatggacgatataaatgggttgtcggacggagacgtacgtaagagacagacgctgatattcttattctccggaacatatatcacctccgagaaatagaacgtttcttcatcatttagcaacgactcggtaattacaatagaatcacggtgtttcccgtcataaatcacatcaaaagatggcggcgagaacttcgcgtcgtagttctcatagtaaaacttcgtcctcacgagggttttctggccttttgtcaccggaatgttggtgtagcagttggtttgaccagttgggaagtaccggagagtgttgattggctttttgacaacgtccggaatcttcatgggctcgccgttggtgacgaagcctttatctccgacccatgttacattgttggagtccacgtaagatccggttgatccacagtcgatgcttatacctaacgataggccaaaccaaataaaaaaaaacgtttagtagacttaaaataaaatttcattgggtcatcaaattaagaaaaatattaatgtttgtaacgtactttctcctaatgtaacggttagggctgagagagagaagagagtgatgacataaagaagcgcctccatcatcaacgagctaaatttaacttacttacatgcacacatacgtaatatatagaagcaaaaaagaaaaacaaaatacgcaatagatagatgatataattaaagtatatgttcatattgttgacttgacttattgagattgcacagctcatataatatttagttgacttgacttattgagattccacagctcatattatatgcatcagcgtgcatatatctcgattttggttttagatcattgttaatttcaacagattaaccaactaatccgtcacatttaattggttatatataacaaattgttcccgacctaatgctagctacgtgaatctaaaatattttgtgagtacgtacgtatgccatgttagcctagtttatgtagtaatttaataatcagtttagacaattgtgaattcattaaatataaatatatgaaaatatacggcactcatggatatagatcctactatatgagtctaaatcacatctacctatctttcctttttagtggtgtttaccgtgattcaataattattgtgttaaaaattactaaaaaaaatataccttgttaaaatatattcatgcataagaatatcattataaaaattcattgataaaataagtgaaaaataccttatatacacaattacacattatgtcagctttgttgtttgatgttatatttctaaatattattggccaattaatatcttctaattaaaatggtcgattatttgaagggaacttgattatttaagaagaagaattggcacttgataggtttgtccaactcatcatttggttgacttagcataaagttgacatatcgaagtcaatggctttgtttgtattcttatatagcacatagactttagagtaaacggctcacgttcatcctcttttattttataggtacattgtattagtataacatacacatgtgtatattttaatgaagtaaacaaaaaaattcaacatagtgcgaacaaagtggttgaataatttcatgtgttccgccgatctcttcgtatgatcaacgtcagtattattcataggttggaactggtgtagggctcaattgtaaaatttaaaaataaacgagaggaagcaagtgggatccaaaggatgtctctcatcctaataatctatctttgacatttggccggcctcttgttaatgcagaaccagtttgtgtttaagaatccgaactatctgttttatccacaccaaatgagaccagtccacacgaggtcttgtgtttctaatataatgccaaattgcactagccttcttcgtactagtgttttacggttgattttccagtgaatattcatcgttggttaggtagttgttgcaacaaaaccggccagccaattttcagtgacttgagattttggctgactatcataacgtacgttgaaatgtatttttgattgtggtatttttgaattcctagcatacccggcccattatgtttgtacgtatagatttctctaggaataccaatcgtttgtcaacgcatgagtataggaaaattcagtcaactattgattattgcatatgatgtttgttatatgatgattgaaagatctgacgaggatgatggaagatgaaagatgccaaatttatcatttaaattggaaacaacaaaatttatatagctatatatgtgataacacagtttttttcttgggatagtattcacaagaaaatttcacaacgacaaatattttgatattttgaataactttccaggtcgcccgcgactaggctgatccatgttgatgatgatcaacctgatgaacaacataagaatcatttacgccaattttgtttggtccgcgactaggctggtcccttgttcgaaacttaaaaccaaattaagttagtagatgcacttgttaatgggcttcatttttggttttgctttaggcagctaaatataacgagtcggccctgcctgactgactaggtcaattgctcgaattaaattttacagattaaaaacaaatattttaggaagggtacaagtgatttctaaattggatgagatttgattatttaggaagaacaattcacacttgagtttgttccaacttatttgattgagtgaatttgatctaactttttttggggttgactccatgtggaatggacattttttagagttaactgtttttgtgtttgttatgggcccatttataggaatttgagagtaaacggctcacgtttgttcattttgtttttgtctttttgacatcacattcgtccaaattttcaattgatacgttaatatatgtctgtaccataccaatatagtcatgattcatgtatattcaacgatgtgtggttggaaattccatttgttcagccgatttgcccgcaaatcagcaaagtcctaatcataggttgaaattagtgtagggttcggaggtcgactaagagatacaaagcttatgtattattgatagaatgtttttctcaagttttcttccttgttctatgattatttctattaataattttttcaagaaagagtaaccatgataagtgatttcatgatagaaccattttttggcctttgatatcggtgaattattcatataatctcaaccaagagtttgtaatattgttaaggggtgaaattgggcttcgccaatttcggcccaacccagtgactaaaacccgggcagattcggcaggaaagaattcgcctaactagtttaacacccgacccgcaaagataaacgtttggctgcgcaaaatttatttttggaaaatcacgttgtgtgccttacaatacggacgagtataaataaagaatggaaagttttgggaaggacaactttttggcacttggagaaagaacaaggcaagtcaactcgtcaatcggcaagtcagctcgtcaatcgacaagtcagcccgtcaagacagattaagcgatcgcgctcccagctcgtaattcctcttcgctgaacgcctcagctcgtcaaaatcatccaaatccctcagtcacgtcatctcgtttcgcttctcacttttcagcccgtcgtcattcaacttcaagcccagctcgcggtttagagacggattcttcaccttccctagagattcactcgtacttgtttaattcgtgcattaacaaatatgatagccgatagaatagttaccaaaacttatgcatttgagtcatgaaatgaataacttttctatgttgggttaaaaagagaaaccagtcaaagctgccgacacaaaatgaaaaatatccaacatataaagtagaaatctttcgtttttaactttcagctttagatgtgaagaagactaagataaaacactttacatagacgtgggctaacaattaggctatgggcttccaccaatcttggttacttatttaatcctatatatcatcatttcccaaacttcactattgcatctatcaatttttgccagccactaaaacaaaattaatatatttggttgcggtgtcttgttaggcaataattctatttaagaataatgtcacaaggtgcattagtatgatctttcatttccaaattaataaattattatcacatgtgtcatgttccatatggttgtacttgtataatggagtggttaaactaaatgttgtcattgtcttaaaatcttgcaaacccaaaaagatatgcataaacatacaaaaaccttataatcttctaccttttgggcaaaattttgacatatagaactcaaaaagtctatagcaaaagaccaagatttagtaagattgttatgtattagattacttataattttcctaaaactaaagtaaaacaaacactagaaaaatatagatagacaaaaatttaatttattattcaaaagtgaacacaacccaaagaggtttccattaattcaagtgctctcctcatcgatattgtcgagaattctataataaaattttcaaaattcacgcaaaaaattataatatcatcaaacaaagactttgttgcaaaccaccaccataggaatacacctgaaataaaatatctaacaattttaaagaaaaatatttatattttactattttcgacgaaaaataaaaaacagctttttgccattgacatattaaatgcaacgaataatttacgattttaatcattttctggaaattccttattttctactaaaaaaaaataatacagccagaaaattctttcttcttccttctctcttgaatagaccagagttcatttttttgcagagttcacaaagaatcaaaacttctataaccaatctgttcttcgcgagattctactctctaatacaagtacagattttgctatattttatacaaaacccaaaaactcaaaatctgagttttttttcggttacttgatctattcattacctgaatcagctcctttcatgggaccgttacttctatactaaatctcttgtcttaaaggtaaatacttttattgtttttttagaaaagtttccatctttgctttgtttcaagttcatgttataaaaccctaatttcttgaatcttgttgattgattctttttccccgatctgttccatttccaggtttattctctattgggtcaaaatgggtattgaaaagtttgaaactttcatcttgatttcaacgatttcgatcttgctttgtatctgccatggattcacacctgtggataattacttgatcaactgtggatcaccaaccaatggaacactaatgggtcgaatctttctgtctgataagctctcttcgaagttacttacttcgtccaaagagattctcgcaagcgtaggcggtaactctggctcagacatttaccacacggcaagagtcttcaccgaagtctctagctacaaattctcggtcactcgtggtcgtcattgggttcgtctctatttcaatccttttgactaccaaaacttcaaaatgggttcagctaaattcgcggtttcttcacaaagtcatgtccttttgagtgatttcactgttacgagttcaaaagttgtcaaagagtactctttgaacgtgactactaatgatttagtgctcacctttactccctctagtggttcgtttgcgtttgtgaatgctatcgaggttatatcgattccagatactttgattactggtagtccaaggtttgtaggcaaccctgcgcagtttccggatatgtcaatgcaaggtcttgaaaccattcatagagtcaacatgggtggtccgcttgttgcgtctaacaacgatacgttaacgagaacttgggtgcctgactcggagtttctgcttgagaagaatttagctaagagtatgtctaagttttcaactgttaactttgttccaggttatgcaacagaggactctgctccaagaactgtctatggtagttgtactgagatgaattccgctgataacccgaatagcattttcaatgtgacttgggagttcgatgttgacccgggttttcagtactatttccgctttcatttctgcgatatcgttagcttgtcgttaaaccagctatatttcaatctttatgttgactcaatggttgctgctacggatattgatcttagcactcttgtggataacactttggctggtgcatattcgatggactttgtcacgcagacgccaaagggtagtaataaagtccgtgtgagcatcggtccgtcgactgttcacaccgattatccaaacgcgattgtgaatggattggagattatgaagatgaataactctaagggtcagttaagcactgggacatttgtgcctggtagtagttcaagcagtaagagtaatctcgggttgattgtaggttcagccattggttcgttgctcgcggtagtcttcttgggaagttgctttgtgttgtataagaagcggaaacgtggccaagacggtcattcaaagacttggatgccgttttcgataaatggaacttcgatgggaagcaaatactccaatggaactacgcttacaagtataactaccaatgccaattaccgtattccctttgcagcggttaaagacgctacaaataactttgacgagagccgcaacatcggtgtaggcggttttggtaaagtctacaaaggagagcttaatgacggtacaaaggtagctgtgaaaagagggaacccaaaatctcagcaagggcttgcggaattcaggacagaaatcgagatgttatctcagtttcgtcaccgccatttggtttctctgatcggttattgtgacgagaacaatgagatgatactaatttacgagtatatggagaatggaacggtaaagagtcatctttatggctcaggtctacctagcttgacttggaaacaacggcttgagatctgcattggtgcagctagaggcttgcattaccttcacacgggtgactcgaaaccggtcattcacagagacgtgaaatctgcaaacatattgcttgacgagaacttcatggctaaagttgcagactttggactgtccaagactggacccgagcttgatcagactcatgtaagtactgctgtcaaaggaagttttggttatcttgaccccgagtacttcagaaggcaacagctcacagataaatccgatgtttattccttcggagttgttctcttcgaggttttatgtgctagacctgttatagacccaacacttccaagagagatggtgaatcttgcagaatgggctatgaaatggcagaagaaagggcaactggatcagatcatcgaccagtcgcttcgcggaaatatcagacccgattcgttaaggaaatttgcggaaacaggtgagaaatgtttagcggattatggagttgataggccatctatgggagatgtgttgtggaatcttgaatacgctctgcagcttcaagaagcagtcattgatggtgaaccagaagataatagcacgaatatgattggtgaattacctccgcagatcaataatttcagtcagggagacactagtgttaacgttccgggcacagcggggcgattcgaggaatctagtattgatgatctctctggcgtttccatgagtaaagtattctcacaactggtgaaatctgaaggaagatagtgaaagatttgagcaatgcagtgccaagaaaagccaaagatctgatctttttgatagaaacagagcaagcaaagtatgtaaccaggaaaaaagcatcaggttattttcagataggatctttgtctttgcttgatctgtttctactgcagatttttcatcagtgattaaacggttactttgaaaatttaccttattttgttcctctctcccttatcctgagtttgtattttattgatgttcattttgaaattgtctgaaatttgtttgttctttttactatatggatgtttaacactcttgttgtttcaattgtattgtaagtttagaagttaaaacagagtttttcatggttcttgtttggtttaagaaactgtttgatcttaatctatttcagttttctttttttgtcttggaacagtatttgtccggttccattggtttgtttctttctttcaccacgaccaagtcttgaactttaaaacaatttcagaaaactgttttattatcctcatagtgatcaatcaatattagtaaccttagtagtggacgcacaagacaaacatttccgtactagtctgaaaacaaacgtcctacacgaccatgttttgttattccgcatagcgttcttggccgccttctttctccctcctcctcctcgaaaacaactctgattgtgtctccgggtaactgcttcgccatcacctccatcaccgtcttcttcgttctcttctgttgaaaatgtgtagcttctaaggtacatctgcctacaagatatgctgtcaaccaccgtggtgcgatgctggcttccgtcgtggttgattgaccgtacgaactcggcctccgccatcggccacttgtaaagattggcgtaagtcataaccggccggacgcaaatggagtctcttttgatgtttacacaatcatctatgcactttgaggccatggtcgcttttttggagggtacttctaacttctagtgtgaactgttttccttattttttcgtgatgaagttgggtttagcttaaatatatattcatagaaaatccttatccatatcatttcttacttttattttgtgatacaaaaataccaagtcagagaaaaaagttgagaagttttctcaacttttagctatgaaagttttctcagtaatgtttctaagtttttcataagaaaagaaaataggattaatcacaaaggagaatttctccaatatccctataatatttcctcatatccctcatgcattctcaaatcttctctattcctacttatatatatctcgctctcattttctgattttctgattcatttatgttgaaagaagaatggtaaaaaattcacgtaacatgtgtcacatttcttcatctttattaaatcgttttgtacctaatctttcactttatagagtcagcttttagagtctttgagatgtatatattttcaaagttaattaggtggtgaaccttatctctcactcttagcagaaaaaaggcagtgtttcacaaggaaacttactaacacatacaactcttaatattactttagacactgctattcattctaaatgtcacaagatcttttgatagtcactaattctaaaatttacaaactgttcacggtaccatgatctcgcatgtggcatgttgctatctagcttgtctatattcgggtttgtagtaggtagctctatcctcttttcttttttttctttttttttggatttaaggaatgaaaacaagtatgtttgcacaaaataaaaataaataaataaataattgaaatccaaagcacatatatgtatattagaaacggtccatgtgtatacgagggtaattatgtagttaatacctgataaagatgtacaagtattcattgatattgaaattcaaaatgataatataaaaaaaaaactcttattattcttctctttattgataaaattacttcactgtttaagatcaaacttattagggcaagtacaagacaaacatttccatgtgaatcggaccacaaatcccttaagtgacgcccttttactcgtcctcatatctttcttcgccaacttcttcctccctgctcctccgccaccgtcttcgttctcctcttttcttgagaacgtatagctcctaagatacatttgcctacaagataaactttccaccgccgtagtacgacgcggactaccgtcttggctgatagactgtacgaactctacctcagccatcggccacttgtgaattttggcgtgagttctaccaggccggacacaaatggcattgtttttgatgtttacacaatcacctatgcatttcgatgccatggccgaatctctccaatgtttttttttttttttttgtgaatgttggtttttgctagataaaattaacaagttgtagtgtgagtaattatggagagagatttgtggtaataatatatctttttttatttttggcaacgattattattgactgaaaaagtatgactcaattaattaacgtgacttccatactttctccttaacatgtcattaagtaaacaattgtcttgtgtatgataaaggaaatatttacatgtgtttcatcaatatagtcaagaatatttttttcatagtcattaataataatcataatttttggcataataaaggaaagatttgactgaccaaaaaaagaaagaaaattttgacaacaaatttgactgatttataacaaaattatgtgtagctaatttgaaacatttcgattaatgtacctaatcagattactgaacttgttcggtcaacccaaaatcctgcttactatataacctaatcagtcgatcctgaagataataacacatcaactgattgtgataagaattaaaactcatacacattttggctaatgtagaaaatatattcaagaagagcaaaatgggcttcgaacctgattttatgatggtttggttaattagtttgtttgatttggactaatatagtaatttcatacaaattattttgtgactaatatccattttgcatgattaggccattgcttccgtatttgtcaatggacaaagatgggcctaaacgaaccaagccatatatcatttgtgggcttaggcccatttataggagaaaaagtgggtaatcgtttttctcaagtctcgttcttttgtagctagagaactttttatattcgtatgaataaccatcaaatgcgagcaattacggattagaaaacctaaaaaaaccgtcatttatttttaatttttccgtttaatacctctagtatttaatttggaaaaaaaatactttagttaattttgattacttattaaaactttcgtttttttaaaagttagtataatcttatcttcgagtttactaacggaattgttaattatggttaaaacttaactcatgttaattatgtaaataaatacgatcgcttttcttgtttatacgaatatgttgctgtagtcagatggttaaacactttattaattttttcttgagcctgtgttcgaaaccacctacctctttttaaacgtttttttttttgctgtttttttttcatcttcttcctcgactcttcttctcagttactcttttcactcaatcaccatatctatggtttcgctactcagcctttttgtcttttttattcaagtttctgacagatttacttaacaatggaagcaattgaagaattaaatagatttgggttttgatctaatctcctcaaattcatctgggtttttctaatttcaattgagccaatacttatttttctctcttctttcaattgaggttaaatcctagattttcttatttttcaattgtgaaaactaaaagagcgtaatcagaaatttcctcaattgcaatgctaaatatctagggtttacaataaaaagataatgaattttgaagaagaaacagtttttagaaaaaaataaaaataaaaaaacgtctttggaggaggcgccactcgaacccagacccaaaagaaaactaaatcaatgtttaaccatttgactacgacaacatattagtattgtcaagaaaagcgattgtatatatatttaattaccatgatttaagttttgaccatagttaacgattccgttagggtagttgacggaagttaactcggaagtacaattataccaatttttttaaaaccgaaagttttaataggcaaccaaaattaacgaaggtatttttttctaaattaaatactaaaagtattaaacgtccaaattaaaaataaatggcagtatttttgagtttttttcccgtccacataatcaacaaatctctccgctattatgaacaaacctcatgtcgtttctctcttaacaatatggattgcaaagcgtttttccggtttaaaatattatgttcgttcacgcaaacgcaagccagtatatcaaaacgcaaccgtgaatatttatccggaacaacattacaacgcaaacgcgaatacaaatcgatctgaaattccaaaatgaaatcactaaagcaaatcctagacaacactctaaaacactaaaatcctcaaccaccgaatccatagagagttcttccttgtctcttaagagcataaacaacatccatagcagtcaccgtcttcctccgagcgtgctcagtgtaagtaacggcgtcacggataacattttccaaaaagatcttgagaacgccacgtgtctcctcgtagatcaaaccactaatacgtttaacaccacctctacgagccaatctccgaatcgccggtttagtgattccttggatgttgtctctcagaaccttcctatgacgtttggctccacctttgcccaaacctttgcctccctttccacgacctgacattttctaaaggaacctgaatttttcttcggaaacttttcgatttgaagatttaattgagattgagatgatttgagaatcttgttaagaggagatgtcatttatatacaagatggatctaattgatttgaaccgtcagatgtgtttttagatctaacggttgcagataacgatccgggtgaacaatgagattacttattagccgttgatttaattttatcgacgcttaatattgtcgatccccgtgatgcctgtaagtgaaagtttatgaaaatttcaaataagcgccacggattgaggaatatagcgccaaattcttttcaccgttactaacgaaattaaatcatcatagaacaaaaaaaatcgttataacatttcacatatatatatatatatatatatattacgaacgggtaatattcatatttaacacaagtaaataaaacaaaattatttcacaatggttaactaataacataaagttatacatcgaaaggtttggtttatgtcacattagagaagatccacgtatatactatcttgccttaggcttcacatcagtatcaaaggtcacagtcacattaagctgatccgagctatgaccagagtccatgttttgattattcctacttatcctcgtgttttcagatgcaagacactctttaagattgatgattacttgagacatgtttggtcgtttgactgaagaaggatttgcgcatgacattgctacttcaagagctctccagacagagtgggtgtcatagtttccgtgaagtttaggatccacaatttgactagtatctcctttcttgatcacaaatgtaacccattctgctatgttagggttttcacgggtttgatcaatcactcgttggtttgtgataatctctagtaacaagatcccgaaactgtagacatcactcttctcggataactcacttgttaagtaatatctgtaaaggcaagaaaatggagtgtgattcatataatttacatttctttaaccactgaataaatgtaacatacttgaacatggtgcaaaatgtttaatatacttactcgggatcaagatatcctagagtaccggcaacaactgttgaaacttgagattgatcgcctcctacttgaaacgatctagacagtccaaaatccgcaattttggccttgaattc
